United States Patent Application Publication US 2011/0183924 A1 - sequence listing, part 198

SEQ ID NO: 467063 - DNA, 3579 bp, Homo sapiens
ccccttctttgggggaagagacctgtgtcagtcttggttaattgttccagggaaccttgctaacagaaacttgctcttgccttggctcttcagtagatgacctggctgtaaagagattccctggacgagccagatcattcagtttcagcgagtccttgagctccacaacatctaccagatatagcagacaagcacccatggaggcaggtttcgggcctgaagcagatcagagggctttgcaaaagacagcatagagccatcttcctgcaactttacctctttccctcagatggggagccatgactgggttgcacctcaggatactgtaatttgactccataattgcttttgctcctgaaacctgggaatcaatggaaaggcagggaatgtgcctcttctgtggccagattctgttatttgcaattaaagcaagtttttaaaaaatgcaagaggcagttgttagtcttcagggcttggcaactgaaatagctatgtggcggatacggaaaacagaggacaatttgaggatcttgctggaataataaatgacagctaccatttgttgagcacctattatatatcaggcactgagctgggtaggctctaaacttcacaataaccctgtgacttaactactttatctccattttgtagttgaagaaataagttcagagagaaagattccttcccaaggtcatgcagctagtaaatgatagaatcaggattcatagcatcactatagggggtcaatatttacacaaaaaaggaaagtcacaagcctgtttaaaatgaagtgaccaccttttcttgcatagactaaataactcgaactggcatttttaggttggaaagacagctgaattagtagttaagtctgatagccaagtaagttttaaaaaccaaagcatccaggatgcacacccctgcaccatttgctgtgcgaattaatagttctgtctctctctctctttcttttttctttttattctttgagatggattttcgctcttgtcgcccaggctggagtacaatggcacgatcttggctcactgcaacctccgcctcccgggttcaagcgattcttctgctgggattacagcatatgccaccatgcccagattatttttttgtatttgtagtagagacggggtttcaccatgtcagtcaggctggtcttgaactcctgacctcaggtgatccacccgcctcagcctcccacactgctgggattacaggcatgagccaccgctcctggcctctctttcttttttaaacaaagaactttgcacttggccagagaggaggagaaagcccattttctcccttcctaagctagatccaaataaaagaaagttcagttttcccccataactattcttgggtcatgaactttgatctggagtttgttttgtttcaggaatgtgtgcacccagcttgctgatccaacaaagtctattgcttaccagtctagcttgatgaagccttttggccagaagtcaatttgttttggatcagagaaatttcctgacaaggtatatttgttttctagtgacagaaaggcaaaggaacaagtcctagttgttgttgttgttgttgaatactaaatttaagatatgtcagcttgctttcaatgagccttgggcttctgttattgcttgagcatttggaactcgagcttccagagaaatttgaggtcctcgcttgttctctgccttcaagaaacaatgacctgattctgtctttaaaaaaaaaaatctcagaattctttttttgtttgtgtttttttttttttttgagacagagtctcactctgttgcccaggctggagtgcagtggcgccatctcggctcactgcaacctccgcctcccaggttcaagcaattctcctgcctcagcctcccaggtagctgccactacaggtgctgcaccaccacgcccggctaatttttgtatttttagtagagacagggtttcaccatattagccaggtgggtcttgaactcctgaccttgtgatccacccgcctcggcctcccaaagtgctgggattacaggcgtgagccaccttgcctggccaaaaatctcagaattctttaagactgttttaattgctccatcagtaattttgaagcactttcctttttttttttttttcccctttttgtccctttccccaagccaccaattggatggatgaatgtttgacggggaagaggaagggtaggaggatgcatggatgagtggatgagtggatcgatggatgtattgataaatagatagaaccagtcatctgaagcaacttaagaattgtagccttgactccttgagactgtagatttcgatccaggaaacatttatttagcacctgccagatgccagaaatttataccatttaaaactcagtaagtcttttaaatatcaggaaggagagaagcgacatcatgatacatcctatgggtattaaaaagccaatagaatattatgaataattttatgctaataaatttaacaacttcaacatcataaacaaattccttgaaaaataaaaagtaccaaaattcattcaagaagaaatagataccagcctgagcaacatggcaaaatcccatctctacaaaacatcaaaaaaaaaaaaaattagtcgggcatggtggtgcacacctgtaatcccagcttgtcaggaggctgaagtgggaggatcacctgggcccagggaggtcaaggatgcagtgagccatggtctcaccactgcactctagcctgggtgacagaatgagaccccgtctcaaaaaaaaagaagaagtagataatctgaatagccctatatctatagaaacttaatagtgctgggagatataggtattattatcctcattttacagatgtgaaaattgaggctcagagaagtaaagtctattgctcaaggtcatgtggctagaatatggcagagccatgattcagatccaggtcttctgattcttattccagtgtcctttctagcataccatgttgcctctaaagattgcagctccttatttactagaaaattgttcctgcccaatctacatctccacctcaccccatcttttcttaagcactatgtttgtgtttttatcagtattatattcattgtctttggaatacatgttcttgtttgtgtttggaaaaaaaatctcttttaccagcttgcactcggaccaacttggaaaaaaaaaagcttaaatgtttttgctatgtacagtttaaaaatgtgaagtttgtagctttaactttttgtaagaaaatctaataacactggcttaagtgctgacttgaaatgctattttgtaaggtttggatgtaagtaatcaattgaggtcagcagtttgtatgagacatagcttcctccattgcccccactccttttttcttttttaagtttgagatgcttcctgtgtttttatgttagaattgttgttctccttcttttcttcttcctatacctcatcacgtttgttttaaataaactgtcctttggaccacaaacccttattaacgagaacctcaatatatagcctggataatggtgttgtgaacaatc

SEQ ID NO: 467064 - DNA, 2634 bp, Homo sapiens
ccccttctttgggggaagagacctgtgtcagtcttggttaattgttccagggaaccttgctaacagaaacttgctcttgccttggctcttcagtagatgacctggctgtaaagagattccctggacgagccagatcattcagtttcagcgagtccttgagctccacaacatctaccagatatagcagacaagcacccatggaggcaggtttcgggcctgaagcagatcagagggctttgcaaaagacagcatagagccatcttcctgcaactttacctctttccctcagatggggagccatgactgggttgcacctcaggatactgtaatttgactccataattgcttttgctcctgaaacctgggaatcaatggaaaggcagggaatgtgcctcttctgtggccagattctgttatttgcaattaaagcaagtttttaaaaaatgcaagaggcagttgttagtcttcagggcttggcaactgaaatagctatgtggcggatacggaaaacagaggacaatttgaggatcttgctggaataataaatgacagctaccatttgttgagcacctattatatatcaggcactgagctgggtaggctctaaacttcacaataaccctgtgacttaactactttatctccattttgtagttgaagaaataagttcagagagaaagattccttcccaaggtcatgcagctagtaaatgatagaatcaggattcatagcatcactatagggggtcaatatttacacaaaaaaggaaagtcacaagcctgtttaaaatgaagtgaccaccttttcttgcatagactaaataactcgaactggcatttttaggttggaaagacagctgaattagtagttaagtctgatagccaagtaagttttaaaaaccaaagcatccaggatgcacacccctgcaccatttgctgtgcgaattaatagttctgtctctctctctctttcttttttctttttattctttgagatggattttcgctcttgtcgcccaggctggagtacaatggcacgatcttggctcactgcaacctccgcctcccgggttcaagcgattcttctgctgggattacagcatatgccaccatgcccagattatttttttgtatttgtagtagagacggggtttcaccatgtcagtcaggctggtcttgaactcctgacctcaggtgatccacccgcctcagcctcccacactgctgggattacaggcatgagccaccgctcctggcctctctttcttttttaaacaaagaactttgcacttggccagagaggaggagaaagcccattttctcccttcctaagctagatccaaataaaagaaagttcagttttcccccataactattcttgggtcatgaactttgatctggagtttgttttgtttcaggaatgtgtgcacccagcttgctgatccaacaaagtctattgcttaccagtctagcttgatgaagccttttggccagaagtcaatttgttttggatcagagaaatttcctgacaaggtatatttgttttctagtgacagaaaggcaaaggaacaagtcctagttgttgttgttgttgttgaatactaaatttaagatatgtcagcttgctttcaatgagccttgggcttctgttattgcttgagcatttggaactcgagcttccagagaaatttgaggtcctcgcttgttctctgccttcaagaaacaatgacctgattctgtctttaaaaaaaaaaatctcagaattctttttttgtttgtgtttttttttttttttgagacagagtctcacttagcctgggtgacagaatgagaccccgtctcaaaaaaaaagaagaagtagataatctgaatagccctatatctatagaaacttaatagtgctgggagatataggtattattatcctcattttacagatgtgaaaattgaggctcagagaagtaaagtctattgctcaaggtcatgtggctagaatatggcagagccatgattcagatccaggtcttctgattcttattccagtgtcctttctagcataccatgttgcctctaaagattgcagctccttatttactagaaaattgttcctgcccaatctacatctccacctcaccccatcttttcttaagcactatgtttgtgtttttatcagtattatattcattgtctttggaatacatgttcttgtttgtgtttggaaaaaaaatctcttttaccagcttgcactcggaccaacttggaaaaaaaaaagcttaaatgtttttgctatgtacagtttaaaaatgtgaagtttgtagctttaactttttgtaagaaaatctaataacactggcttaagtgctgacttgaaatgctattttgtaaggtttggatgtaagtaatcaattgaggtcagcagtttgtatgagacatagcttcctccattgcccccactccttttttcttttttaagtttgagatgcttcctgtgtttttatgttagaattgttgttctccttcttttcttcttcctatacctcatcacgtttgttttaaataaactgtcctttggaccacaaacccttattaacgagaacctcaatatatagcctggataatggtgttgtgaacaatc

SEQ ID NO: 467065 - DNA, 1714 bp, Homo sapiens
  misc_feature (19)..(20): n is a, c, g, or t
acaatagtcgggcatggtnntgacacctgtaatcccaggtagctgccactacaggtgctgcaccaccacgcccggctaatttttgtatttttagtagagacagggtttcaccatattagccaggtgggtcttgaactcctgaccttgtgatccacccgcctcggcctcccaaagtgctgggattacaggcgtgagccaccttgcctggccaaaaatctcagaattctttaagactgttttaattgctccatcagtaattttgaagcactttcctttttttttttttttcccctttttgtccctttccccaagccaccaattggatggatgaatgtttgacggggaagaggaagggtaggaggatgcatggatgagtggatgagtggatcgatggatgtattgataaatagatagaaccagtcatctgaagcaacttaagaattgtagccttgactccttgagactgtagatttcgatccaggaaacatttatttagcacctgccagatgccagaaatttataccatttaaaactcagtaagtcttttaaatatcaggaaggagagaagcgacatcatgatacatcctatgggtattaaaaagccaatagaatattatgaataattttatgctaataaatttaacaacttcaacatcataaacaaattccttgaaaaataaaaagtaccaaaattcattcaagaagaaatagataccagcctgagcaacatggcaaaatcccatctctacaaaacatcaaaaaaaaaaaaaattagtcgggcatggtggtgcacacctgtaatcccagcttgtcaggaggctgaagtgggaggatcacctgggcccagggaggtcaaggatgcagtgagccatggtctcaccactgcactctagcctgggtgacagaatgagaccccgtctcaaaaaaaaagaagaagtagataatctgaatagccctatatctatagaaacttaatagtgctgggagatataggtattattatcctcattttacagatgtgaaaattgaggctcagagaagtaaagtctattgctcaaggtcatgtggctagaatatggcagagccatgattcagatccaggtcttctgattcttattccagtgtcctttctagcataccatgttgcctctaaagattgcagctccttatttactagaaaattgttcctgcccaatctacatctccacctcaccccatcttttcttaagcactatgtttgtgtttttatcagtattatattcattgtctttggaatacatgttcttgtttgtgtttggaaaaaaaatctcttttaccagcttgcactcggaccaacttggaaaaaaaaaagcttaaatgtttttgctatgtacagtttaaaaatgtgaagtttgtagctttaactttttgtaagaaaatctaataacactggcttaagtgctgacttgaaatgctattttgtaaggtttggatgtaagtaatcaattgaggtcagcagtttgtatgagacatagcttcctccattgcccccactccttttttcttttttaagtttgagatgcttcctgtgtttttatgttagaattgttgttctccttcttttcttcttcctatacctcatcacgtttgttttaaataaactgtcctttggaccacaaacccttattaacgagaacctcaatatatagcctggataatggtgttgtgaacaatc

SEQ ID NO: 467066 - DNA, 2295 bp, Homo sapiens
ccccttctttgggggaagagacctgtgtcagtcttggttaattgttccagggaaccttgctaacagaaacttgctcttgccttggctcttcagtagatgacctggctgtaaagagattccctggacgagccagatcattcagtttcagcgagtccttgagctccacaacatctaccagatatagcagacaagcacccatggaggcaggtttcgggcctgaagcagatcagagggctttgcaaaagacagcatagagccatcttcctgcaactttacctctttccctcagatggggagccatgactgggttgcacctcaggatactgtaatttgactccataattgcttttgctcctgaaacctgggaatcaatggaaaggcagggaatgtgcctcttctgtggccagattctgttatttgcaattaaagcaagtttttaaaaaatgcaagaggcagttgttagtcttcagggcttggcaactgaaatagctatgtggcggatacggaaaacagaggacaatttgaggatcttgctggaataataaatgacagctaccatttgttgagcacctattatatatcaggcactgagctgggtaggctctaaacttcacaataaccctgtgacttaactactttatctccattttgtagttgaagaaataagttcagagagaaagattccttcccaaggtcatgcagctagtaaatgatagaatcaggattcatagcatcactatagggggtcaatatttacacaaaaaaggaaagtcacaagcctgtttaaaatgaagtgaccaccttttcttgcatagactaaataactcgaactggcatttttaggttggaaagacagctgaattagtagttaagtctgatagccaagtaagttttaaaaaccaaagcatccaggatgcacacccctgcaccatttgctgtgcgaattaatagttctgtctctctctctctttcttttttctttttattctttgagatggattttcgctcttgtcgcccaggctggagtacaatggcacgatcttggctcactgcaacctccgcctcccgggttcaagcgattcttctgctgggattacagcatatgccaccatgcccagattatttttttgtatttgtagtagagacggggtttcaccatgtcagtcaggctggtcttgaactcctgacctcaggtgatccacccgcctcagcctcccacactgctgggattacaggcatgagccaccgctcctggcctctctttcttttttaaacaaagaactttgcacttggccagagaggaggagaaagcccattttctcccttcctaagctagatccaaataaaagaaagttcagttttcccccataactattcttgggtcatgaactttgatctggagtttgttttgtttcaggaatgtgtgcacccagcttgctgatccaacaaagtctattgcttaccagtctagtagcctgggtgacagaatgagaccccgtctcaaaaaaaaagaagaagtagataatctgaatagccctatatctatagaaacttaatagtgctgggagatataggtattattatcctcattttacagatgtgaaaattgaggctcagagaagtaaagtctattgctcaaggtcatgtggctagaatatggcagagccatgattcagatccaggtcttctgattcttattccagtgtcctttctagcataccatgttgcctctaaagattgcagctccttatttactagaaaattgttcctgcccaatctacatctccacctcaccccatcttttcttaagcactatgtttgtgtttttatcagtattatattcattgtctttggaatacatgttcttgtttgtgtttggaaaaaaaatctcttttaccagcttgcactcggaccaacttggaaaaaaaaaagcttaaatgtttttgctatgtacagtttaaaaatgtgaagtttgtagctttaactttttgtaagaaaatctaataacactggcttaagtgctgacttgaaatgctattttgtaaggtttggatgtaagtaatcaattgaggtcagcagtttgtatgagacatagcttcctccattgcccccactccttttttcttttttaagtttgagatgcttcctgtgtttttatgttagaattgttgttctccttcttttcttcttcctatacctcatcacgtttgttttaaataaactgtcctttggaccacaaacccttattaacgagaacctcaatatatagcctggataatggtgttgtgaacaatc

SEQ ID NO: 467067 - DNA, 3639 bp, Homo sapiens
ccccttctttgggggaagagacctgtgtcagtcttggttaattgttccagggaaccttgctaacagaaacttgctcttgccttggctcttcagtagatgacctggctgtaaagagattccctggacgagccagatcattcagtttcagcgagtccttgagctccacaacatctaccagatatagcagacaagcacccatggaggcaggtttcgggcctgaagcagatcagagggctttgcaaaagacagcatagagccatcttcctgcaactttacctctttccctcagatggggagccatgactgggttgcacctcaggatactgtaatttgactccataattgcttttgctcctgaaacctgggaatcaatggaaaggcagggaatgtgcctcttctgtggccagattctgttatttgcaattaaagcaagtttttaaaaaatgcaagaggcagttgttagtcttcagggcttggcaactgaaatagctatgtggcggatacggaaaacagaggacaatttgaggatcttgctggaataataaatgacagctaccatttgttgagcacctattatatatcaggcactgagctgggtaggctctaaacttcacaataaccctgtgacttaactactttatctccattttgtagttgaagaaataagttcagagagaaagattccttcccaaggtcatgcagctagtaaatgatagaatcaggattcatagcatcactatagggggtcaatatttacacaaaaaaggaaagtcacaagcctgtttaaaatgaagtgaccaccttttcttgcatagactaaataactcgaactggcatttttaggttggaaagacagctgaattagtagttaagtctgatagccaagtaagttttaaaaaccaaagcatccaggatgcacacccctgcaccatttgctgtgcgaattaatagttctgtctctctctctctttcttttttctttttattctttgagatggattttcgctcttgtcgcccaggctggagtacaatggcacgatcttggctcactgcaacctccgcctcccgggttcaagcgattcttctgctgggattacagcatatgccaccatgcccagattatttttttgtatttgtagtagagacggggtttcaccatgtcagtcaggctggtcttgaactcctgacctcaggtgatccacccgcctcagcctcccacactgctgggattacaggcatgagccaccgctcctggcctctctttcttttttaaacaaagaactttgcacttggccagagaggaggagaaagcccattttctcccttcctaagctagatccaaataaaagaaagttcagttttcccccataactattcttgggtcatgaactttgatctggagtttgttttgtttcaggaatgtgtgcacccagcttgctgatccaacaaagtctattgcttaccagtctagcttgatgaagccttttggccagaagtcaatttgttttggatcagagaaatttcctgacaaggtatatttgttttctagtgacagaaaggcaaaggaacaagtcctagttgttgttgttgttgttgaatactaaatttaagatatgtcagcttgctttcaatgagccttgggcttctgttattgcttgagcatttggaactcgagcttccagagaaatttgaggtcctcgcttgttctctgccttcaagaaacaatgacctgattctgtctttaaaaaaaaaaatctcagaattctttttttgtttgtgtttttttttttttttgagacagagtctcactctgttgcccaggctggagtgcagtggcgccatctcggctcactgcaacctccgcctcccaggttcaagcaattctcctgcctcagcctcccaggtagctgccactacaggtgctgcaccaccacgcccggctaatttttgtatttttagtagagacagggtttcaccatattagccaggtgggtcttgaactcctgaccttgtgatccacccgcctcggcctcccaaagtgctgggattacaggcgtgagccaccttgcctggccaaaaatctcagaattctttaagactgttttaattgctccatcagtaattttgaagcactttcctttttttttttttttcccctttttgtccctttccccaagccaccaattggatggatgaatgtttgacggggaagaggaagggtaggaggatgcatggatgagtggatgagtggatcgatggatgtattgataaatagatagaaccagtcatctgaagcaacttaagaattgtagccttgactccttgagactgtagatttcgatccaggaaacatttatttagcacctgccagatgccagaaatttataccatttaaaactcagtaagtcttttaaatatcaggaaggagagaagcgacatcatgatacatcctatgggtattaaaaagccaatagaatattatgaataattttatgctaataaatttaacaacttcaacatcataaacaaattccttgaaaaataaaaagtaccaaaattcattcaagaagaaatagataccagcctgagcaacatggcaaaatcccatctctacaaaacatcaaaaaaaaaaaaaattagtcgggcatggtggtgcacacctgtaatcccagcttgtcaggaggctgaagtgggaggatcacctgggcccagggaggtcaaggatgcagtgagccatggtctcaccactgcactctagcctgggtgacagaatgagaccccgtctcaaaaaaaaagaagaagtagataatctgaatagccctatatctatagaaacttaatagtgctgggagatataggtattattatcctcattttacagatgtgaaaattgaggctcagagaagtaaagtctattgctcaaggtcatgtggctagaatatggcagagccatgattcagatccaggtcttctgattcttattccagtgtcctttctagcataccatgttgcctctaaagattgcagctccttatttactagaaaattgttcctgcccaatctacatctccacctcaccccatcttttcttaagcactatgtttgtgtttttatcagtattatattcattgtctttggaatacatgttcttgtttgtgtttggaaaaaaaatctcttttaccagcttgcactcggaccaacttggaaaaaaaaaagcttaaatgtttttgctatgtacagtttaaaaatgtgaagtttgtagctttaactttttgtaagaaaatctaataacactggcttaagtgctgacttgaaatgctattttgtaaggtttggatgtaagtaatcaattgaggtcagcagtttgtatgagacatagcttcctccattgcccccactccttttttcttttttaagtttgagatgcttcctgtgtttttatgttagaagcgacatcatgatacatcctatgggtattaaaaagccaatagaatattatgaataattttatgctaataaatttaacaacttcaacatcataaacaaattccttgaaaaataaaaagtaccaaaattcattcaagaagaaatagataccagcctgagcaacatggcaaaatcccatctctacaaaacatc

SEQ ID NO: 467068 - DNA, 954 bp, Homo sapiens
tagcaggtgtatcgtcatatcttaggggccagtcaatttcatcacaacaattatcaatataaaacccagccaacaatattcagggagggaggtcaaggatgcagtgagccatggtctcaccactgcactctagcctgggtgacagaatgagaccccgtctcaaaaaaaaagaagaagtagataatctgaatagccctatatctatagaaacttaatagtgctgggagatataggtattattatcctcattttacagatgtgaaaattgaggctcagagaagtaaagtctattgctcaaggtcatgtggctagaatatggcagagccatgattcagatccaggtcttctgattcttattccagtgtcctttctagcataccatgttgcctctaaagattgcagctccttatttactagaaaattgttcctgcccaatctacatctccacctcaccccatcttttcttaagcactatgtttgtgtttttatcagtattatattcattgtctttggaatacatgttcttgtttgtgtttggaaaaaaaatctcttttaccagcttgcactcggaccaacttggaaaaaaaaaagcttaaatgtttttgctatgtacagtttaaaaatgtgaagtttgtagctttaactttttgtaagaaaatctaataacactggcttaagtgctgacttgaaatgctattttgtaaggtttggatgtaagtaatcaattgaggtcagcagtttgtatgagacatagcttcctccattgcccccactccttttttcttttttaagtttgagatgcttcctgtgtttttatgttagaattgttgttctccttcttttcttcttcctatacctcatcacgtttgttttaaataaactgtcctttggaccacaaacccttattaacgagaacctcaatatatagcctggataatggtgttgtgaacaatc

SEQ ID NO: 467069 - DNA, 1399 bp, Homo sapiens
ccccttctttgggggaagagacctgtgtcagtcttggttaattgttccagggaaccttgctaacagaaacttgctcttgccttggctcttcagtagatgacctggctgtaaagagattccctggacgagccagatcattcagtttcagcgagtccttgagctccacaacatctaccagatatagcagacaagcacccatggaggcaggtttcgggcctgaagcagatcagagggctttgcaaaagacagcatagagccatcttcctgcaactttacctctttccctcagatggggagccatgactgggttgcacctcaggatactgtaatttgactccataattgcttttgctcctgaaacctgggaatcaatggaaaggcagggaatgtgcctcttctgtggccagattctgttatttgcaattaaagcaagtttttaaaaaatgcaagaggcagttgttagtcttcagggcttggcaactgaaatagctatgtggcggatacggaaaacagaggacaatttgaggatcttgctggaataataaatgacagctaccatttgttgagcacctattatatatcaggcactgagctgggtaggctctaaacttcacaataaccctgtgacttaactactttatctccattttgtagttgaagaaataagttcagagagaaagattccttcccaaggtcatgcaatgtgaaaattgaggctcagagaagtaaagtctattgctcaaggtcatgtggctagaatatggcagagccatgattcagatccaggtcttctgattcttattccagtgtcctttctagcataccatgttgcctctaaagattgcagctccttatttactagaaaattgttcctgcccaatctacatctccacctcaccccatcttttcttaagcactatgtttgtgtttttatcagtattatattcattgtctttggaatacatgttcttgtttgtgtttggaaaaaaaatctcttttaccagcttgcactcggaccaacttggaaaaaaaaaagcttaaatgtttttgctatgtacagtttaaaaatgtgaagtttgtagctttaactttttgtaagaaaatctaataacactggcttaagtgctgacttgaaatgctattttgtaaggtttggatgtaagtaatcaattgaggtcagcagtttgtatgagacatagcttcctccattgcccccactccttttttcttttttaagtttgagatgcttcctgtgtttttatgttagaattgttgttctccttcttttcttcttcctatacctcatcacgtttgttttaaataaactgtcctttggaccacaaacccttattaacgagaacctcaatatatagcctggataatggtgttgtgaacaatc

SEQ ID NO: 467070 - DNA, 2175 bp, Homo sapiens
ccccttctttgggggaagagacctgtgtcagtcttggttaattgttccagggaaccttgctaacagaaacttgctcttgccttggctcttcagtagatgacctggctgtaaagagattccctggacgagccagatcattcagtttcagcgagtccttgagctccacaacatctaccagatatagcagacaagcacccatggaggcaggtttcgggcctgaagcagatcagagggctttgcaaaagacagcatagagccatcttcctgcaactttacctctttccctcagatggggagccatgactgggttgcacctcaggatactgtaatttgactccataattgcttttgctcctgaaacctgggaatcaatggaaaggcagggaatgtgcctcttctgtggccagattctgttatttgcaattaaagcaagtttttaaaaaatgcaagaggcagttgttagtcttcagggcttggcaactgaaatagctatgtggcggatacggaaaacagaggacaatttgaggatcttgctggaataataaatgacagctaccatttgttgagcacctattatatatcaggcactgagctgggtaggctctaaacttcacaataaccctgtgacttaactactttatctccattttgtagttgaagaaataagttcagagagaaagattccttcccaaggtcatgcagctagtaaatgatagaatcaggattcatagcatcactatagggggtcaatatttacacaaaaaaggaaagtcacaagcctgtttaaaatgaagtgaccaccttttcttgcatagactaaataactcgaactggcatttttaggttggaaagacagctgaattagtagttaagtctgatagccaagtaagttttaaaaaccaaagcatccaggatgcacacccctgcaccatttgctgtgcgaattaatagttctgtctctctctctctttcttttttctttttattctttgagatggattttcgctcttgtcgcccaggctggagtacaatggcacgatcttggctcactgcaacctccgcctcccgggttcaagcgattcttctgctgggattacagcatatgccaccatgcccagattatttttttgtatttgtagtagagacggggtttcaccatgtcagtcaggctggtcttgaactcctgacctcaggtgatccacccgcctcagcctcccacactgctgggattacaggcatgagccaccgctcctggcctctctttcttttttaaacaaagaactttgcacttggccagagaggaggagaaagcccattttctcccttcctaagctagatccaaataaaagaaagttcagttttcccccataactattcttgggtcatgaactttgatctggagtttgttttgtttcaggaatgtgtgcacccagcttgctgatccaacaaagtctattgcttaccagtctagcttgatgaagccttttggccagaagtcaatttgttttggatcagagaaatttcctgacaaggtatatttgttttctagtgacagaaaggcaaaggaacaagtcctagttgttgttgttgttgttgaatactaaatttaagatatgtcagcttgctttcaatgagccttgggcttctgttattgcttgagcatttggaactcgagcttccagagaaatttgaggtcctcgcttgttctctgccttcaagaaacaatgacctgattctgtctttaaaaaaaaaaatctcagaattctttttttgtttgtgtttttttttttttttgagacagagtctcacttccagcctgggtgacagagcgagactccatctcagaaaagaaaaaaaaattgtgtctgtctttcttccttaaacaatacagtataacagtaatttgcatagcatttacattaggcattttgtgtagcattgtattaggtataagtaatctagaaatgatttaaattatacaggaggatgtgcataggttatatgcaaatactaggacatttcatatcaaggacttgagcatctgcatgcagattttggtatccatcagagttcctggaaccaattcaccacagataccaagggacaactgcacagattaaaaccttaatgcattactaccgtgtacccaccataataactaaaatggaagaaata

SEQ ID NO: 467071 - DNA, 1470 bp, Homo sapiens
ccccttctttgggggaagagacctgtgtcagtcttggttaattgttccagggaaccttgctaacagaaacttgctcttgccttggctcttcagtagatgacctggctgtaaagagattccctggacgagccagatcattcagtttcagcgagtccttgagctccacaacatctaccagatatagcagacaagcacccatggaggcaggtttcgggcctgaagcagatcagagggctttgcaaaagacagcatagagccatcttcctgcaactttacctctttccctcagatggggagccatgactgggttgcacctcaggatactgtaatttgactccataattgcttttgctcctgaaacctgggaatcaatggaaaggcagggaatgtgcctcttctgtggccagattctgttatttgcaattaaagcaagtttttaaaaaatgcaagaggcagttgttagtcttcagggcttggcaactgaaatagctatgtggcggatacggaaaacagaggacaatttgaggatcttgctggaataataaatgacagctaccatttgttgagcacctattatatatcaggcactgagctgggtaggctctaaacttcacaataaccctgtgacttaactactttatctccattttgtagttgaagaaataagttcagagagaaagattccttcccaaggtcatgcagctagtaaatgatagaatcaggattcatagcatcactatagggggtcaatatttacacaaaaaaggaaagtcacaagcctgtttaaaatgaagtgaccaccttttcttgcatagactaaataactcgaactggcatttttaggttggaaagacagctgaattagtagttaagtctgatagccaagtaagttttaaaaaccaaagcatccaggatgcacacccctgcaccatttgctgtgcgaattaatagttctgtctctctctctctttcttttttctttttattctttgagatggattttcgctcttgtcgcccaggctggagtaccgtgagccaagatcacgccactgcctccaggctgggcaacagagtgagactccgtctcaaaaattaattgcattttgttagaaaggtcacaatggctattaaatttacatctctatttcatcttcaaggagatccggggataatatgctatgcggcttgacctgtttgacaccaccctctttggaataatggcggccctcacttaaggcaccatatggccccaatatatgagcaactggagcaactacccaaagtatacagacaaaaaaatttttcacagaacttcttttgagggcccttgacaaaagggaggttacctacacaacacaaagttggccccattaaattaacggccatcacacccacgactgacggtgatcaaacaaattcacagcacagacaccgcgcaacaacgcaacttctccagcaggacatcgactc

SEQ ID NO: 467072 - DNA, 359 bp, Homo sapiens
tcccaggccaccgaaccatgcagccccttctttgggggaagagacctgtgtcagtcttggttaattgttccagggaaccttgctaacagaaacttgctcttgccttggctcttcagtagatgacctggctgtaaagagattccctggacgagccagatcattcagtttcagcgagtccttgagctccacaacatctaccagatatagcagacaagcacccatggaggcaggtttcgggcctgaagcagatcagagggctttgcaaaagacagcatagagccatcttcctgcaactttacctctttccctcagatggggagccatgactgggttgcacctcaggatactgtaatttgact

SEQ ID NO: 467073 - DNA, 341 bp, Homo sapiens
agccggaccgcacttgggtggctcttcggggggctcttcgcgtgtcatcgggcggctctttgtgtggctcttcgtgaggctcttcgggtggcccattgcgtggctcgttgtggggcaccaaacaattactgtcgttgggatttagagtgtattagtcacgcatgtatggggaagtagtctcgggtatgctgttgtgaaattgaaactgtaaaagtagatggttgaaagtactggtatgttgctctgtatggtaagaactaattctgttacgtcatgtacataattactaatcacttttcttcccctttacagcacaaataaagtttgagttctaaaactca

SEQ ID NO: 467074 - DNA, 175 bp, Homo sapiens
cgacgtagaggatcccggtagcacagagtgaaattgaaactgtaaaagtagatggttgaaagtactggtatgttgctctgtatggtaagaactaattctgttacgtcatgtacataattactaatcacttttcttcccctttacagcacaaataaagtttgagttctaaaactca

SEQ ID NO: 467075 - DNA, 859 bp, Homo sapiens
tgggtggtcgtctagaggatcccatcagtttacacggaaaacaagacctaaaaagggaaggggatggggattgtggggagagagtgggcgaggtgcctttactacatgtgtgatctgaaaaccctgcttggttctgagctgcgtctattgaattggtaaagtaataccaatggctttttatcatttccttcttccctttaagtttcacttgaaattttaaaaatcatggttatttttatcgttgggatctttctgtcttctgggttccattttttaaatgtttaaaaatatgttgacatggtagttcagttcttaaccaatgacttggggatgatgcaaacaattactgtcgttgggatttagagtgtattagtcacgcatgtatggggaagtagtctcgggtatgctgttgttaatcagtttacacaatgtatcaatttccacgtatttgtatagtttccaaaattattcttgttattaatttctagttttacttcattgtgggcagagaagatagttggtactatttcagtttttctgaatgttttaagacttgttttgtgacctaacatatgatctgttcttgagaatgatgcatatgctgaggaaaagaatgtatattctatagctgttggatggaatgttctgtaaatgtctattagatccatttggtctgcagtgcagattaggtctgatgtttctttgctggttttctgtcaacaaagtatagctactcctgctcttttttggtttccattggcatggaatatctttttgcacccctttattttcagtctgtgtgtctttataggggaggtgtgtttcctgtagtcagcagatcagtgaggtaccgacctat

SEQ ID NO: 467076 - DNA, 361 bp, Homo sapiens
gggcaacagagcaagaccttgacttaaaagaaaaaaaaaaaaaaaaggacatttgttttaaatatttttagagacagggtctcactatgttacacaagttggtctcaaactcctggcttcaagtgatcctcccacaaacatccccttggaaaacaagacctaaaaagggaaggggatggggattgtggggagagagtgggcgaggtgcctttactacatgtgtgatctgaaaaccctgcttggttctgagctgcgtctattgaattggtaaagtaataccaatggctttttatcatttccttcaacatggcctcagtcgactttgatgggtttttttgccgccttcttccagaggatctgg

SEQ ID NO: 467077 - DNA, 328 bp, Homo sapiens
attagtcacgcatgtatggggaagtaatacactctaaatcccaacgacagtaattgtttgcatcatccccaagtcattggttaagaactgaactaccatgtcaaccaaacaattactgtcgttgggatttagagtgtattagtcacgcatgtatggggaagtagtctcgggtatgctgttgtgaaattgaaactgtaaaagtagatggttgaaagtactggtatgttgctctgtatggtaagaactaattctgttacgtcatgtacataattactaatcacttttcttcccctttacagcacaaataaagtttgagttctaaaactca

SEQ ID NO: 467078 - DNA, 416 bp, Homo sapiens
cgacgtagaggatcccggtagcacagagtgaaattgaaactgtaaaagtagatggttgaaagtactggtatgttgctctgtatggtaagaactaattctgttacgtcatgtacataattactaatcacttttcttcccctttacagcacaaataaagtttgagttctaaaactcaaaaaaaaaaaaaaaaaaaaaaaaaaaaaaacaaaaaaaacaaaaaaaaaaaaaaaaaaaaaataaacatcaaacaaaaacccaagggggggccgcggcccacgttccccttacgtggcatgacataccaatcttattgcctatcgtttaacatctacccactgggctgtctatccattcactcagcctcagctcccccacgtttcacacttacccctcccttcatagcataatgcaaactg

SEQ ID NO: 467079 - DNA, 373 bp, Homo sapiens
gcggccgctactactactactactactaaattcgcggccgcccatccagctgaaagttacaaaaatgcttcatggaccgtggtttgttactatagtgttcctcatggcgagcagatggaaccgggagacatggagtccctggccagtgtgagtcctagcattgcaggaggggagaccctggaggagagagcccgcctcaattgatgcctgcagattgaatttccagaggcttaggaggaggaagttctccaatgttctgtttccaggccttgctcaggaagccctgtattcaggaggctaccatttaaagtttgcagatgagcttatggggggcatcgacgcggccgcgaatttagtagtagtaggcggccgc

SEQ ID NO: 467080 - DNA, 506 bp, Homo sapiens
cgggagttagcgacagggagggatgcgcgcctgggtgtagttgtgggggaggaagtggctagctcagggcttcaggggacagacagggagagatgactgagttagatgagactagggggcgggctgggggtgcgagaaggaagcttggcaaggagactaggtctagggggaccacagtggggcaggctgcatggaaaatatccgcagggtcccccaggcagaacagccacgctccaggccaggctgtccctactgcctggtggagggggaacttgacctctgggagggcgccgctcttgcatagctgagcgagcccgggtgcgctggtctgtgtggaaggaggaaggcagggagaggtagaaggggtggaggagtcaggaggaataggccgcagcagccctggaaatgatcaggaaggcaggcagtgggtcccagatgtggctcacactgagaatggtaagaactacaaaacaaaatttctattaaattaacatttgtgtgtctct

SEQ ID NO: 467081 - DNA, 535 bp, Homo sapiens
cgggagttagcgacagggagggatgcgcgcctgggtgtagttgtgggggaggaagtggctagcaccttccccgctacccctcccaagtaactgggatgacaggcgtgtgcgaccacgcccagctaatttttgtattttttgtagagatggagtttcgctatgttgtcccaggctggtctcaaactcctgagctcgggcaatctgcccacctccgcctccaaaagtgctgggattataggcctgagccactgtgcccatctccctggcttattgatagccatcttctccctgagtccttacagggtcatccttttgtgtgtgtctgtgtcctaatctccccttataagaacacctgtcatactagattaggacccaccctattgacctcattttaccttaatcatctctataaagaccctatctccaaatacagtaccattctgaggtcctgtaacatatgaatttgaagggacacagttcagcccgtaacagtatccatggacataaagtgctcagcacaggtcatggcacagaa

SEQ ID NO: 467082 - DNA, 11195 bp, Homo sapiens
  misc_feature (90)..(90): n is a, c, g, or t
  misc_feature (152)..(152): n is a, c, g, or t
cagtgagcaacgtgggcttgtgagagtgggggggcctctcacaagaagtgtaggcatgcattgtgtcagataaggttgggaggagactgngacaagatcaagggcagggggcaggggcaggaggctggtagtgctgtggcccagatattggncagaagtacagggaggatctcctcagggcttcaggggacagacagggagagatgactgagttagatgagactagggggcgggctgggggtgcgagaaggaagcttggcaaggagactaggtctagggggaccacagtggggcaggctgcatggaaaatatccgcagggtcccccaggcagaacagccacgctccaggccaggctgtccctactgcctggtggagggggaacttgacctctgggagggcgccgctcttgcatagctgagcgagcccgggtgcgctggtctgtgtggaaggaggaaggcagggagaggtagaaggggtggaggagtcaggaggaataggccgcagcagccctggaaatgatcaggaaggcaggcagtgggtgcagggctgcaggagggccgggagggctaatcttcaacttgtccatgccagcagcccctttttttccagaccaagggctgtgaacccgcctggggatgaggcctggtcttgtggaactgaacttagctcgacggggctgaccgctctggcccagggtggtatgtaattttcgctcggcctgggacggggcccaggccgggcccagcctggtggagcgtccaggtctgggtgcgaagccaggcccctgggcggaggtgaggggtggtctgaggagtgatgtggagttaaggcgccatcctcaccggtgactggtgcggcacctagcatgtttgacaggcggggactgcgaggcacgctgctcgggtgttggggacaacattgaccaacgctttattttccaggtggcagtgctccttttggacttttctctaggtttggcgctaaactcttcttgtgagctcactccaccccttcttcctccctttaacttatccattcacttaaaacattagctggtcatctggtaagcccgggacagtaagccgagtggctgttggagtcggtattgttggtaatggtggaggaagagaggccttcccgctgaggctggggtggggcggatcggtgttgcttgcctgcagagagggtggggagtgaatgtgcacccttgggtgggcctgcagccatccagctgaaagttacaaaaatgcttcatggaccgtggtttgttactatagtgttcctcatggcgagcagatggaaccgggagacatggagtccctggccagtgtgagtcctagcattgcaggaggggagaccctggaggagagagcccgcctcaattgatgcctgcagattgaatttccagaggcttaggaggaggaagttctccaatgttctgtttccaggccttgctcaggaagccctgtattcaggaggctaccatttaaagtttgcagatgagcttatggggggcaatcttaaaaagtccacagcagatgcatccggctcgaggggccatcagctttgaataaatgcttgttccagagcccatgaatgccagcaggcacccctcctttcctggggtaaaggttttcagatgctgcatcttctaaattgagcctccggtcatactagttttgtgcttggaaccttgcttcaagaagatccctaagctgtagaacattttaacgttgatgccacaacgcagattgatgccttgtagatggagcttgcagatggagccccgtgacctctcacctacccacctgtttgcctgccttcttgtgcgtttctcggagaagttcttagcctgatgaaataacttggggcgttgaagagctgtttaattttaaatgccttagactggggatatattagaggaagcagattgtcaaattaagggtgtcattgtgttgtgctaaacgctgggagggtacaagttggtcattcctaaatctgtgtgtgagaaatggcaggtctagtttgggcattgtgattgcattgcagattactaggagaagggaatggtgggtacaccggtagtgctcttttgttcttgcttcgtttttttaaacttgaactttacttcgttagatttcataatactttcttggcattctagtaagaggaccctgaggtgggagttgtgggggacggggagaaggggacagcttggcaccggtcccgtgggcgttgcagtgtgggggatgggggtatgcagcttggcactggtactgggagggatgagggtgaagaaggggagagggttggttagagatacagtgtgggtggtgggggtggtaggaaatgcaggttgaagggaattctctggggctttggggaatttagtgcgtgggtgagccaagaaaatactaattaataatagtaagttgttagtgttggttaagttgttgcttggaagtgagaagttgcttagaaactttccaaagtgcttagaactttaagtgcaaacagacaaactaacaaacaaaaattgttttgctttgctacaaggtggggaagactgaagaagtgttaactgaaaacaggtgacacagagtcaccagttttccgagaaccaaagggaggggtgtgtgatgccatctcacaggcaggggaaatgtctttaccagcttcctcctggtggccaagacagcctgtttcagagggttgttttgtttggggtgtgggtgttatcaagtgaattagtcacttgaaagatgggcgtcagacttgcatacgcagcagatcagcatccttcgctgccccttagcaacttaggtggttgatttgaaactgtgaaggtgtgattttttcaggagctggaagtcttagaaaagccttgtaaatgcctatattgtgggcttttaacgtatttaagggaccacttaagacgagattagatgggctcttctggatttgttcctcatttgtcacaggtgtcttgtgattgaaaatcatgagcgaagtgaaattgcattgaatttcaagggaatttagtatgtaaatcgtgccttagaaacacatctgttgtcttttctgtgtttggtcgatattaataatggcaaaatttttgcctatctagtatcttcaaattgtagtctttgtaacaaccaaataaccttttgtggtcactgtaaaattaatatttggtagacagaatccatgtacctttgctaaggttagaatgaataatttattgtatttttaatttgaatgtttgtgctttttaaatgagccaagactagaggggaaactatcacctaaaatcagtttggaaaacaagacctaaaaagggaaggggatggggattgtggggagagagtgggcgaggtgcctttactacatgtgtgatctgaaaaccctgcttggttctgagctgcgtctattgaattggtaaagtaataccaatggctttttatcatttccttcttccctttaagtttcacttgaaattttaaaaatcatggttatttttatcgttgggatctttctgtcttctgggttccattttttaaatgtttaaaaatatgttgacatggtagttcagttcttaaccaatgacttggggatgatgcaaacaattactgtcgttgggatttagagtgtattagtcacgcatgtatggggaagtagtctcgggtatgctgttgtgaaattgaaactgtaaaagtagatggttgaaagtactggtatgttgctctgtatggtaagaactaattctgttacgtcatgtacataattactaatcacttttcttcccctttacagcacaaataaagtttgagttctaaaactcattagaattgttgtattgctatgttacatttctcgacccctatcacattgccttcataacgactttggatgtatcttcatattgtagatttaggtctagatttgctagctccaagtaattaaggccatgtaggagagcatggtaaccacagatagaactggtattatcccaagtggtctgcagactgctgagtggggatgggatctgctctctgttgagagttggtaatcattggtttgaaatgtgatgaaaccactcaagccaatgaaggtgggtgtgtaggtggggagtactttgccataatattttaaaacattacctggttagagttctaagtggtacttatttttgtttggttaggggaaagcctgaataaaaacagaaatggacacataatatgcatattccatagtctttgggaggctggaatgtgcctgggatttgggtctaagtgtatgcgtaattcttacctcactaaagaatttgccttgtttttttccttttggtgagtgactaaaacgtctgggcttccctgtgtgcgtgctacagtaagcaagcagaggctgtgcaaaggtgtgagcaggatcacgtggaatctggaggatacatcttggcttgcaaactgcctctgtctcctgggtgggactgttctgtccttgcactgctgttctgtgttacctcttggggtgtaaggttttgcttacaggagacaaactttgggcgtagaatggaagccactgccagcctctgtgctgagaaggaaggtgcttgtttcaaagggagcagcaagggaggcttgttctactcacctgggcctgtttgcctgagaaggggagataagggctgaactgggactagccagggggaccaacacaaatggtgggggatcatgacctgaaggattctttccttcccatgagctgcagggctggttgccgtccttgcaactgtgtcttatttgcctgtgccgttatatcttggtgacccctccacgtgtacactactgacaaacgggtggagtgctggggagaagtcactgtgccgcccacctagtaaaccttctgtctgtgctcatggcatctccaagatggggcactgctgtgtgcagaatccagggtcctctttctgcttgcaactcctttccctggatgccccagaaacaatccaggcctcctttcctatcttacccctttgctttgctttttaccccagcacctctataaccgccttctcttcttttcagaactccttgtttctcatcctgttttttatgattacaaaactcttgcttccaccctggaagataactgctatagatgcctgtatgtaaatggtgctgtctccagcaactggcatgctgaagaagaattgattcacggggtataaatgttggggattggaagtggggatgaaatggcacttgttgatacaggagcagagaggtgaggccgactgctgaagacagctcgccaccctccttgcctccactccaatccaggggctggggccacattctttgccttcatttatcctcagatcaggtgagatcgacaggaggtgttgatggcagtgccagcaattattgctaatccgtttgcatccttatgcatagatctgaattcagactttgtgaatttccagaggtgtgggtaatataatagaattcagtgagtgggcatggctgatcttgtgcaaattaaaagttatggggcataagaatagcaaaagttgaacttcttttaaaaaggaaagtaccctgagagccagtattggttgaggctcttcagtatgcccaggttggcagcactgagaaccgcaggaacggcctgttgttacaaaaaggagattgactcagctgcccttggtgcatctgactgactatgactgctgagagattccaaggacccttaatgccagggctaacctctccatgtgcagtgagacctctggaggaagtgtcatcctctggctttgtgtggtactcattatggtgcagtgcgggcatgaaatgaagacacccaaataggcttacagatacgatatgttttaaatgttcgtatttaacaaaaacatactgacactgtttggaaatggcaacaggaagatagcaaaatgaatactaacattacgaaaagatgaacaggtacatgttccaaggcaggtggctgtgaacttcctctgagtgaaggcatcccctccagcacctttcagcctgctagttaggacgacccgccgccaccctccaggacctccagccctgcactgcctttcctctcttttaaataattcttcattgagttctaatatgtaaaaaaaaaaagtttactgtaaagtttgcaaataaggaaattttttttaaaagtcctcagtaatcttaccagtaacaattgttatgggcacatttgcttttggaagatttcttttgtatgcatgggataagtacatttttaaacaaaaatgggattatgccataaattctattttgtgactttaatatatagtgaacaccttttttaatgatgacaggatgttcccttgcatggctgtatcaatttaaacaatcttgtttcaatgggcatacagggtattttctagtttttttttcctcttagaaaataatacttgcgatgactttccttgtagctcagactttttcacgtctgttgttatctctttgggaatgctgaatacatacatttcgagaaggaaatgactgttaaactcttaagacttcaggttcatattgctaaactgcccagcagggagggattttttcaattagtgttctcactggtgaggcaaacctgatgccttcccctcttcctcagaaccggctttatcacattgaaaacctttgctcctccgacggatcgagtctgctttccctgtggatgtgagcattgctttgtctgctggtgactgaacatctctaccatgtgtcaattggccatttgtggtgtgtgtgtgtgtgcgtgtgtgtgtgtgtgtgtgtgtgtatgattttctaattcctagtcatttttctattgattgttttgcaaaagccatttacatcttaaggatattgataatcttttgttatatttgatgcaaatatttttttccagtttataggttgccttttaattttgtgtttcaggtagataaaagttaaacgattttcttaggttagtttatcactgtggtttctgaacttgttatgtgtagatcttttccaccccaagagtacataaatattaatccatactttcttatggaacttgtatggtttcgttttttacatttaaaccttcttccccgtggtgtgtgttgtggaatctgtgtttgtgtgaggaggggcatggtgctctcagaacccacctcctgtggccagagagccctgtcctgtgagggtggttatcacagtggcagggttcaattcagaagaccttgagggcaggctgatgtttcctgaatgggcccctggttgttgcttgtccctgactctccatttccccatctgagtggatttggacctaatagggcactggagctggttcgaatcctgactggactacttggcaactttatgtctgggagcaagttacttaacctccccaagcctgtgtctgtgaaatgcgggtaaatgaatgtagatgtttggcagcagctactccttgttgagctctcacagtgaactctcctgcctctgccctccttccccgcctcccctggtgcctagcgtcaggtctagccacttcctcctgggcccctctcccttttctgtggctggctgcctgcccgcctggcgctggacctttcatgtaacgggaatcagcatgtatattctggtctggtctgtttctacacttaattttgtttccagtagtatttccctgtaccggcagagttcacaaacacatttgaagaggctttttctcaggattcttaaccttcccaaaggaagtcccatggatgggtttctagaagtctataaatgctctgaaattgtatttttctgtggaaagcataactttcatctgcttgttcgtgctcaaaaaagatcatgaatgaatgattgcatgattttatgccattgtgcttatactaaaggatatgtagcccatctcttgagctgttaaactgttttgactactttaaatcgtgcagctgtgagcatctctgtaaatttagtgtacacatgtatcccctggagtggcattgcctcggcagtgagcacttatggttttataactctcttcacagactcaaatgactccagaaagctacacttcctgttgtgagtatatgatatccatttccctacatagccactaacatcaggtttttacaattttatttatttcttgctactttaagaaatttttgtggtgaaatacatataatagaagttgactatctgaatcatttttaagtatacattcagtagtgttaagtatgtcgccattgttgtacaaccaatctccagaactttttcatcttgcaaaacaaactctgtacccattaaataacattaaacattccattccctccagcctcagcaaccccattctactttctgtttctgtgagtttgactattccaagcacttcatatcagttaaatcatgaagtatttgtctgtctgtgactggcttatttctctgagcacagtgtcctcgagatgcgtctatgttgtagcatatgtcagaatttccttcctttttaaaagatccaaataatattcttattttatatcttttttttatccattcatccattagtggacacttgggttgcttttggctattgtaaataatggtgctatgtacaaatatctatattattgtatttacaagtataatgctgtaatgtacacacatctttttgagatcctaccttcagttcttttgagtatatagccagaagtggtattactaaatcttacgatatttctatttttaatttattgaggaaccactgtagtttttcatagcaactgcaccattttacgttctcaccaagagtgcacaagggttccgaggttcccacatcctccccaacacttgttattttctgctttttttagattgcagccatcatagtgggtgtgaggtgacatttcattgtggttttgatttgcatttccctaatgaggagtgatgctgagcatcttttcatatgcttactggtcatttgtatgttgtctttggaaaaatgtctattcaagtcctttgactattttaaaaattgggttattagagttatcgttgttgttgacttgtaggagtttctttctatattctggatattaatcccctatcagatatatgatttgcaaatatcttctcttattccataaggttactttttcactttgttgattgtgttctttgatgtatagaagtttttagttttgaaatagtctaatttatctgtttttacttttgtggtctgtgcttttggtgtcatatccaagaaatccttgccaaatccaacgttataaggtacttttaaggtattttagttgtcttagtctatatttctgtactcacctttctttatccactcatcagttgatgggcatgtaggttggttccatatctttgcaattctgaattgtgctgtgatcaggtgtctttttagtataatgatttactctcctttgggtagatacccagtagtgggattgctggatcgaatggtttttataattttctattttaccacagtttctctctgcatttttcctctttgaccactaaccatgtgaaattctcatattgacctttataatgatcatgaactcttagtatcattgggaaggccacatttgccacttatgattgtaaaccttatcctccatttttcctgttattgttggtgcaaaaagcacctattataccaggactttaaaaatcagtctgataagtctttgataagtctaataataataactgataagtccattgaatttgcttctgattactttttctttagtagctaaacatgtatgtactcctatgattacaatgaacactcctctccatttaaattaattatttacattgatgaaatagcaaaatgttaatgactaaatactgtcttggttttttcgttccaggtcagtcaatattaacttcttataattttcttttttttctttatgtgtgtgtgtgtgtgtatttttttttttttaatttcaatggcttttggggtacaaatggcttttggtcatatagatgaattctacagtagtgaagtctgagattttactgcaccggtcacctgagtagtgtacattgtacccaatatgtggttttttataccttgcccccctcttaccctccccactttgagtctctagtgtccattatgtcactctgtatacctttttgtacccataagttagctctcacttataagtgagaacacacagtatttggttttccattcctgagttgcttcacttagaataatatcctccagctccatccaaaattgctgcaaaaaaaaaaaaaaccacaaacattattttgttcttttttattgctaagtcatattccatggtgtagagataccacattttatttatccactcactggttgatgggttggttccacatctttgcaattgtgacttgtactgccatcaagtgtctttctggtataatgacttcttttcctttgggtagatacccaggagtgggattgctagatcaaatggttcttaacattttctctctggatctatttctggaaattttaggctccagtttttgttgttgttgttaataaaatgcaatggaatgtaatgatcatcacttttcattatgctttaaaatctggtaaatggaggctagaacactcctgtaaggcaagaatattctctctgttggaactcaaatacacagaactgggtaaatctcaatcttaatctttgattcaggacacaacatggctctcttttacttgctttctttaattgttttttaataatgtggtaagcatttctgaatctcctatccaatacaaaaactaggacaatacagacagtaactcctatggttacaatgaacactcctctccacttaaattaattatttacactgatgaaattgaaatagcaaaattttaatgactaaatactgtctttgattttttgttccaggtctgtcaatattaacttcttataattttctttttttttctttatgtgtgtgtgtgtgtgtatatatatatatatttaatttcaatggcttttggggtacaaatggcttttggtcatatatatgagttctacagtagtgaagtctgagattttactacaccttccacttatgtggtcccacaccacccgcctcccctgccgcct

SEQ ID NO: 467083 - DNA, 11141 bp, Homo sapiens
  misc_feature (90)..(90): n is a, c, g, or t
  misc_feature (152)..(152): n is a, c, g, or t
cagtgagcaacgtgggcttgtgagagtgggggggcctctcacaagaagtgtaggcatgcattgtgtcagataaggttgggaggagactgngacaagatcaagggcagggggcaggggcaggaggctggtagtgctgtggcccagatattggncagaagtacagggaggatctcctcagggcttcaggggacagacagggagagatgactgagttagatgagactagggggcgggctgggggtgcgagaaggaagcttggcaaggagactaggtctagggggaccacagtggggcaggctgcatggaaaatatccgcagggtcccccaggcagaacagccacgctccaggccaggctgtccctactgcctggtggagggggaacttgacctctgggagggcgccgctcttgcatagctgagcgagcccgggtgcgctggtctgtgtggaaggaggaaggcagggagaggtagaaggggtggaggagtcaggaggaataggccgcagcagccctggaaatgatcaggaaggcaggcagtgggtgcagggctgcaggagggccgggagggctaatcttcaacttgtccatgccagcagcccctttttttccagaccaagggctgtgaacccgcctggggatgaggcctggtcttgtggaactgaacttagctcgacggggctgaccgctctggcccagggtggtatgtaattttcgctcggcctgggacggggcccaggccgggcccagcctggtggagcgtccaggtctgggtgcgaagccaggcccctgggcggaggtgaggggtggtctgaggagtgatgtggagttaaggcgccatcctcaccggtgactggtgcggcacctagcatgtttgacaggcggggactgcgaggcacgctgctcgggtgttggggacaacattgaccaacgctttattttccaggtggcagtgctccttttggacttttctctaggtttggcgctaaactcttcttgtgagctcactccaccccttcttcctccctttaacttatccattcacttaaaacattagctggtcatctggtaagcccgggacagtaagccgagtggctgttggagtcggtattgttggtaatggtggaggaagagaggccttcccgctgaggctggggtggggcggatcggtgttgcttgcctgcagagagggtggggagtgaatgtgcacccttgggtgggcctgcagccatccagctgaaagttacaaaaatgcttcatggaccgtggtttgttactatagtgttcctcatggcgagcagatggaaccgggagacatggagtccctggccagtgtgagtcctagcattgcaggaggggagaccctggaggagagagcccgcctcaattgatgcctgcagattgaatttccagaggcttaggaggaggaagttctccaatgttctgtttccaggccttgctcaggaagccctgtattcaggaggctaccatttaaagtttgcagatgagcttatggggggcaatcttaaaaagtccacagcagatgcatccggctcgaggggccatcagctttgaataaatgcttgttccagagcccatgaatgccagcaggcacccctcctttcctggggtaaaggttttcagatgctgcatcttctaaattgagcctccggtcatactagttttgtgcttggaaccttgcttcaagaagatccctaagctgtagaacattttaacgttgatgccacaacgcagattgatgccttgtagatggagcttgcagatggagccccgtgacctctcacctacccacctgtttgcctgccttcttgtgcgtttctcggagaagttcttagcctgatgaaataacttggggcgttgaagagctgtttaattttaaatgccttagactggggatatattagaggaagcagattgtcaaattaagggtgtcattgtgttgtgctaaacgctgggagggtacaagttggtcattcctaaatctgtgtgtgagaaatggcaggtctagtttgggcattgtgattgcattgcagattactaggagaagggaatggtgggtacaccggtagtgctcttttgttcttgcttcgtttttttaaacttgaactttacttcgttagatttcataatactttcttggcattctagtaagaggaccctgaggtgggagttgtgggggacggggagaaggggacagcttggcaccggtcccgtgggcgttgcagtgtgggggatgggggtatgcagcttggcactggtactgggagggatgagggtgaagaaggggagagggttggttagagatacagtgtgggtggtgggggtggtaggaaatgcaggttgaagggaattctctggggctttggggaatttagtgcgtgggtgagccaagaaaatactaattaataatagtaagttgttagtgttggttaagttgttgcttggaagtgagaagttgcttagaaactttccaaagtgcttagaactttaagtgcaaacagacaaactaacaaacaaaaattgttttgctttgctacaaggtggggaagactgaagaagtgttaactgaaaacaggtgacacagagtcaccagttttccgagaaccaaagggaggggtgtgtgatgccatctcacaggcaggggaaatgtctttaccagcttcctcctggtggccaagacagcctgtttcagagggttgttttgtttggggtgtgggtgttatcaagtgaattagtcacttgaaagatgggcgtcagacttgcatacgcagcagatcagcatccttcgctgccccttagcaacttaggtggttgatttgaaactgtgaaggtgtgattttttcaggagctggaagtcttagaaaagccttgtaaatgcctatattgtgggcttttaacgtatttaagggaccacttaagacgagattagatgggctcttctggatttgttcctcatttgtcacaggtgtcttgtgattgaaaatcatgagcgaagtgaaattgcattgaatttcaagggaatttagtatgtaaatcgtgccttagaaacacatctgttgtcttttctgtgtttggtcgatattaataatggcaaaatttttgcctatctagtatcttcaaattgtagtctttgtaacaaccaaataaccttttgtggtcactgtaaaattaatatttggtagacagaatccatgtacctttgctaaggttagaatgaataatttattgtatttttaatttgaatgtttgtgctttttaaatgagccaagactagaggggaaactatcacctaaaatcagtttggaaaacaagacctaaaaagggaaggggatggggattgtggggagagagtgggcgaggtgcctttactacatgtgtgatctgaaaaccctgcttggttctgagctgcgtctattgaattggtaaagtaataccaatggctttttatcatttccttcttccctttaagtttcacttgaaattttaaaaatcatggttatttttatcgttgggatctttctgtcttctgggttccattttttaaatgtttaaaaatatgttgacatggtagttcagttcttaaccaatgacttggggatgatgcaaacaattactgtcgttgggatttagagtgtattagtcacgcatgtatggggaagtagtctcgggtatgctgttgtgaaattgaaactgtaaaagtagatggttgaaagtactggtatgttgctctgtatggtaagaactaattctgttacgtcatgtacataattactaatcacttttcttcccctttacagcacaaataaagtttgagttctaaaactcattagaattgttgtattgctatgttacatttctcgacccctatcacattgccttcataacgactttggatgtatcttcatattgtagatttaggtctagatttgctagctccaagtaattaaggccatgtaggagagcatggtaaccacagatagaactggtattatcccaagtggtctgcagactgctgagtggggatgggatctgctctctgttgagagttggtaatcattggtttgaaatgtgatgaaaccactcaagccaatgaaggtgggtgtgtaggtggggagtactttgccataatattttaaaacattacctggttagagttctaagtggtacttatttttgtttggttaggggaaagcctgaataaaaacagaaatggacacataatatgcatattccatagtctttgggaggctggaatgtgcctgggatttgggtctaagtgtatgcgtaattcttacctcactaaagaatttgccttgtttttttccttttggtgagtgactaaaacgtctgggcttccctgtgtgcgtgctacagtaagcaagcagaggctgtgcaaaggtgtgagcaggatcacgtggaatctggaggatacatcttggcttgcaaactgcctctgtctcctgggtgggactgttctgtccttgcactgctgttctgtgttacctcttggggtgtaaggttttgcttacaggagacaaactttgggcgtagaatggaagccactgccagcctctgtgctgagaaggaaggtgcttgtttcaaagggagcagcaagggaggcttgttctactcacctgggcctgtttgcctgagaaggggagataagggctgaactgggactagccagggggaccaacacaaatggtgggggatcatgacctgaaggattctttccttcccatgagctgcagggctggttgccgtccttgcaactgtgtcttatttgcctgtgccgttatatcttggtgacccctccacgtgtacactactgacaaacgggtggagtgctggggagaagtcactgtgccgcccacctagtaaaccttctgtctgtgctcatggcatctccaagatggggcactgctgtgtgcagaatccagggtcctctttctgcttgcaactcctttccctggatgccccagaaacaatccaggcctcctttcctatcttacccctttgctttgctttttaccccagcacctctataaccgccttctcttcttttcagaactccttgtttctcatcctgttttttatgattacaaaactcttgcttccaccctggaagataactgctatagatgcctgtatgtaaatggtgctgtctccagcaactggcatgctgaagaagaattgattcacggggtataaatgttggggattggaagtggggatgaaatggcacttgttgatacaggagcagagaggtgaggccgactgctgaagacagctcgccaccctccttgcctccactccaatccaggggctggggccacattctttgccttcatttatcctcagatcaggtgagatcgacaggaggtgttgatggcagtgccagcaattattgctaatccgtttgcatccttatgcatagatctgaattcagactttgtgaatttccagaggtgtgggtaatataatagaattcagtgagtgggcatggctgatcttgtgcaaattaaaagttatggggcataagaatagcaaaagttgaacttcttttaaaaaggaaagtaccctgagagccagtattggttgaggctcttcagtatgcccaggttggcagcactgagaaccgcaggaacggcctgttgttacaaaaaggagattgactcagctgcccttggtgcatctgactgactatgactgctgagagattccaaggacccttaatgccagggctaacctctccatgtgcagtgagacctctggaggaagtgtcatcctctggctttgtgtggtactcattatggtgcagtgcgggcatgaaatgaagacacccaaataggcttacagatacgatatgttttaaatgttcgtatttaacaaaaacatactgacactgtttggaaatggcaacaggaagatagcaaaatgaatactaacattacgaaaagatgaacaggtacatgttccaaggcaggtggctgtgaacttcctctgagtgaaggcatcccctccagcacctttcagcctgctagttaggacgacccgccgccaccctccaggacctccagccctgcactgcctttcctctcttttaaataattcttcattgagttctaatatgtaaaaaaaaaaagtttactgtaaagtttgcaaataaggaaattttttttaaaagtcctcagtaatcttaccagtaacaattgttatgggcacatttgcttttggaagatttcttttgtatgcatgggataagtacatttttaaacaaaaatgggattatgccataaattctattttgtgactttaatatatagtgaacaccttttttaatgatgacaggatgttcccttgcatggctgtatcaatttaaacaatcttgtttcaatgggcatacagggtattttctagtttttttttcctcttagaaaataatacttgcgatgactttccttgtagctcagactttttcacgtctgttgttatctctttgggaatgctgaatacatacatttcgagaaggaaatgactgttaaactcttaagacttcaggttcatattgctaaactgcccagcagggagggattttttcaattagtgttctcactggtgaggcaaacctgatgccttcccctcttcctcagaaccggctttatcacattgaaaacctttgctcctccgacggatcgagtctgctttccctgtggatgtgagcattgctttgtctgctggtgactgaacatctctaccatgtgtcaattggccatttgtggtgtgtgtgtgtgtgcgtgtgtgtgtgtgtgtgtgtgtgtatgattttctaattcctagtcatttttctattgattgttttgcaaaagccatttacatcttaaggatattgataatcttttgttatatttgatgcaaatatttttttccagtttataggttgccttttaattttgtgtttcaggtagataaaagttaaacgattttcttaggttagtttatcactgtggtttctgaacttgttatgtgtagatcttttccaccccaagagtacataaatattaatccatactttcttatggaacttgtatggtttcgttttttacatttaaaccttcttccccgtggtgtgtgttgtggaatctgtgtttgtgtgaggaggggcatggtgctctcagaacccacctcctgtggccagagagccctgtcctgtgagggtggttatcacagtggcagggttcaattcagaagaccttgagggcaggctgatgtttcctgaatgggcccctggttgttgcttgtccctgactctccatttccccatctgagtggatttggacctaatagggcactggagctggttcgaatcctgactggactacttggcaactttatgtctgggagcaagttacttaacctccccaagcctgtgtctgtgaaatgcgggtaaatgaatgtagatgtttggcagcagctactccttgttgagctctcacagtgaactctcctgcctctgccctccttccccgcctcccctggtgcctagcgtcaggtctagccacttcctcctgggcccctctcccttttctgtggctggctgcctgcccgcctggcgctggacctttcatgtaacgggaatcagcatgtatattctggtctggtctgtttctacacttaattttgtttccagtagtatttccctgtaccggcagagttcacaaacacatttgaagaggctttttctcaggattcttaaccttcccaaaggaagtcccatggatgggtttctagaagtctataaatgctctgaaattgtatttttctgtggaaagcataactttcatctgcttgttcgtgctcaaaaaagatcatgaatgaatgattgcatgattttatgccattgtgcttatactaaaggatatgtagcccatctcttgagctgttaaactgttttgactactttaaatcgtgcagctgtgagcatctctgtaaatttagtgtacacatgtatcccctggagtggcattgcctcggcagtgagcacttatggttttataactctcttcacagactcaaatgactccagaaagctacacttcctgttgtgagtatatgatatccatttccctacatagccactaacatcaggtttttacaattttatttatttcttgctactttaagaaatttttgtggtgaaatacatataatagaagttgactatctgaatcatttttaagtatacattcagtagtgttaagtatgtcgccattgttgtacaaccaatctccagaactttttcatcttgcaaaacaaactctgtacccattaaataacattaaacattccattccctccagcctcagcaaccccattctactttctgtttctgtgagtttgactattccaagcacttcatatcagttaaatcatgaagtatttgtctgtctgtgactggcttatttctctgagcacagtgtcctcgagatgcgtctatgttgtagcatatgtcagaatttccttccttttttagtggacacttgggttgcttttggctattgtaaataatggtgctatgtacaaatatctatattattgtatttacaagtataatgctgtaatgtacacacatctttttgagatcctaccttcagttcttttgagtatatagccagaagtggtattactaaatcttacgatatttctatttttaatttattgaggaaccactgtagtttttcatagcaactgcaccattttacgttctcaccaagagtgcacaagggttccgaggttcccacatcctccccaacacttgttattttctgctttttttagattgcagccatcatagtgggtgtgaggtgacatttcattgtggttttgatttgcatttccctaatgaggagtgatgctgagcatcttttcatatgcttactggtcatttgtatgttgtctttggaaaaatgtctattcaagtcctttgactattttaaaaattgggttattagagttatcgttgttgttgacttgtaggagtttctttctatattctggatattaatcccctatcagatatatgatttgcaaatatcttctcttattccataaggttactttttcactttgttgattgtgttctttgatgtatagaagtttttagttttgaaatagtctaatttatctgtttttacttttgtggtctgtgcttttggtgtcatatccaagaaatccttgccaaatccaacgttataaggtacttttaaggtattttagttgtcttagtctatatttctgtactcacctttctttatccactcatcagttgatgggcatgtaggttggttccatatctttgcaattctgaattgtgctgtgatcaggtgtctttttagtataatgatttactctcctttgggtagatacccagtagtgggattgctggatcgaatggtttttataattttctattttaccacagtttctctctgcatttttcctctttgaccactaaccatgtgaaattctcatattgacctttataatgatcatgaactcttagtatcattgggaaggccacatttgccacttatgattgtaaaccttatcctccatttttcctgttattgttggtgcaaaaagcacctattataccaggactttaaaaatcagtctgataagtctttgataagtctaataataataactgataagtccattgaatttgcttctgattactttttctttagtagctaaacatgtatgtactcctatgattacaatgaacactcctctccatttaaattaattatttacattgatgaaatagcaaaatgttaatgactaaatactgtcttggttttttcgttccaggtcagtcaatattaacttcttataattttcttttttttctttatgtgtgtgtgtgtgtgtatttttttttttttaatttcaatggcttttggggtacaaatggcttttggtcatatagatgaattctacagtagtgaagtctgagattttactgcaccggtcacctgagtagtgtacattgtacccaatatgtggttttttataccttgcccccctcttaccctccccactttgagtctctagtgtccattatgtcactctgtatacctttttgtacccataagttagctctcacttataagtgagaacacacagtatttggttttccattcctgagttgcttcacttagaataatatcctccagctccatccaaaattgctgcaaaaaaaaaaaaaaccacaaacattattttgttcttttttattgctaagtcatattccatggtgtagagataccacattttatttatccactcactggttgatgggttggttccacatctttgcaattgtgacttgtactgccatcaagtgtctttctggtataatgacttcttttcctttgggtagatacccaggagtgggattgctagatcaaatggttcttaacattttctctctggatctatttctggaaattttaggctccagtttttgttgttgttgttaataaaatgcaatggaatgtaatgatcatcacttttcattatgctttaaaatctggtaaatggaggctagaacactcctgtaaggcaagaatattctctctgttggaactcaaatacacagaactgggtaaatctcaatcttaatctttgattcaggacacaacatggctctcttttacttgctttctttaattgttttttaataatgtggtaagcatttctgaatctcctatccaatacaaaaactaggacaatacagacagtaactcctatggttacaatgaacactcctctccacttaaattaattatttacactgatgaaattgaaatagcaaaattttaatgactaaatactgtctttgattttttgttccaggtctgtcaatattaacttcttataattttctttttttttctttatgtgtgtgtgtgtgtgtatatatatatatatttaatttcaatggcttttggggtacaaatggcttttggtcatatatatgagttctacagtagtgaagtctgagattttactacaccttccacttatgtggtcccacaccacccgcctcccctgccgcct

SEQ ID NO: 467084 - DNA, 11141 bp, Homo sapiens
  misc_feature (90)..(90): n is a, c, g, or t
  misc_feature (152)..(152): n is a, c, g, or t
cagtgagcaacgtgggcttgtgagagtgggggggcctctcacaagaagtgtaggcatgcattgtgtcagataaggttgggaggagactgngacaagatcaagggcagggggcaggggcaggaggctggtagtgctgtggcccagatattggncagaagtacagggaggatctcctcagggcttcaggggacagacagggagagatgactgagttagatgagactagggggcgggctgggggtgcgagaaggaagcttggcaaggagactaggtctagggggaccacagtggggcaggctgcatggaaaatatccgcagggtcccccaggcagaacagccacgctccaggccaggctgtccctactgcctggtggagggggaacttgacctctgggagggcgccgctcttgcatagctgagcgagcccgggtgcgctggtctgtgtggaaggaggaaggcagggagaggtagaaggggtggaggagtcaggaggaataggccgcagcagccctggaaatgatcaggaaggcaggcagtgggtgcagggctgcaggagggccgggagggctaatcttcaacttgtccatgccagcagcccctttttttccagaccaagggctgtgaacccgcctggggatgaggcctggtcttgtggaactgaacttagctcgacggggctgaccgctctggcccagggtggtatgtaattttcgctcggcctgggacggggcccaggccgggcccagcctggtggagcgtccaggtctgggtgcgaagccaggcccctgggcggaggtgaggggtggtctgaggagtgatgtggagttaaggcgccatcctcaccggtgactggtgcggcacctagcatgtttgacaggcggggactgcgaggcacgctgctcgggtgttggggacaacattgaccaacgctttattttccaggtggcagtgctccttttggacttttctctaggtttggcgctaaactcttcttgtgagctcactccaccccttcttcctccctttaacttatccattcacttaaaacattagctggtcatctggtaagcccgggacagtaagccgagtggctgttggagtcggtattgttggtaatggtggaggaagagaggccttcccgctgaggctggggtggggcggatcggtgttgcttgcctgcagagagggtggggagtgaatgtgcacccttgggtgggcctgcagccatccagctgaaagttacaaaaatgcttcatggaccgtggtttgttactatagtgttcctcatggcgagcagatggaaccgggagacatggagtccctggccagtgtgagtcctagcattgcaggaggggagaccctggaggagagagcccgcctcaattgatgcctgcagattgaatttccagaggcttaggaggaggaagttctccaatgttctgtttccaggccttgctcaggaagccctgtattcaggaggctaccatttaaagtttgcagatgagcttatggggggcaatcttaaaaagtccacagcagatgcatccggctcgaggggccatcagctttgaataaatgcttgttccagagcccatgaatgccagcaggcacccctcctttcctggggtaaaggttttcagatgctgcatcttctaaattgagcctccggtcatactagttttgtgcttggaaccttgcttcaagaagatccctaagctgtagaacattttaacgttgatgccacaacgcagattgatgccttgtagatggagcttgcagatggagccccgtgacctctcacctacccacctgtttgcctgccttcttgtgcgtttctcggagaagttcttagcctgatgaaataacttggggcgttgaagagctgtttaattttaaatgccttagactggggatatattagaggaagcagattgtcaaattaagggtgtcattgtgttgtgctaaacgctgggagggtacaagttggtcattcctaaatctgtgtgtgagaaatggcaggtctagtttgggcattgtgattgcattgcagattactaggagaagggaatggtgggtacaccggtagtgctcttttgttcttgcttcgtttttttaaacttgaactttacttcgttagatttcataatactttcttggcattctagtaagaggaccctgaggtgggagttgtgggggacggggagaaggggacagcttggcaccggtcccgtgggcgttgcagtgtgggggatgggggtatgcagcttggcactggtactgggagggatgagggtgaagaaggggagagggttggttagagatacagtgtgggtggtgggggtggtaggaaatgcaggttgaagggaattctctggggctttggggaatttagtgcgtgggtgagccaagaaaatactaattaataatagtaagttgttagtgttggttaagttgttgcttggaagtgagaagttgcttagaaactttccaaagtgcttagaactttaagtgcaaacagacaaactaacaaacaaaaattgttttgctttgctacaaggtggggaagactgaagaagtgttaactgaaaacaggtgacacagagtcaccagttttccgagaaccaaagggaggggtgtgtgatgccatctcacaggcaggggaaatgtctttaccagcttcctcctggtggccaagacagcctgtttcagagggttgttttgtttggggtgtgggtgttatcaagtgaattagtcacttgaaagatgggcgtcagacttgcatacgcagcagatcagcatccttcgctgccccttagcaacttaggtggttgatttgaaactgtgaaggtgtgattttttcaggagctggaagtcttagaaaagccttgtaaatgcctatattgtgggcttttaacgtatttaagggaccacttaagacgagattagatgggctcttctggatttgttcctcatttgtcacaggtgtcttgtgattgaaaatcatgagcgaagtgaaattgcattgaatttcaagggaatttagtatgtaaatcgtgccttagaaacacatctgttgtcttttctgtgtttggtcgatattaataatggcaaaatttttgcctatctagtatcttcaaattgtagtctttgtaacaaccaaataaccttttgtggtcactgtaaaattaatatttggtagacagaatccatgtacctttgctaaggttagaatgaataatttattgtatttttaatttgaatgtttgtgctttttaaatgagccaagactagaggggaaactatcacctaaaatcagtttggaaaacaagacctaaaaagggaaggggatggggattgtggggagagagtgggcgaggtgcctttactacatgtgtgatctgaaaaccctgcttggttctgagctgcgtctattgaattggtaaagtaataccaatggctttttatcatttccttcttccctttaagtttcacttgaaattttaaaaatcatggttatttttatcgttgggatctttctgtcttctgggttccattttttaaatgtttaaaaatatgttgacatggtagttcagttcttaaccaatgacttggggatgatgcaaacaattactgtcgttgggatttagagtgtattagtcacgcatgtatggggaagtagtctcgggtatgctgttgtgaaattgaaactgtaaaagtagatggttgaaagtactggtatgttgctctgtatggtaagaactaattctgttacgtcatgtacataattactaatcacttttcttcccctttacagcacaaataaagtttgagttctaaaactcattagaattgttgtattgctatgttacatttctcgacccctatcacattgccttcataacgactttggatgtatcttcatattgtagatttaggtctagatttgctagctccaagtaattaaggccatgtaggagagcatggtaaccacagatagaactggtattatcccaagtggtctgcagactgctgagtggggatgggatctgctctctgttgagagttggtaatcattggtttgaaatgtgatgaaaccactcaagccaatgaaggtgggtgtgtaggtggggagtactttgccataatattttaaaacattacctggttagagttctaagtggtacttatttttgtttggttaggggaaagcctgaataaaaacagaaatggacacataatatgcatattccatagtctttgggaggctggaatgtgcctgggatttgggtctaagtgtatgcgtaattcttacctcactaaagaatttgccttgtttttttccttttggtgagtgactaaaacgtctgggcttccctgtgtgcgtgctacagtaagcaagcagaggctgtgcaaaggtgtgagcaggatcacgtggaatctggaggatacatcttggcttgcaaactgcctctgtctcctgggtgggactgttctgtccttgcactgctgttctgtgttacctcttggggtgtaaggttttgcttacaggagacaaactttgggcgtagaatggaagccactgccagcctctgtgctgagaaggaaggtgcttgtttcaaagggagcagcaagggaggcttgttctactcacctgggcctgtttgcctgagaaggggagataagggctgaactgggactagccagggggaccaacacaaatggtgggggatcatgacctgaaggattctttccttcccatgagctgcagggctggttgccgtccttgcaactgtgtcttatttgcctgtgccgttatatcttggtgacccctccacgtgtacactactgacaaacgggtggagtgctggggagaagtcactgtgccgcccacctagtaaaccttctgtctgtgctcatggcatctccaagatggggcactgctgtgtgcagaatccagggtcctctttctgcttgcaactcctttccctggatgccccagaaacaatccaggcctcctttcctatcttacccctttgctttgctttttaccccagcacctctataaccgccttctcttcttttcagaactccttgtttctcatcctgttttttatgattacaaaactcttgcttccaccctggaagataactgctatagatgcctgtatgtaaatggtgctgtctccagcaactggcatgctgaagaagaattgattcacggggtataaatgttggggattggaagtggggatgaaatggcacttgttgatacaggagcagagaggtgaggccgactgctgaagacagctcgccaccctccttgcctccactccaatccaggggctggggccacattctttgccttcatttatcctcagatcaggtgagatcgacaggaggtgttgatggcagtgccagcaattattgctaatccgtttgcatccttatgcatagatctgaattcagactttgtgaatttccagaggtgtgggtaatataatagaattcagtgagtgggcatggctgatcttgtgcaaattaaaagttatggggcataagaatagcaaaagttgaacttcttttaaaaaggaaagtaccctgagagccagtattggttgaggctcttcagtatgcccaggttggcagcactgagaaccgcaggaacggcctgttgttacaaaaaggagattgactcagctgcccttggtgcatctgactgactatgactgctgagagattccaaggacccttaatgccagggctaacctctccatgtgcagtgagacctctggaggaagtgtcatcctctggctttgtgtggtactcattatggtgcagtgcgggcatgaaatgaagacacccaaataggcttacagatacgatatgttttaaatgttcgtatttaacaaaaacatactgacactgtttggaaatggcaacaggaagatagcaaaatgaatactaacattacgaaaagatgaacaggtacatgttccaaggcaggtggctgtgaacttcctctgagtgaaggcatcccctccagcacctttcagcctgctagttaggacgacccgccgccaccctccaggacctccagccctgcactgcctttcctctcttttaaataattcttcattgagttctaatatgtaaaaaaaaaaagtttactgtaaagtttgcaaataaggaaattttttttaaaagtcctcagtaatcttaccagtaacaattgttatgggcacatttgcttttggaagatttcttttgtatgcatgggataagtacatttttaaacaaaaatgggattatgccataaattctattttgtgactttaatatatagtgaacaccttttttaatgatgacaggatgttcccttgcatggctgtatcaatttaaacaatcttgtttcaatgggcatacagggtattttctagtttttttttcctcttagaaaataatacttgcgatgactttccttgtagctcagactttttcacgtctgttgttatctctttgggaatgctgaatacatacatttcgagaaggaaatgactgttaaactcttaagacttcaggttcatattgctaaactgcccagcagggagggattttttcaattagtgttctcactggtgaggcaaacctgatgccttcccctcttcctcagaaccggctttatcacattgaaaacctttgctcctccgacggatcgagtctgctttccctgtggatgtgagcattgctttgtctgctggtgactgaacatctctaccatgtgtcaattggccatttgtggtgtgtgtgtgtgtgcgtgtgtgtgtgtgtgtgtgtgtgtatgattttctaattcctagtcatttttctattgattgttttgcaaaagccatttacatcttaaggatattgataatcttttgttatatttgatgcaaatatttttttccagtttataggttgccttttaattttgtgtttcaggtagataaaagttaaacgattttcttaggttagtttatcactgtggtttctgaacttgttatgtgtagatcttttccaccccaagagtacataaatattaatccatactttcttatggaacttgtatggtttcgttttttacatttaaaccttcttccccgtggtgtgtgttgtggaatctgtgtttgtgtgaggaggggcatggtgctctcagaacccacctcctgtggccagagagccctgtcctgtgagggtggttatcacagtggcagggttcaattcagaagaccttgagggcaggctgatgtttcctgaatgggcccctggttgttgcttgtccctgactctccatttccccatctgagtggatttggacctaatagggcactggagctggttcgaatcctgactggactacttggcaactttatgtctgggagcaagttacttaacctccccaagcctgtgtctgtgaaatgcgggtaaatgaatgtagatgtttggcagcagctactccttgttgagctctcacagtgaactctcctgcctctgccctccttccccgcctcccctggtgcctagcgtcaggtctagccacttcctcctgggcccctctcccttttctgtggctggctgcctgcccgcctggcgctggacctttcatgtaacgggaatcagcatgtatattctggtctggtctgtttctacacttaattttgtttccagtagtatttccctgtaccggcagagttcacaaacacatttgaagaggctttttctcaggattcttaaccttcccaaaggaagtcccatggatgggtttctagaagtctataaatgctctgaaattgtatttttctgtggaaagcataactttcatctgcttgttcgtgctcaaagatatgtagcccatctcttgagctgttaaactgttttgactactttaaatcgtgcagctgtgagcatctctgtaaatttagtgtacacatgtatcccctggagtggcattgcctcggcagtgagcacttatggttttataactctcttcacagactcaaatgactccagaaagctacacttcctgttgtgagtatatgatatccatttccctacatagccactaacatcaggtttttacaattttatttatttcttgctactttaagaaatttttgtggtgaaatacatataatagaagttgactatctgaatcatttttaagtatacattcagtagtgttaagtatgtcgccattgttgtacaaccaatctccagaactttttcatcttgcaaaacaaactctgtacccattaaataacattaaacattccattccctccagcctcagcaaccccattctactttctgtttctgtgagtttgactattccaagcacttcatatcagttaaatcatgaagtatttgtctgtctgtgactggcttatttctctgagcacagtgtcctcgagatgcgtctatgttgtagcatatgtcagaatttccttcctttttaaaagatccaaataatattcttattttatatcttttttttatccattcatccattagtggacacttgggttgcttttggctattgtaaataatggtgctatgtacaaatatctatattattgtatttacaagtataatgctgtaatgtacacacatctttttgagatcctaccttcagttcttttgagtatatagccagaagtggtattactaaatcttacgatatttctatttttaatttattgaggaaccactgtagtttttcatagcaactgcaccattttacgttctcaccaagagtgcacaagggttccgaggttcccacatcctccccaacacttgttattttctgctttttttagattgcagccatcatagtgggtgtgaggtgacatttcattgtggttttgatttgcatttccctaatgaggagtgatgctgagcatcttttcatatgcttactggtcatttgtatgttgtctttggaaaaatgtctattcaagtcctttgactattttaaaaattgggttattagagttatcgttgttgttgacttgtaggagtttctttctatattctggatattaatcccctatcagatatatgatttgcaaatatcttctcttattccataaggttactttttcactttgttgattgtgttctttgatgtatagaagtttttagttttgaaatagtctaatttatctgtttttacttttgtggtctgtgcttttggtgtcatatccaagaaatccttgccaaatccaacgttataaggtacttttaaggtattttagttgtcttagtctatatttctgtactcacctttctttatccactcatcagttgatgggcatgtaggttggttccatatctttgcaattctgaattgtgctgtgatcaggtgtctttttagtataatgatttactctcctttgggtagatacccagtagtgggattgctggatcgaatggtttttataattttctattttaccacagtttctctctgcatttttcctctttgaccactaaccatgtgaaattctcatattgacctttataatgatcatgaactcttagtatcattgggaaggccacatttgccacttatgattgtaaaccttatcctccatttttcctgttattgttggtgcaaaaagcacctattataccaggactttaaaaatcagtctgataagtctttgataagtctaataataataactgataagtccattgaatttgcttctgattactttttctttagtagctaaacatgtatgtactcctatgattacaatgaacactcctctccatttaaattaattatttacattgatgaaatagcaaaatgttaatgactaaatactgtcttggttttttcgttccaggtcagtcaatattaacttcttataattttcttttttttctttatgtgtgtgtgtgtgtgtatttttttttttttaatttcaatggcttttggggtacaaatggcttttggtcatatagatgaattctacagtagtgaagtctgagattttactgcaccggtcacctgagtagtgtacattgtacccaatatgtggttttttataccttgcccccctcttaccctccccactttgagtctctagtgtccattatgtcactctgtatacctttttgtacccataagttagctctcacttataagtgagaacacacagtatttggttttccattcctgagttgcttcacttagaataatatcctccagctccatccaaaattgctgcaaaaaaaaaaaaaaccacaaacattattttgttcttttttattgctaagtcatattccatggtgtagagataccacattttatttatccactcactggttgatgggttggttccacatctttgcaattgtgacttgtactgccatcaagtgtctttctggtataatgacttcttttcctttgggtagatacccaggagtgggattgctagatcaaatggttcttaacattttctctctggatctatttctggaaattttaggctccagtttttgttgttgttgttaataaaatgcaatggaatgtaatgatcatcacttttcattatgctttaaaatctggtaaatggaggctagaacactcctgtaaggcaagaatattctctctgttggaactcaaatacacagaactgggtaaatctcaatcttaatctttgattcaggacacaacatggctctcttttacttgctttctttaattgttttttaataatgtggtaagcatttctgaatctcctatccaatacaaaaactaggacaatacagacagtaactcctatggttacaatgaacactcctctccacttaaattaattatttacactgatgaaattgaaatagcaaaattttaatgactaaatactgtctttgattttttgttccaggtctgtcaatattaacttcttataattttctttttttttctttatgtgtgtgtgtgtgtgtatatatatatatatttaatttcaatggcttttggggtacaaatggcttttggtcatatatatgagttctacagtagtgaagtctgagattttactacaccttccacttatgtggtcccacaccacccgcctcccctgccgcct

SEQ ID NO: 467085 - DNA, 10789 bp, Homo sapiens
  misc_feature (90)..(90): n is a, c, g, or t
  misc_feature (152)..(152): n is a, c, g, or t
cagtgagcaacgtgggcttgtgagagtgggggggcctctcacaagaagtgtaggcatgcattgtgtcagataaggttgggaggagactgngacaagatcaagggcagggggcaggggcaggaggctggtagtgctgtggcccagatattggncagaagtacagggaggatctcctcagggcttcaggggacagacagggagagatgactgagttagatgagactagggggcgggctgggggtgcgagaaggaagcttggcaaggagactaggtctagggggaccacagtggggcaggctgcatggaaaatatccgcagggtcccccaggcagaacagccacgctccaggccaggctgtccctactgcctggtggagggggaacttgacctctgggagggcgccgctcttgcatagctgagcgagcccgggtgcgctggtctgtgtggaaggaggaaggcagggagaggtagaaggggtggaggagtcaggaggaataggccgcagcagccctggaaatgatcaggaaggcaggcagtgggtgcagggctgcaggagggccgggagggctaatcttcaacttgtccatgccagcagcccctttttttccagaccaagggctgtgaacccgcctggggatgaggcctggtcttgtggaactgaacttagctcgacggggctgaccgctctggcccagggtggtatgtaattttcgctcggcctgggacggggcccaggccgggcccagcctggtggagcgtccaggtctgggtgcgaagccaggcccctgggcggaggtgaggggtggtctgaggagtgatgtggagttaaggcgccatcctcaccggtgactggtgcggcacctagcatgtttgacaggcggggactgcgaggcacgctgctcgggtgttggggacaacattgaccaacgctttattttccaggtggcagtgctccttttggacttttctctaggtttggcgctaaactcttcttgtgagctcactccaccccttcttcctccctttaacttatccattcacttaaaacattagctggtcatctggtaagcccgggacagtaagccgagtggctgttggagtcggtattgttggtaatggtggaggaagagaggccttcccgctgaggctggggtggggcggatcggtgttgcttgcctgcagagagggtggggagtgaatgtgcacccttgggtgggcctgcagccatccagctgaaagttacaaaaatgcttcatggaccgtggtttgttactatagtgttcctcatggcgagcagatggaaccgggagacatggagtccctggccagtgtgagtcctagcattgcaggaggggagaccctggaggagagagcccgcctcaattgatgcctgcagattgaatttccagaggcttaggaggaggaagttctccaatgttctgtttccaggccttgctcaggaagccctgtattcaggaggctaccatttaaagtttgcagatgagcttatggggggcaatcttaaaaagtccacagcagatgcatccggctcgaggggccatcagctttgaataaatgcttgttccagagcccatgaatgccagcaggcacccctcctttcctggggtaaaggttttcagatgctgcatcttctaaattgagcctccggtcatactagttttgtgcttggaaccttgcttcaagaagatccctaagctgtagaacattttaacgttgatgccacaacgcagattgatgccttgtagatggagcttgcagatggagccccgtgacctctcacctacccacctgtttgcctgccttcttgtgcgtttctcggagaagttcttagcctgatgaaataacttggggcgttgaagagctgtttaattttaaatgccttagactggggatatattagaggaagcagattgtcaaattaagggtgtcattgtgttgtgctaaacgctgggagggtacaagttggtcattcctaaatctgtgtgtgagaaatggcaggtctagtttgggcattgtgattgcattgcagattactaggagaagggaatggtgggtacaccggtagtgctcttttgttcttgcttcgtttttttaaacttgaactttacttcgttagatttcataatactttcttggcattctagtaagaggaccctgaggtgggagttgtgggggacggggagaaggggacagcttggcaccggtcccgtgggcgttgcagtgtgggggatgggggtatgcagcttggcactggtactgggagggatgagggtgaagaaggggagagggttggttagagatacagtgtgggtggtgggggtggtaggaaatgcaggttgaagggaattctctggggctttggggaatttagtgcgtgggtgagccaagaaaatactaattaataatagtaagttgttagtgttggttaagttgttgcttggaagtgagaagttgcttagaaactttccaaagtgcttagaactttaagtgcaaacagacaaactaacaaacaaaaattgttttgctttgctacaaggtggggaagactgaagaagtgttaactgaaaacaggtgacacagagtcaccagttttccgagaaccaaagggaggggtgtgtgatgccatctcacaggcaggggaaatgtctttaccagcttcctcctggtggccaagacagcctgtttcagagggttgttttgtttggggtgtgggtgttatcaagtgaattagtcacttgaaagatgggcgtcagacttgcatacgcagcagatcagcatccttcgctgccccttagcaacttaggtggttgatttgaaactgtgaaggtgtgattttttcaggagctggaagtcttagaaaagccttgtaaatgcctatattgtgggcttttaacgtatttaagggaccacttaagacgagattagatgggctcttctggatttgttcctcatttgtcacaggtgtcttgtgattgaaaatcatgagcgaagtgaaattgcattgaatttcaagggaatttagtatgtaaatcgtgccttagaaacacatctgttgtcttttctgtgtttggtcgatattaataatggcaaaatttttgcctatctagtatcttcaaattgtagtctttgtaacaaccaaataaccttttgtggtcactgtaaaattaatatttggtagacagaatccatgtacctttgctaaggttagaatgaataatttattgtatttttaatttgaatgtttgtgctttttaaatgagccaagactagaggggaaactatcacctaaaatcagtttggaaaacaagacctaaaaagggaaggggatggggattgtggggagagagtgggcgaggtgcctttactacatgtgtgatctgaaaaccctgcttggttctgagctgcgtctattgaattggtaaagtaataccaatggctttttatcatttccttcttccctttaagtttcacttgaaattttaaaaatcatggttatttttatcgttgggatctttctgtcttctgggttccattttttaaatgtttaaaaatatgttgacatggtagttcagttcttaaccaatgacttggggatgatgcaaacaattactgtcgttgggatttagagtgtattagtcacgcatgtatggggaagtagtctcgggtatgctgttgtgaaattgaaactgtaaaagtagatggttgaaagtactggtatgttgctctgtatggtaagaactaattctgttacgtcatgtacataattactaatcacttttcttcccctttacagcacaaataaagtttgagttctaaaactcattagaattgttgtattgctatgttacatttctcgacccctatcacattgccttcataacgactttggatgtatcttcatattgtagatttaggtctagatttgctagctccaagtaattaaggccatgtaggagagcatggtaaccacagatagaactggtattatcccaagtggtctgcagactgctgagtggggatgggatctgctctctgttgagagttggtaatcattggtttgaaatgtgatgaaaccactcaagccaatgaaggtgggtgtgtaggtggggagtactttgccataatattttaaaacattacctggttagagttctaagtggtacttatttttgtttggttaggggaaagcctgaataaaaacagaaatggacacataatatgcatattccatagtctttgggaggctggaatgtgcctgggatttgggtctaagtgtatgcgtaattcttacctcactaaagaatttgccttgtttttttccttttggtgagtgactaaaacgtctgggcttccctgtgtgcgtgctacagtaagcaagcagaggctgtgcaaaggtgtgagcaggatcacgtggaatctggaggatacatcttggcttgcaaactgcctctgtctcctgggtgggactgttctgtccttgcactgctgttctgtgttacctcttggggtgtaaggttttgcttacaggagacaaactttgggcgtagaatggaagccactgccagcctctgtgctgagaaggaaggtgcttgtttcaaagggagcagcaagggaggcttgttctactcacctgggcctgtttgcctgagaaggggagataagggctgaactgggactagccagggggaccaacacaaatggtgggggatcatgacctgaaggattctttccttcccatgagctgcagggctggttgccgtccttgcaactgtgtcttatttgcctgtgccgttatatcttggtgacccctccacgtgtacactactgacaaacgggtggagtgctggggagaagtcactgtgccgcccacctagtaaaccttctgtctgtgctcatggcatctccaagatggggcactgctgtgtgcagaatccagggtcctctttctgcttgcaactcctttccctggatgccccagaaacaatccaggcctcctttcctatcttacccctttgctttgctttttaccccagcacctctataaccgccttctcttcttttcagaactccttgtttctcatcctgttttttatgattacaaaactcttgcttccaccctggaagataactgctatagatgcctgtatgtaaatggtgctgtctccagcaactggcatgctgaagaagaattgattcacggggtataaatgttggggattggaagtggggatgaaatggcacttgttgatacaggagcagagaggtgaggccgactgctgaagacagctcgccaccctccttgcctccactccaatccaggggctggggccacattctttgccttcatttatcctcagatcaggtgagatcgacaggaggtgttgatggcagtgccagcaattattgctaatccgtttgcatccttatgcatagatctgaattcagactttgtgaatttccagaggtgtgggtaatataatagaattcagtgagtgggcatggctgatcttgtgcaaattaaaagttatggggcataagaatagcaaaagttgaacttcttttaaaaaggaaagtaccctgagagccagtattggttgaggctcttcagtatgcccaggttggcagcactgagaaccgcaggaacggcctgttgttacaaaaaggagattgactcagctgcccttggtgcatctgactgactatgactgctgagagattccaaggacccttaatgccagggctaacctctccatgtgcagtgagacctctggaggaagtgtcatcctctggctttgtgtggtactcattatggtgcagtgcgggcatgaaatgaagacacccaaataggcttacagatacgatatgttttaaatgttcgtatttaacaaaaacatactgacactgtttggaaatggcaacaggaagatagcaaaatgaatactaacattacgaaaagatgaacaggtacatgttccaaggcaggtggctgtgaacttcctctgagtgaaggcatcccctccagcacctttcagcctgctagttaggacgacccgccgccaccctccaggacctccagccctgcactgcctttcctctcttttaaataattcttcattgagttctaatatgtaaaaaaaaaaagtttactgtaaagtttgcaaataaggaaattttttttaaaagtcctcagtaatcttaccagtaacaattgttatgggcacatttgcttttggaagatttcttttgtatgcatgggataagtacatttttaaacaaaaatgggattatgccataaattctattttgtgactttaatatatagtgaacaccttttttaatgatgacaggatgttcccttgcatggctgtatcaatttaaacaatcttgtttcaatgggcatacagggtattttctagtttttttttcctcttagaaaataatacttgcgatgactttccttgtagctcagactttttcacgtctgttgttatctctttgggaatgctgaatacatacatttcgagaaggaaatgactgttaaactcttaagacttcaggttcatattgctaaactgcccagcagggagggattttttcaattagtgttctcactggtgaggcaaacctgatgccttcccctcttcctcagaaccggctttatcacattgaaaacctttgctcctccgacggatcgagtctgctttccctgtggatgtgagcattgctttgtctgctggtgactgaacatctctaccatgtgtcaattggccatttgtggtgtgtgtgtgtgtgcgtgtgtgtgtgtgtgtgtgtgtgtatgattttctaattcctagtcatttttctattgattgttttgcaaaagccatttacatcttaaggatattgataatcttttgttatatttgatgcaaatatttttttccagtttataggttgccttttaattttgtgtttcaggtagataaaagttaaacgattttcttaggttagtttatcactgtggtttctgaacttgttatgtgtagatcttttccaccccaagagtacataaatattaatccatactttcttatggaacttgtatggtttcgttttttacatttaaaccttcttccccgtggtgtgtgttgtggaatctgtgtttgtgtgaggaggggcatggtgctctcagaacccacctcctgtggccagagagccctgtcctgtgagggtggttatcacagtggcagggttcaattcagaagaccttgagggcaggctgatgtttcctgaatgggcccctggttgttgcttgtccctgactctccatttccccatctgagtggatttggacctaatagggcactggagctggttcgaatcctgactggactacttggcaactttatgtctgggagcaagttacttaacctccccaagcctgtgtctgtgaaatgcgggtaaatgaatgtagatgtttggcagcagctactccttgttgagctctcacagtgaactctcctgcctctgccctccttccccgcctcccctggtgcctagcgtcaggtctagccacttcctcctgggcccctctcccttttctgtggctggctgcctgcccgcctggcgctggacctttcatgtaacgggaatcagcatgtatattctggtctggtctgtttctacacttaattttgtttccagtagtatttccctgtaccggcagagttcacaaacacatttgaagaggctttttctcaggattcttaaccttcccaaaggaagtcccatggatgggtttctagaagtctataaatgctctgaaattgtatttttctgtggaaagcataactttcatctgcttgttcgtgctcaaaaaagatcatgaatgaatgattgcatgattttatgccattgtgcttatactaaaggatatgtagcccatctcttgagctgttaaactgttttgactactttaaatcgtgcagctgtgagcatctctgtaaatttagtgtacacatgtatcccctggagtggcattgcctcggcagtgagcacttatggttttataactctcttcacagactcaaatgactccagaaagctacacttcctgttgtgagtatatgatatccatttccctacatagccactaacatcaggtttttacaattttatttatttcttgctactttaagaaatttttgtggtgaaatacatataatagaagttgactatctgaatcatttttaagtatacattcagtagtgttaagtatgtcgccattgttgtacaaccaatctccagaactttttcatcttgcaaaacaaactctgtacccattaaataacattaaacattccattccctccagcctcagcaaccccattctactttctgtttctgtgagtttgactattccaagcacttcatatcagttaaatcatgaagtatttgtctgtctgtgactggcttatttctctgagcacagtgtcctcgagatgcgtctatgttgtagcatatgtcagaatttccttcctttttaaaagatccaaataatattcttattttatatcttttttttatccattcatccattagtggacacttgggttgcttttggctattgtaaataatggtgctatgtacaaatatctatattattgtatttacaagtataatgctgtaatgtacacacatctttttgagatcctaccttcagttcttttgagtatatagccagaagtggtattactaaatcttacgatatttctatttttaatttattgaggaaccactgtagtttttcatagcaactgcaccattttacgttctcaccaagagtgcacaagggttccgaggttcccacatcctccccaacacttgttattttctgctttttttagattgcagccatcatagtgggtgtgaggtgacatttcattgtggttttgatttgcatttccctaatgaggagtgatgctgagcatcttttcatatgcttactggtcatttgtatgttgtctttggaaaaatgtctattcaagtcctttgactattttaaaaattgggttattagagttatcgttgttgttgacttgtaggagtttctttctatattctggatattaatcccctatcagatatatgatttgcaaatatcttctcttattccataaggttactttttcactttgttgattgtgttctttgatgtatagaagtttttagttttgaaatagtctaatttatctgtttttacttttgtggtctgtgcttttggtgtcatatccaagaaatccttgccaaatccaacgttataaggtacttttaaggtattttagttgtcttagtctatatttctgtactcacctttctttatccactcatcagttgatgggcatgtaggttggttccatatctttgcaattctgaattgtgctgtgatcaggtgtctttttagtataatgatttactctcctttgggtagatacccagtagtgggattgctggatcgaatggtttttataattttctattttaccacagtttctctctgcatttttcctctttgaccactaaccatgtgaaattctcatattgacctttataatgatcatgaactcttagtatcattgggaaggccacatttgccacttatgattgtaaaccttatcctccatttttcctgttattgttggtgcaaaaagcacctattataccaggactttaaaaatcagtctgataagtctttgataagtctaataataataactgataagtccattgaatttgcttctgattactttttctttagtagctaaacatgtatgtactcctatgattacaatgaacactcctctccatttaaattaattatttacattgatgaaatagcaaaatgttaatgactaaatactgtcttggttttttcgttccaggtcagtcaatattaacttcttataattttcttttttttctttatgtgtgtgtgtgtgtgtatttttttttttttaatttcaatggcttttggggtacaaatggcttttggtcatatagatgaattctacagtagtgaagtctgagattttactgcaccggtcacctgagtagtgtacattgtacccaatatgtggttttttataccttgcccccctcttaccctccccactttgagtctctagtgtccattatgtcactctgtatacctttttgtacccataagttagctctcacttataagtgagaacacacagtatttggttttccattcctgagttgcttcacttagaataatatcctccagctccatccaaaattgctgcaaaaaaaaaaaaaaccacaaacattattttgttcttttttattgctaagtcatattccatggtgtagagataccacattttatttatccactcactggttgatgggttggttccacatctttgcaattgtgacttgtactgccatcaagtgtctttctggtataatgacttcttttcctttgggtagatacccaggagtgggattgctagatcaaatggttcttaacattttctctctggatctatttctggaaattttaggctccagtttttgttgttgttgttaataaaatgcaatggaatgtaatgatcatcacttttcattatgctttaaaatctggtaaatggaggctagaacactcctgtaaggcaagaatattctctctgttggagcctaaaatttccagaaatagatccagagagaaagtaagaacctttgatctagcaatcccactcccaca

SEQ ID NO: 467086 - DNA, 11150 bp, Homo sapiens
  misc_feature (90)..(90): n is a, c, g, or t
  misc_feature (152)..(152): n is a, c, g, or t
cagtgagcaacgtgggcttgtgagagtgggggggcctctcacaagaagtgtaggcatgcattgtgtcagataaggttgggaggagactgngacaagatcaagggcagggggcaggggcaggaggctggtagtgctgtggcccagatattggncagaagtacagggaggatctcctcagggcttcaggggacagacagggagagatgactgagttagatgagactagggggcgggctgggggtgcgagaaggaagcttggcaaggagactaggtctagggggaccacagtggggcaggctgcatggaaaatatccgcagggtcccccaggcagaacagccacgctccaggccaggctgtccctactgcctggtggagggggaacttgacctctgggagggcgccgctcttgcatagctgagcgagcccgggtgcgctggtctgtgtggaaggaggaaggcagggagaggtagaaggggtggaggagtcaggaggaataggccgcagcagccctggaaatgatcaggaaggcaggcagtgggtgcagggctgcaggagggccgggagggctaatcttcaacttgtccatgccagcagcccctttttttccagaccaagggctgtgaacccgcctggggatgaggcctggtcttgtggaactgaacttagctcgacggggctgaccgctctggcccagggtggtatgtaattttcgctcggcctgggacggggcccaggccgggcccagcctggtggagcgtccaggtctgggtgcgaagccaggcccctgggcggaggtgaggggtggtctgaggagtgatgtggagttaaggcgccatcctcaccggtgactggtgcggcacctagcatgtttgacaggcggggactgcgaggcacgctgctcgggtgttggggacaacattgaccaacgctttattttccaggtggcagtgctccttttggacttttctctaggtttggcgctaaactcttcttgtgagctcactccaccccttcttcctccctttaacttatccattcacttaaaacattagctggtcatctggtaagcccgggacagtaagccgagtggctgttggagtcggtattgttggtaatggtggaggaagagaggccttcccgctgaggctggggtggggcggatcggtgttgcttgcctgcagagagggtggggagtgaatgtgcacccttgggtgggcctgcagccatccagctgaaagttacaaaaatgcttcatggaccgtggtttgttactatagtgttcctcatggcgagcagatggaaccgggagacatggagtccctggccagtgtgagtcctagcattgcaggaggggagaccctggaggagagagcccgcctcaattgatgcctgcagattgaatttccagaggcttaggaggaggaagttctccaatgttctgtttccaggccttgctcaggaagccctgtattcaggaggctaccatttaaagtttgcagatgagcttatggggggcaatcttaaaaagtccacagcagatgcatccggctcgaggggccatcagctttgaataaatgcttgttccagagcccatgaatgccagcaggcacccctcctttcctggggtaaaggttttcagatgctgcatcttctaaattgagcctccggtcatactagttttgtgcttggaaccttgcttcaagaagatccctaagctgtagaacattttaacgttgatgccacaacgcagattgatgccttgtagatggagcttgcagatggagccccgtgacctctcacctacccacctgtttgcctgccttcttgtgcgtttctcggagaagttcttagcctgatgaaataacttggggcgttgaagagctgtttaattttaaatgccttagactggggatatattagaggaagcagattgtcaaattaagggtgtcattgtgttgtgctaaacgctgggagggtacaagttggtcattcctaaatctgtgtgtgagaaatggcaggtctagtttgggcattgtgattgcattgcagattactaggagaagggaatggtgggtacaccggtagtgctcttttgttcttgcttcgtttttttaaacttgaactttacttcgttagatttcataatactttcttggcattctagtaagaggaccctgaggtgggagttgtgggggacggggagaaggggacagcttggcaccggtcccgtgggcgttgcagtgtgggggatgggggtatgcagcttggcactggtactgggagggatgagggtgaagaaggggagagggttggttagagatacagtgtgggtggtgggggtggtaggaaatgcaggttgaagggaattctctggggctttggggaatttagtgcgtgggtgagccaagaaaatactaattaataatagtaagttgttagtgttggttaagttgttgcttggaagtgagaagttgcttagaaactttccaaagtgcttagaactttaagtgcaaacagacaaactaacaaacaaaaattgttttgctttgctacaaggtggggaagactgaagaagtgttaactgaaaacaggtgacacagagtcaccagttttccgagaaccaaagggaggggtgtgtgatgccatctcacaggcaggggaaatgtctttaccagcttcctcctggtggccaagacagcctgtttcagagggttgttttgtttggggtgtgggtgttatcaagtgaattagtcacttgaaagatgggcgtcagacttgcatacgcagcagatcagcatccttcgctgccccttagcaacttaggtggttgatttgaaactgtgaaggtgtgattttttcaggagctggaagtcttagaaaagccttgtaaatgcctatattgtgggcttttaacgtatttaagggaccacttaagacgagattagatgggctcttctggatttgttcctcatttgtcacaggtgtcttgtgattgaaaatcatgagcgaagtgaaattgcattgaatttcaagggaatttagtatgtaaatcgtgccttagaaacacatctgttgtcttttctgtgtttggtcgatattaataatggcaaaatttttgcctatctagtatcttcaaattgtagtctttgtaacaaccaaataaccttttgtggtcactgtaaaattaatatttggtagacagaatccatgtacctttgctaaggttagaatgaataatttattgtatttttaatttgaatgtttgtgctttttaaatgagccaagactagaggggaaactatcacctaaaatcagtttggaaaacaagacctaaaaagggaaggggatggggattgtggggagagagtgggcgaggtgcctttactacatgtgtgatctgaaaaccctgcttggttctgagctgcgtctattgaattggtaaagtaataccaatggctttttatcatttccttcttccctttaagtttcacttgaaattttaaaaatcatggttatttttatcgttgggatctttctgtcttctgggttccattttttaaatgtttaaaaatatgttgacatggtagttcagttcttaaccaatgacttggggatgatgcaaacaattactgtcgttgggatttagagtgtattagtcacgcatgtatggggaagtagtctcgggtatgctgttgtgaaattgaaactgtaaaagtagatggttgaaagtactggtatgttgctctgtatggtaagaactaattctgttacgtcatgtacataattactaatcacttttcttcccctttacagcacaaataaagtttgagttctaaaactcattagaattgttgtattgctatgttacatttctcgacccctatcacattgccttcataacgactttggatgtatcttcatattgtagatttaggtctagatttgctagctccaagtaattaaggccatgtaggagagcatggtaaccacagatagaactggtattatcccaagtggtctgcagactgctgagtggggatgggatctgctctctgttgagagttggtaatcattggtttgaaatgtgatgaaaccactcaagccaatgaaggtgggtgtgtaggtggggagtactttgccataatattttaaaacattacctggttagagttctaagtggtacttatttttgtttggttaggggaaagcctgaataaaaacagaaatggacacataatatgcatattccatagtctttgggaggctggaatgtgcctgggatttgggtctaagtgtatgcgtaattcttacctcactaaagaatttgccttgtttttttccttttggtgagtgactaaaacgtctgggcttccctgtgtgcgtgctacagtaagcaagcagaggctgtgcaaaggtgtgagcaggatcacgtggaatctggaggatacatcttggcttgcaaactgcctctgtctcctgggtgggactgttctgtccttgcactgctgttctgtgttacctcttggggtgtaaggttttgcttacaggagacaaactttgggcgtagaatggaagccactgccagcctctgtgctgagaaggaaggtgcttgtttcaaagggagcagcaagggaggcttgttctactcacctgggcctgtttgcctgagaaggggagataagggctgaactgggactagccagggggaccaacacaaatggtgggggatcatgacctgaaggattctttccttcccatgagctgcagggctggttgccgtccttgcaactgtgtcttatttgcctgtgccgttatatcttggtgacccctccacgtgtacactactgacaaacgggtggagtgctggggagaagtcactgtgccgcccacctagtaaaccttctgtctgtgctcatggcatctccaagatggggcactgctgtgtgcagaatccagggtcctctttctgcttgcaactcctttccctggatgccccagaaacaatccaggcctcctttcctatcttacccctttgctttgctttttaccccagcacctctataaccgccttctcttcttttcagaactccttgtttctcatcctgttttttatgattacaaaactcttgcttccaccctggaagataactgctatagatgcctgtatgtaaatggtgctgtctccagcaactggcatgctgaagaagaattgattcacggggtataaatgttggggattggaagtggggatgaaatggcacttgttgatacaggagcagagaggtgaggccgactgctgaagacagctcgccaccctccttgcctccactccaatccaggggctggggccacattctttgccttcatttatcctcagatcaggtgagatcgacaggaggtgttgatggcagtgccagcaattattgctaatccgtttgcatccttatgcatagatctgaattcagactttgtgaatttccagaggtgtgggtaatataatagaattcagtgagtgggcatggctgatcttgtgcaaattaaaagttatggggcataagaatagcaaaagttgaacttcttttaaaaaggaaagtaccctgagagccagtattggttgaggctcttcagtatgcccaggttggcagcactgagaaccgcaggaacggcctgttgttacaaaaaggagattgactcagctgcccttggtgcatctgactgactatgactgctgagagattccaaggacccttaatgccagggctaacctctccatgtgcagtgagacctctggaggaagtgtcatcctctggctttgtgtggtactcattatggtgcagtgcgggcatgaaatgaagacacccaaataggcttacagatacgatatgttttaaatgttcgtatttaacaaaaacatactgacactgtttggaaatggcaacaggaagatagcaaaatgaatactaacattacgaaaagatgaacaggtacatgttccaaggcaggtggctgtgaacttcctctgagtgaaggcatcccctccagcacctttcagcctgctagttaggacgacccgccgccaccctccaggacctccagccctgcactgcctttcctctcttttaaataattcttcattgagttctaatatgtaaaaaaaaaaagtttactgtaaagtttgcaaataaggaaattttttttaaaagtcctcagtaatcttaccagtaacaattgttatgggcacatttgcttttggaagatttcttttgtatgcatgggataagtacatttttaaacaaaaatgggattatgccataaattctattttgtgactttaatatatagtgaacaccttttttaatgatgacaggatgttcccttgcatggctgtatcaatttaaacaatcttgtttcaatgggcatacagggtattttctagtttttttttcctcttagaaaataatacttgcgatgactttccttgtagctcagactttttcacgtctgttgttatctctttgggaatgctgaatacatacatttcgagaaggaaatgactgttaaactcttaagacttcaggttcatattgctaaactgcccagcagggagggattttttcaattagtgttctcactggtgaggcaaacctgatgccttcccctcttcctcagaaccggctttatcacattgaaaacctttgctcctccgacggatcgagtctgctttccctgtggatgtgagcattgctttgtctgctggtgactgaacatctctaccatgtgtcaattggccatttgtggtgtgtgtgtgtgtgcgtgtgtgtgtgtgtgtgtgtgtgtatgattttctaattcctagtcatttttctattgattgttttgcaaaagccatttacatcttaaggatattgataatcttttgttatatttgatgcaaatatttttttccagtttataggttgccttttaattttgtgtttcaggtagataaaagttaaacgattttcttaggttagtttatcactgtggtttctgaacttgttatgtgtagatcttttccaccccaagagtacataaatattaatccatactttcttatggaacttgtatggtttcgttttttacatttaaaccttcttccccgtggtgtgtgttgtggaatctgtgtttgtgtgaggaggggcatggtgctctcagaacccacctcctgtggccagagagccctgtcctgtgagggtggttatcacagtggcagggttcaattcagaagaccttgagggcaggctgatgtttcctgaatgggcccctggttgttgcttgtccctgactctccatttccccatctgagtggatttggacctaatagggcactggagctggttcgaatcctgactggactacttggcaactttatgtctgggagcaagttacttaacctccccaagcctgtgtctgtgaaatgcgggtaaatgaatgtagatgtttggcagcagctactccttgttgagctctcacagtgaactctcctgcctctgccctccttccccgcctcccctggtgcctagcgtcaggtctagccacttcctcctgggcccctctcccttttctgtggctggctgcctgcccgcctggcgctggacctttcatgtaacgggaatcagcatgtatattctggtctggtctgtttctacacttaattttgtttccagtagtatttccctgtaccggcagagttcacaaacacatttgaagaggctttttctcaggattcttaaccttcccaaaggaagtcccatggatgggtttctagaagtctataaatgctctgaaattgtatttttctgtggaaagcataactttcatctgcttgttcgtgctcaaaaaagatcatgaatgaatgattgcatgattttatgccattgtgcttatactaaaggatatgtagcccatctcttgagctgttaaactgttttgactactttaaatcgtgcagctgtgagcatctctgtaaatttagtgtacacatgtatcccctggagtggcattgcctcggcagtgagcacttatggttttataactctcttcacagactcaaatgactccagaaagctacacttcctgttgtgagtatatgatatccatttccctacatagccactaacatcaggtttttacaattttatttatttcttgctactttaagaaatttttgtggtgaaatacatataatagaagttgactatctgaatcatttttaagtatacattcagtagtgttaagtatgtcgccattgttgtacaaccaatctccagaactttttcatcttgcaaaacaaactctgtacccattaaataacattaaacattccattccctccagcctcagcaaccccattctactttctgtttctgtgagtttgactattccaagcacttcatatcagttaaatcatgaagtatttgtctgtctgtgactggcttatttctctgagcacagtgtcctcgagatgcgtctatgttgtagcatatgtcagaatttccttcctttttaaaagatccaaataatattcttattttatatcttttttttatccattcatccattagtggacacttgggttgcttttggctattgtaaataatggtgctatgtacaaatatctatattattgtatttacaagtataatgctgtaatgtacacacatctttttgagatcctaccttcagttcttttgagtatatagccagaagtggtattactaaatcttacgatatttctatttttaatttattgaggaaccactgtagtttttcatagcaactgcaccattttacgttctcaccaagagtgcacaagggttccgaggttcccacatcctccccaacacttgttattttctgctttttttagattgcagccatcatagtgggtgtgaggtgacatttcattgtggttttgatttgcatttccctaatgaggagtgatgctgagcatcttttcatatgcttactggtcatttgtatgttgtctttggaaaaatgtctattcaagtcctttgactatttgtttctttctatattctggatattaatcccctatcagatatatgatttgcaaatatcttctcttattccataaggttactttttcactttgttgattgtgttctttgatgtatagaagtttttagttttgaaatagtctaatttatctgtttttacttttgtggtctgtgcttttggtgtcatatccaagaaatccttgccaaatccaacgttataaggtacttttaaggtattttagttgtcttagtctatatttctgtactcacctttctttatccactcatcagttgatgggcatgtaggttggttccatatctttgcaattctgaattgtgctgtgatcaggtgtctttttagtataatgatttactctcctttgggtagatacccagtagtgggattgctggatcgaatggtttttataattttctattttaccacagtttctctctgcatttttcctctttgaccactaaccatgtgaaattctcatattgacctttataatgatcatgaactcttagtatcattgggaaggccacatttgccacttatgattgtaaaccttatcctccatttttcctgttattgttggtgcaaaaagcacctattataccaggactttaaaaatcagtctgataagtctttgataagtctaataataataactgataagtccattgaatttgcttctgattactttttctttagtagctaaacatgtatgtactcctatgattacaatgaacactcctctccatttaaattaattatttacattgatgaaatagcaaaatgttaatgactaaatactgtcttggttttttcgttccaggtcagtcaatattaacttcttataattttcttttttttctttatgtgtgtgtgtgtgtgtatttttttttttttaatttcaatggcttttggggtacaaatggcttttggtcatatagatgaattctacagtagtgaagtctgagattttactgcaccggtcacctgagtagtgtacattgtacccaatatgtggttttttataccttgcccccctcttaccctccccactttgagtctctagtgtccattatgtcactctgtatacctttttgtacccataagttagctctcacttataagtgagaacacacagtatttggttttccattcctgagttgcttcacttagaataatatcctccagctccatccaaaattgctgcaaaaaaaaaaaaaaccacaaacattattttgttcttttttattgctaagtcatattccatggtgtagagataccacattttatttatccactcactggttgatgggttggttccacatctttgcaattgtgacttgtactgccatcaagtgtctttctggtataatgacttcttttcctttgggtagatacccaggagtgggattgctagatcaaatggttcttaacattttctctctggatctatttctggaaattttaggctccagtttttgttgttgttgttaataaaatgcaatggaatgtaatgatcatcacttttcattatgctttaaaatctggtaaatggaggctagaacactcctgtaaggcaagaatattctctctgttggaactcaaatacacagaactgggtaaatctcaatcttaatctttgattcaggacacaacatggctctcttttacttgctttctttaattgttttttaataatgtggtaagcatttctgaatctcctatccaatacaaaaactaggacaatacagacagtaactcctatggttacaatgaacactcctctccacttaaattaattatttacactgatgaaattgaaatagcaaaattttaatgactaaatactgtctttgattttttgttccaggtctgtcaatattaacttcttataattttctttttttttctttatgtgtgtgtgtgtgtgtatatatatatatatttaatttcaatggcttttggggtacaaatggcttttggtcatatatatgagttctacagtagtgaagtctgagattttactacaccttccacttatgtggtcccacaccacccgcctcccctgccgcct

SEQ ID NO: 467087 - DNA, 10144 bp, Homo sapiens
  misc_feature (90)..(90): n is a, c, g, or t
  misc_feature (152)..(152): n is a, c, g, or t
cagtgagcaacgtgggcttgtgagagtgggggggcctctcacaagaagtgtaggcatgcattgtgtcagataaggttgggaggagactgngacaagatcaagggcagggggcaggggcaggaggctggtagtgctgtggcccagatattggncagaagtacagggaggatctcctcagggcttcaggggacagacagggagagatgactgagttagatgagactagggggcgggctgggggtgcgagaaggaagcttggcaaggagactaggtctagggggaccacagtggggcaggctgcatggaaaatatccgcagggtcccccaggcagaacagccacgctccaggccaggctgtccctactgcctggtggagggggaacttgacctctgggagggcgccgctcttgcatagctgagcgagcccgggtgcgctggtctgtgtggaaggaggaaggcagggagaggtagaaggggtggaggagtcaggaggaataggccgcagcagccctggaaatgatcaggaaggcaggcagtgggtgcagggctgcaggagggccgggagggctaatcttcaacttgtccatgccagcagcccctttttttccagaccaagggctgtgaacccgcctggggatgaggcctggtcttgtggaactgaacttagctcgacggggctgaccgctctggcccagggtggtatgtaattttcgctcggcctgggacggggcccaggccgggcccagcctggtggagcgtccaggtctgggtgcgaagccaggcccctgggcggaggtgaggggtggtctgaggagtgatgtggagttaaggcgccatcctcaccggtgactggtgcggcacctagcatgtttgacaggcggggactgcgaggcacgctgctcgggtgttggggacaacattgaccaacgctttattttccaggtggcagtgctccttttggacttttctctaggtttggcgctaaactcttcttgtgagctcactccaccccttcttcctccctttaacttatccattcacttaaaacattagctggtcatctggtaagcccgggacagtaagccgagtggctgttggagtcggtattgttggtaatggtggaggaagagaggccttcccgctgaggctggggtggggcggatcggtgttgcttgcctgcagagagggtggggagtgaatgtgcacccttgggtgggcctgcagccatccagctgaaagttacaaaaatgcttcatggaccgtggtttgttactatagtgttcctcatggcgagcagatggaaccgggagacatggagtccctggccagtgtgagtcctagcattgcaggaggggagaccctggaggagagagcccgcctcaattgatgcctgcagattgaatttccagaggcttaggaggaggaagttctccaatgttctgtttccaggccttgctcaggaagccctgtattcaggaggctaccatttaaagtttgcagatgagcttatggggggcaatcttaaaaagtccacagcagatgcatccggctcgaggggccatcagctttgaataaatgcttgttccagagcccatgaatgccagcaggcacccctcctttcctggggtaaaggttttcagatgctgcatcttctaaattgagcctccggtcatactagttttgtgcttggaaccttgcttcaagaagatccctaagctgtagaacattttaacgttgatgccacaacgcagattgatgccttgtagatggagcttgcagatggagccccgtgacctctcacctacccacctgtttgcctgccttcttgtgcgtttctcggagaagttcttagcctgatgaaataacttggggcgttgaagagctgtttaattttaaatgccttagactggggatatattagaggaagcagattgtcaaattaagggtgtcattgtgttgtgctaaacgctgggagggtacaagttggtcattcctaaatctgtgtgtgagaaatggcaggtctagtttgggcattgtgattgcattgcagattactaggagaagggaatggtgggtacaccggtagtgctcttttgttcttgcttcgtttttttaaacttgaactttacttcgttagatttcataatactttcttggcattctagtaagaggaccctgaggtgggagttgtgggggacggggagaaggggacagcttggcaccggtcccgtgggcgttgcagtgtgggggatgggggtatgcagcttggcactggtactgggagggatgagggtgaagaaggggagagggttggttagagatacagtgtgggtggtgggggtggtaggaaatgcaggttgaagggaattctctggggctttggggaatttagtgcgtgggtgagccaagaaaatactaattaataatagtaagttgttagtgttggttaagttgttgcttggaagtgagaagttgcttagaaactttccaaagtgcttagaactttaagtgcaaacagacaaactaacaaacaaaaattgttttgctttgctacaaggtggggaagactgaagaagtgttaactgaaaacaggtgacacagagtcaccagttttccgagaaccaaagggaggggtgtgtgatgccatctcacaggcaggggaaatgtctttaccagcttcctcctggtggccaagacagcctgtttcagagggttgttttgtttggggtgtgggtgttatcaagtgaattagtcacttgaaagatgggcgtcagacttgcatacgcagcagatcagcatccttcgctgccccttagcaacttaggtggttgatttgaaactgtgaaggtgtgattttttcaggagctggaagtcttagaaaagccttgtaaatgcctatattgtgggcttttaacgtatttaagggaccacttaagacgagattagatgggctcttctggatttgttcctcatttgtcacaggtgtcttgtgattgaaaatcatgagcgaagtgaaattgcattgaatttcaagggaatttagtatgtaaatcgtgccttagaaacacatctgttgtcttttctgtgtttggtcgatattaataatggcaaaatttttgcctatctagtatcttcaaattgtagtctttgtaacaaccaaataaccttttgtggtcactgtaaaattaatatttggtagacagaatccatgtacctttgctaaggttagaatgaataatttattgtatttttaatttgaatgtttgtgctttttaaatgagccaagactagaggggaaactatcacctaaaatcagtttggaaaacaagacctaaaaagggaaggggatggggattgtggggagagagtgggcgaggtgcctttactacatgtgtgatctgaaaaccctgcttggttctgagctgcgtctattgaattggtaaagtaataccaatggctttttatcatttccttcttccctttaagtttcacttgaaattttaaaaatcatggttatttttatcgttgggatctttctgtcttctgggttccattttttaaatgtttaaaaatatgttgacatggtagttcagttcttaaccaatgacttggggatgatgcaaacaattactgtcgttgggatttagagtgtattagtcacgcatgtatggggaagtagtctcgggtatgctgttgtgaaattgaaactgtaaaagtagatggttgaaagtactggtatgttgctctgtatggtaagaactaattctgttacgtcatgtacataattactaatcacttttcttcccctttacagcacaaataaagtttgagttctaaaactcattagaattgttgtattgctatgttacatttctcgacccctatcacattgccttcataacgactttggatgtatcttcatattgtagatttaggtctagatttgctagctccaagtaattaaggccatgtaggagagcatggtaaccacagatagaactggtattatcccaagtggtctgcagactgctgagtggggatgggatctgctctctgttgagagttggtaatcattggtttgaaatgtgatgaaaccactcaagccaatgaaggtgggtgtgtaggtggggagtactttgccataatattttaaaacattacctggttagagttctaagtggtacttatttttgtttggttaggggaaagcctgaataaaaacagaaatggacacataatatgcatattccatagtctttgggaggctggaatgtgcctgggatttgggtctaagtgtatgcgtaattcttacctcactaaagaatttgccttgtttttttccttttggtgagtgactaaaacgtctgggcttccctgtgtgcgtgctacagtaagcaagcagaggctgtgcaaaggtgtgagcaggatcacgtggaatctggaggatacatcttggcttgcaaactgcctctgtctcctgggtgggactgttctgtccttgcactgctgttctgtgttacctcttggggtgtaaggttttgcttacaggagacaaactttgggcgtagaatggaagccactgccagcctctgtgctgagaaggaaggtgcttgtttcaaagggagcagcaagggaggcttgttctactcacctgggcctgtttgcctgagaaggggagataagggctgaactgggactagccagggggaccaacacaaatggtgggggatcatgacctgaaggattctttccttcccatgagctgcagggctggttgccgtccttgcaactgtgtcttatttgcctgtgccgttatatcttggtgacccctccacgtgtacactactgacaaacgggtggagtgctggggagaagtcactgtgccgcccacctagtaaaccttctgtctgtgctcatggcatctccaagatggggcactgctgtgtgcagaatccagggtcctctttctgcttgcaactcctttccctggatgccccagaaacaatccaggcctcctttcctatcttacccctttgctttgctttttaccccagcacctctataaccgccttctcttcttttcagaactccttgtttctcatcctgttttttatgattacaaaactcttgcttccaccctggaagataactgctatagatgcctgtatgtaaatggtgctgtctccagcaactggcatgctgaagaagaattgattcacggggtataaatgttggggattggaagtggggatgaaatggcacttgttgatacaggagcagagaggtgaggccgactgctgaagacagctcgccaccctccttgcctccactccaatccaggggctggggccacattctttgccttcatttatcctcagatcaggtgagatcgacaggaggtgttgatggcagtgccagcaattattgctaatccgtttgcatccttatgcatagatctgaattcagactttgtgaatttccagaggtgtgggtaatataatagaattcagtgagtgggcatggctgatcttgtgcaaattaaaagttatggggcataagaatagcaaaagttgaacttcttttaaaaaggaaagtaccctgagagccagtattggttgaggctcttcagtatgcccaggttggcagcactgagaaccgcaggaacggcctgttgttacaaaaaggagattgactcagctgcccttggtgcatctgactgactatgactgctgagagattccaaggacccttaatgccagggctaacctctccatgtgcagtgagacctctggaggaagtgtcatcctctggctttgtgtggtactcattatggtgcagtgcgggcatgaaatgaagacacccaaataggcttacagatacgatatgttttaaatgttcgtatttaacaaaaacatactgacactgtttggaaatggcaacaggaagatagcaaaatgaatactaacattacgaaaagatgaacaggtacatgttccaaggcaggtggctgtgaacttcctctgagtgaaggcatcccctccagcacctttcagcctgctagttaggacgacccgccgccaccctccaggacctccagccctgcactgcctttcctctcttttaaataattcttcattgagttctaatatgtaaaaaaaaaaagtttactgtaaagtttgcaaataaggaaattttttttaaaagtcctcagtaatcttaccagtaacaattgttatgggcacatttgcttttggaagatttcttttgtatgcatgggataagtacatttttaaacaaaaatgggattatgccataaattctattttgtgactttaatatatagtgaacaccttttttaatgatgacaggatgttcccttgcatggctgtatcaatttaaacaatcttgtttcaatgggcatacagggtattttctagtttttttttcctcttagaaaataatacttgcgatgactttccttgtagctcagactttttcacgtctgttgttatctctttgggaatgctgaatacatacatttcgagaaggaaatgactgttaaactcttaagacttcaggttcatattgctaaactgcccagcagggagggattttttcaattagtgttctcactggtgaggcaaacctgatgccttcccctcttcctcagaaccggctttatcacattgaaaacctttgctcctccgacggatcgagtctgctttccctgtggatgtgagcattgctttgtctgctggtgactgaacatctctaccatgtgtcaattggccatttgtggtgtgtgtgtgtgtgcgtgtgtgtgtgtgtgtgtgtgtgtatgattttctaattcctagtcatttttctattgattgttttgcaaaagccatttacatcttaaggatattgataatcttttgttatatttgatgcaaatatttttttccagtttataggttgccttttaattttgtgtttcaggtagataaaagttaaacgattttcttaggttagtttatcactgtggtttctgaacttgttatgtgtagatcttttccaccccaagagtacataaatattaatccatactttcttatggaacttgtatggtttcgtttttacaattttatttatttcttgctactttaagaaatttttgtggtgaaatacatataatagaagttgactatctgaatcatttttaagtatacattcagtagtgttaagtatgtcgccattgttgtacaaccaatctccagaactttttcatcttgcaaaacaaactctgtacccattaaataacattaaacattccattccctccagcctcagcaaccccattctactttctgtttctgtgagtttgactattccaagcacttcatatcagttaaatcatgaagtatttgtctgtctgtgactggcttatttctctgagcacagtgtcctcgagatgcgtctatgttgtagcatatgtcagaatttccttcctttttaaaagatccaaataatattcttattttatatcttttttttatccattcatccattagtggacacttgggttgcttttggctattgtaaataatggtgctatgtacaaatatctatattattgtatttacaagtataatgctgtaatgtacacacatctttttgagatcctaccttcagttcttttgagtatatagccagaagtggtattactaaatcttacgatatttctatttttaatttattgaggaaccactgtagtttttcatagcaactgcaccattttacgttctcaccaagagtgcacaagggttccgaggttcccacatcctccccaacacttgttattttctgctttttttagattgcagccatcatagtgggtgtgaggtgacatttcattgtggttttgatttgcatttccctaatgaggagtgatgctgagcatcttttcatatgcttactggtcatttgtatgttgtctttggaaaaatgtctattcaagtcctttgactattttaaaaattgggttattagagttatcgttgttgttgacttgtaggagtttctttctatattctggatattaatcccctatcagatatatgatttgcaaatatcttctcttattccataaggttactttttcactttgttgattgtgttctttgatgtatagaagtttttagttttgaaatagtctaatttatctgtttttacttttgtggtctgtgcttttggtgtcatatccaagaaatccttgccaaatccaacgttataaggtacttttaaggtattttagttgtcttagtctatatttctgtactcacctttctttatccactcatcagttgatgggcatgtaggttggttccatatctttgcaattctgaattgtgctgtgatcaggtgtctttttagtataatgatttactctcctttgggtagatacccagtagtgggattgctggatcgaatggtttttataattttctattttaccacagtttctctctgcatttttcctctttgaccactaaccatgtgaaattctcatattgacctttataatgatcatgaactcttagtatcattgggaaggccacatttgccacttatgattgtaaaccttatcctccatttttcctgttattgttggtgcaaaaagcacctattataccaggactttaaaaatcagtctgataagtctttgataagtctaataataataactgataagtccattgaatttgcttctgattactttttctttagtagctaaacatgtatgtactcctatgattacaatgaacactcctctccatttaaattaattatttacattgatgaaatagcaaaatgttaatgactaaatactgtcttggttttttcgttccaggtcagtcaatattaacttcttataattttcttttttttctttatgtgtgtgtgtgtgtgtatttttttttttttaatttcaatggcttttggggtacaaatggcttttggtcatatagatgaattctacagtagtgaagtctgagattttactgcaccggtcacctgagtagtgtacattgtacccaatatgtggttttttataccttgcccccctcttaccctccccactttgagtctctagtgtccattatgtcactctgtatacctttttgtacccataagttagctctcacttataagtgagaacacacagtatttggttttccattcctgagttgcttcacttagaataatatcctccagctccatccaaaattgctgcaaaaaaaaaaaaaaccacaaacattattttgttcttttttattgctaagtcatattccatggtgtagagataccacattttatttatccactcactggttgatgggttggttccacatctttgcaattgtgacttgtactgccatcaagtgtctttctggtataatgacttcttttcctttgggtagatacccaggagtgggattgctagatcaaatggttcttaacattttctctctggatctatttctggaaattttaggctccagtttttgttgttgttgttaataaaatgcaatggaatgtaatgatcatcacttttcattatgctttaaaatctggtaaatggaggctagaacactcctgtaaggcaagaatattctctctgttggaactcaaatacacagaactgggtaaatctcaatcttaatctttgattcaggacacaacatggctctcttttacttgctttctttaattgttttttaataatgtggtaagcatttctgaatctcctatccaatacaaaaactaggacaatacagacagtaactcctatggttacaatgaacactcctctccacttaaattaattatttacactgatgaaattgaaatagcaaaattttaatgactaaatactgtctttgattttttgttccaggtctgtcaatattaacttcttataattttctttttttttctttatgtgtgtgtgtgtgtgtatatatatatatatttaatttcaatggcttttggggtacaaatggcttttggtcatatatatgagttctacagtagtgaagtctgagattttactacaccttccacttatgtggtcccacaccacccgcctcccctgccgcct

SEQ ID NO: 467088 - DNA, 10118 bp, Homo sapiens
  misc_feature (90)..(90): n is a, c, g, or t
  misc_feature (152)..(152): n is a, c, g, or t
  misc_feature (10018)..(10018): n is a, c, g, or t
cagtgagcaacgtgggcttgtgagagtgggggggcctctcacaagaagtgtaggcatgcattgtgtcagataaggttgggaggagactgngacaagatcaagggcagggggcaggggcaggaggctggtagtgctgtggcccagatattggncagaagtacagggaggatctcctcagggcttcaggggacagacagggagagatgactgagttagatgagactagggggcgggctgggggtgcgagaaggaagcttggcaaggagactaggtctagggggaccacagtggggcaggctgcatggaaaatatccgcagggtcccccaggcagaacagccacgctccaggccaggctgtccctactgcctggtggagggggaacttgacctctgggagggcgccgctcttgcatagctgagcgagcccgggtgcgctggtctgtgtggaaggaggaaggcagggagaggtagaaggggtggaggagtcaggaggaataggccgcagcagccctggaaatgatcaggaaggcaggcagtgggtgcagggctgcaggagggccgggagggctaatcttcaacttgtccatgccagcagcccctttttttccagaccaagggctgtgaacccgcctggggatgaggcctggtcttgtggaactgaacttagctcgacggggctgaccgctctggcccagggtggtatgtaattttcgctcggcctgggacggggcccaggccgggcccagcctggtggagcgtccaggtctgggtgcgaagccaggcccctgggcggaggtgaggggtggtctgaggagtgatgtggagttaaggcgccatcctcaccggtgactggtgcggcacctagcatgtttgacaggcggggactgcgaggcacgctgctcgggtgttggggacaacattgaccaacgctttattttccaggtggcagtgctccttttggacttttctctaggtttggcgctaaactcttcttgtgagctcactccaccccttcttcctccctttaacttatccattcacttaaaacattagctggtcatctggtaagcccgggacagtaagccgagtggctgttggagtcggtattgttggtaatggtggaggaagagaggccttcccgctgaggctggggtggggcggatcggtgttgcttgcctgcagagagggtggggagtgaatgtgcacccttgggtgggcctgcagccatccagctgaaagttacaaaaatgcttcatggaccgtggtttgttactatagtgttcctcatggcgagcagatggaaccgggagacatggagtccctggccagtgtgagtcctagcattgcaggaggggagaccctggaggagagagcccgcctcaattgatgcctgcagattgaatttccagaggcttaggaggaggaagttctccaatgttctgtttccaggccttgctcaggaagccctgtattcaggaggctaccatttaaagtttgcagatgagcttatggggggcaatcttaaaaagtccacagcagatgcatccggctcgaggggccatcagctttgaataaatgcttgttccagagcccatgaatgccagcaggcacccctcctttcctggggtaaaggttttcagatgctgcatcttctaaattgagcctccggtcatactagttttgtgcttggaaccttgcttcaagaagatccctaagctgtagaacattttaacgttgatgccacaacgcagattgatgccttgtagatggagcttgcagatggagccccgtgacctctcacctacccacctgtttgcctgccttcttgtgcgtttctcggagaagttcttagcctgatgaaataacttggggcgttgaagagctgtttaattttaaatgccttagactggggatatattagaggaagcagattgtcaaattaagggtgtcattgtgttgtgctaaacgctgggagggtacaagttggtcattcctaaatctgtgtgtgagaaatggcaggtctagtttgggcattgtgattgcattgcagattactaggagaagggaatggtgggtacaccggtagtgctcttttgttcttgcttcgtttttttaaacttgaactttacttcgttagatttcataatactttcttggcattctagtaagaggaccctgaggtgggagttgtgggggacggggagaaggggacagcttggcaccggtcccgtgggcgttgcagtgtgggggatgggggtatgcagcttggcactggtactgggagggatgagggtgaagaaggggagagggttggttagagatacagtgtgggtggtgggggtggtaggaaatgcaggttgaagggaattctctggggctttggggaatttagtgcgtgggtgagccaagaaaatactaattaataatagtaagttgttagtgttggttaagttgttgcttggaagtgagaagttgcttagaaactttccaaagtgcttagaactttaagtgcaaacagacaaactaacaaacaaaaattgttttgctttgctacaaggtggggaagactgaagaagtgttaactgaaaacaggtgacacagagtcaccagttttccgagaaccaaagggaggggtgtgtgatgccatctcacaggcaggggaaatgtctttaccagcttcctcctggtggccaagacagcctgtttcagagggttgttttgtttggggtgtgggtgttatcaagtgaattagtcacttgaaagatgggcgtcagacttgcatacgcagcagatcagcatccttcgctgccccttagcaacttaggtggttgatttgaaactgtgaaggtgtgattttttcaggagctggaagtcttagaaaagccttgtaaatgcctatattgtgggcttttaacgtatttaagggaccacttaagacgagattagatgggctcttctggatttgttcctcatttgtcacaggtgtcttgtgattgaaaatcatgagcgaagtgaaattgcattgaatttcaagggaatttagtatgtaaatcgtgccttagaaacacatctgttgtcttttctgtgtttggtcgatattaataatggcaaaatttttgcctatctagtatcttcaaattgtagtctttgtaacaaccaaataaccttttgtggtcactgtaaaattaatatttggtagacagaatccatgtacctttgctaaggttagaatgaataatttattgtatttttaatttgaatgtttgtgctttttaaatgagccaagactagaggggaaactatcacctaaaatcagtttggaaaacaagacctaaaaagggaaggggatggggattgtggggagagagtgggcgaggtgcctttactacatgtgtgatctgaaaaccctgcttggttctgagctgcgtctattgaattggtaaagtaataccaatggctttttatcatttccttcttccctttaagtttcacttgaaattttaaaaatcatggttatttttatcgttgggatctttctgtcttctgggttccattttttaaatgtttaaaaatatgttgacatggtagttcagttcttaaccaatgacttggggatgatgcaaacaattactgtcgttgggatttagagtgtattagtcacgcatgtatggggaagtagtctcgggtatgctgttgtgaaattgaaactgtaaaagtagatggttgaaagtactggtatgttgctctgtatggtaagaactaattctgttacgtcatgtacataattactaatcacttttcttcccctttacagcacaaataaagtttgagttctaaaactcattagaattgttgtattgctatgttacatttctcgacccctatcacattgccttcataacgactttggatgtatcttcatattgtagatttaggtctagatttgctagctccaagtaattaaggccatgtaggagagcatggtaaccacagatagaactggtattatcccaagtggtctgcagactgctgagtggggatgggatctgctctctgttgagagttggtaatcattggtttgaaatgtgatgaaaccactcaagccaatgaaggtgggtgtgtaggtggggagtactttgccataatattttaaaacattacctggttagagttctaagtggtacttatttttgtttggttaggggaaagcctgaataaaaacagaaatggacacataatatgcatattccatagtctttgggaggctggaatgtgcctgggatttgggtctaagtgtatgcgtaattcttacctcactaaagaatttgccttgtttttttccttttggtgagtgactaaaacgtctgggcttccctgtgtgcgtgctacagtaagcaagcagaggctgtgcaaaggtgtgagcaggatcacgtggaatctggaggatacatcttggcttgcaaactgcctctgtctcctgggtgggactgttctgtccttgcactgctgttctgtgttacctcttggggtgtaaggttttgcttacaggagacaaactttgggcgtagaatggaagccactgccagcctctgtgctgagaaggaaggtgcttgtttcaaagggagcagcaagggaggcttgttctactcacctgggcctgtttgcctgagaaggggagataagggctgaactgggactagccagggggaccaacacaaatggtgggggatcatgacctgaaggattctttccttcccatgagctgcagggctggttgccgtccttgcaactgtgtcttatttgcctgtgccgttatatcttggtgacccctccacgtgtacactactgacaaacgggtggagtgctggggagaagtcactgtgccgcccacctagtaaaccttctgtctgtgctcatggcatctccaagatggggcactgctgtgtgcagaatccagggtcctctttctgcttgcaactcctttccctggatgccccagaaacaatccaggcctcctttcctatcttacccctttgctttgctttttaccccagcacctctataaccgccttctcttcttttcagaactccttgtttctcatcctgttttttatgattacaaaactcttgcttccaccctggaagataactgctatagatgcctgtatgtaaatggtgctgtctccagcaactggcatgctgaagaagaattgattcacggggtataaatgttggggattggaagtggggatgaaatggcacttgttgatacaggagcagagaggtgaggccgactgctgaagacagctcgccaccctccttgcctccactccaatccaggggctggggccacattctttgccttcatttatcctcagatcaggtgagatcgacaggaggtgttgatggcagtgccagcaattattgctaatccgtttgcatccttatgcatagatctgaattcagactttgtgaatttccagaggtgtgggtaatataatagaattcagtgagtgggcatggctgatcttgtgcaaattaaaagttatggggcataagaatagcaaaagttgaacttcttttaaaaaggaaagtaccctgagagccagtattggttgaggctcttcagtatgcccaggttggcagcactgagaaccgcaggaacggcctgttgttacaaaaaggagattgactcagctgcccttggtgcatctgactgactatgactgctgagagattccaaggacccttaatgccagggctaacctctccatgtgcagtgagacctctggaggaagtgtcatcctctggctttgtgtggtactcattatggtgcagtgcgggcatgaaatgaagacacccaaataggcttacagatacgatatgttttaaatgttcgtatttaacaaaaacatactgacactgtttggaaatggcaacaggaagatagcaaaatgaatactaacattacgaaaagatgaacaggtacatgttccaaggcaggtggctgtgaacttcctctgagtgaaggcatcccctccagcacctttcagcctgctagttaggacgacccgccgccaccctccaggacctccagccctgcactgcctttcctctcttttaaataattcttcattgagttctaatatgtaaaaaaaaaaagtttactgtaaagtttgcaaataaggaaattttttttaaaagtcctcagtaatcttaccagtaacaattgttatgggcacatttgcttttggaagatttcttttgtatgcatgggataagtacatttttaaacaaaaatgggattatgccataaattctattttgtgactttaatatatagtgaacaccttttttaatgatgacaggatgttcccttgcatggctgtatcaatttaaacaatcttgtttcaatgggcatacagggtattttctagtttttttttcctcttagaaaataatacttgcgatgactttccttgtagctcagactttttcacgtctgttgttatctctttgggaatgctgaatacatacatttcgagaaggaaatgactgttaaactcttaagacttcaggttcatattgctaaactgcccagcagggagggattttttcaattagtgttctcactggtgaggcaaacctgatgccttcccctcttcctcagaaccggctttatcacattgaaaacctttgctcctccgacggatcgagtctgctttccctgtggatgtgagcattgctttgtctgctggtgactgaacatctctaccatgtgtcaattggccatttgtggtgtgtgtgtgtgtgcgtgtgtgtgtgtgtgtgtgtgtgtatgattttctaattcctagtcatttttctattgattgttttgcaaaagccatttacatcttaaggatattgataatcttttgttatatttgatgcaaatatttttttccagtttataggttgccttttaattttgtgtttcaggtagataaaagttaaacgattttcttaggttagtttatcactgtggtttctgaacttgttatgtgtagatcttttccaccccaagagtacataaatattaatccatactttcttatggaacttgtatggtttcgttttttacatttaaaccttcttccccgtggtgtgtgttgtggaatctgtgtttgtgtgaggaggggcatggtgctctcagaacccacctcctgtggccagagagccctgtcctgtgagggtggttatcacagtggcagggttcaattcagaagaccttgagggcaggctgatgtttcctgaatgggcccctggttgttgcttgtccctgactctccatttccccatctgagtggatttggacctaatagggcactggagctggttcgaatcctgactggactacttggcaactttatgtctgggagcaagttacttaacctccccaagcctgtgtctgtgaaatgcgggtaaatgaatgtagatgtttggcagcagctactccttgttgagctctcacagtgaactctcctgcctctgccctccttccccgcctcccctggtgcctagcgtcaggtctagccacttcctcctgggcccctctcccttttctgtggctggctgcctgcccgcctggcgctggacctttcatgtaacgggaatcagcatgtatattctggtctggtctgtttctacacttaattttgtttccagtagtatttccctgtaccggcagagttcacaaacacatttgaagaggctttttctcaggattcttaaccttcccaaaggaagtcccatggatgggtttctagaagtctataaatgctctgaaattgtatttttctgtggaaagcataactttcatctgcttgttcgtgctcaaaaaagatcatgaatgaatgattgcatgattttatgccattgtgcttatactaaaggatatgtagcccatctcttgagctgttaaactgttttgactactttaaatcgtgcagctgtgagcatctctgtaaatttagtgtacacatgtatcccctggagtggcattgcctcggcagtgagcacttatggttttataactctcttcacagactcaaatgactccagaaagctacacttcctgttgtgagtatatgatatccatttccctacatagccactaacatcaggtttttacaattttatttatttcttgctactttaagaaatttttgtggtgaaatacatataatagaagttgactatctgaatcatttttaagtatacattcagtagtgttaagtatgtcgccattgttgtacaaccaatctccagaactttttcatcttgcaaaacaaactctgtacccattaaataacattaaacattccattccctccagcctcagcaaccccattctactttctgtttctgtgagtttgactattccaagcacttcatatcagttaaatcatgaagtatttgtctgtctgtgactggcttatttctctgagcacagtgtcctcgagatgcgtctatgttgtagcatatgtcagaatttccttcctttttaaaagatccaaataatattcttattttatatcttttttttatccattcatccattagtggacacttgggttgcttttggctattgtaaataatggtgctatgtacaaatatctatattattgtatttacaagtataatgctgtaatgtacacacatctttttgagatcctaccttcagttcttttgagtatatagccagaagtggtattactaaatcttacgatatttctatttttaatttattgaggaaccactgtagtttttcatagcaactgcaccattttacgttctcaccaagagtgcacaagggttccgaggttcccacatcctccccaacacttgttattttctgctttttttagattgcagccatcatagtgggtgtgaggtgacatttcattgtggttttgatttgcatttccctaatgaggagtgatgctgagcatcttttcatatgcttactggtcatttgtatgttgtctttggaaaaatgtctattcaagtcctttgactattttaaaaattgggttattagagttatcgttgttgttgacttgtaggagtttctttctatattctggatattaatcccctatcagatatatgatttgcaaatatcttctcttattccataaggttactttttcactttgttgattgtgttctttgatgtatagaagtttttagttttgaaatagtctaatttatctgtttttacttttgtggtctgtgcttttggtgtcatatccaagaaatccttgccaaatccaacgttataaggtacttttaaggtattttagttgtcttagtctatatttctgtactcacctttctttatccactcatcagttgatgggcatgtaggttggttccatatctttgcaattctgaattgtgctgtgatcaggtgtctttttagtataatgatttactctcctttgggtagatacccagtagtgggattgctggatcgaatggtttttataattttctattttaccacagtttctctctgcatttttcctctttgaccactaaccatgtgaaattctcatattgacctttataatgatcatgaactcttagtatcattgggaaggccacatttgccacttatgattgtaaaccttatcctccatttttcctgttattgttggtgcaaaaagcacctattataccaggactttaaaaatcagtctgataagtctttgataagtctaataataataactgataagtccattgaatttgcttctgattactttttctttagtagctaaacatgtatgtactcctatgattacaatgaacactcctctccatttaaattaattatttacattgatgaaatagcaaaatgttaatgactaaatactgtcttggttttttcgttccaggtcagtcaatattaacttcttataattttcttttttttctttatgtgtgtgtgtgtgtgtattttttttttttnttttttttgtttttgggtgcctttgggtttttggttttttggtgtttgttccgttgttgttttttggtcttttgctccccctttttcttgcccttggccc

SEQ ID NO: 467089 - DNA, 10172 bp, Homo sapiens
  misc_feature (90)..(90): n is a, c, g, or t
  misc_feature (152)..(152): n is a, c, g, or t
cagtgagcaacgtgggcttgtgagagtgggggggcctctcacaagaagtgtaggcatgcattgtgtcagataaggttgggaggagactgngacaagatcaagggcagggggcaggggcaggaggctggtagtgctgtggcccagatattggncagaagtacagggaggatctcctcagggcttcaggggacagacagggagagatgactgagttagatgagactagggggcgggctgggggtgcgagaaggaagcttggcaaggagactaggtctagggggaccacagtggggcaggctgcatggaaaatatccgcagggtcccccaggcagaacagccacgctccaggccaggctgtccctactgcctggtggagggggaacttgacctctgggagggcgccgctcttgcatagctgagcgagcccgggtgcgctggtctgtgtggaaggaggaaggcagggagaggtagaaggggtggaggagtcaggaggaataggccgcagcagccctggaaatgatcaggaaggcaggcagtgggtgcagggctgcaggagggccgggagggctaatcttcaacttgtccatgccagcagcccctttttttccagaccaagggctgtgaacccgcctggggatgaggcctggtcttgtggaactgaacttagctcgacggggctgaccgctctggcccagggtggtatgtaattttcgctcggcctgggacggggcccaggccgggcccagcctggtggagcgtccaggtctgggtgcgaagccaggcccctgggcggaggtgaggggtggtctgaggagtgatgtggagttaaggcgccatcctcaccggtgactggtgcggcacctagcatgtttgacaggcggggactgcgaggcacgctgctcgggtgttggggacaacattgaccaacgctttattttccaggtggcagtgctccttttggacttttctctaggtttggcgctaaactcttcttgtgagctcactccaccccttcttcctccctttaacttatccattcacttaaaacattagctggtcatctggtaagcccgggacagtaagccgagtggctgttggagtcggtattgttggtaatggtggaggaagagaggccttcccgctgaggctggggtggggcggatcggtgttgcttgcctgcagagagggtggggagtgaatgtgcacccttgggtgggcctgcagccatccagctgaaagttacaaaaatgcttcatggaccgtggtttgttactatagtgttcctcatggcgagcagatggaaccgggagacatggagtccctggccagtgtgagtcctagcattgcaggaggggagaccctggaggagagagcccgcctcaattgatgcctgcagattgaatttccagaggcttaggaggaggaagttctccaatgttctgtttccaggccttgctcaggaagccctgtattcaggaggctaccatttaaagtttgcagatgagcttatggggggcaatcttaaaaagtccacagcagatgcatccggctcgaggggccatcagctttgaataaatgcttgttccagagcccatgaatgccagcaggcacccctcctttcctggggtaaaggttttcagatgctgcatcttctaaattgagcctccggtcatactagttttgtgcttggaaccttgcttcaagaagatccctaagctgtagaacattttaacgttgatgccacaacgcagattgatgccttgtagatggagcttgcagatggagccccgtgacctctcacctacccacctgtttgcctgccttcttgtgcgtttctcggagaagttcttagcctgatgaaataacttggggcgttgaagagctgtttaattttaaatgccttagactggggatatattagaggaagcagattgtcaaattaagggtgtcattgtgttgtgctaaacgctgggagggtacaagttggtcattcctaaatctgtgtgtgagaaatggcaggtctagtttgggcattgtgattgcattgcagattactaggagaagggaatggtgggtacaccggtagtgctcttttgttcttgcttcgtttttttaaacttgaactttacttcgttagatttcataatactttcttggcattctagtaagaggaccctgaggtgggagttgtgggggacggggagaaggggacagcttggcaccggtcccgtgggcgttgcagtgtgggggatgggggtatgcagcttggcactggtactgggagggatgagggtgaagaaggggagagggttggttagagatacagtgtgggtggtgggggtggtaggaaatgcaggttgaagggaattctctggggctttggggaatttagtgcgtgggtgagccaagaaaatactaattaataatagtaagttgttagtgttggttaagttgttgcttggaagtgagaagttgcttagaaactttccaaagtgcttagaactttaagtgcaaacagacaaactaacaaacaaaaattgttttgctttgctacaaggtggggaagactgaagaagtgttaactgaaaacaggtgacacagagtcaccagttttccgagaaccaaagggaggggtgtgtgatgccatctcacaggcaggggaaatgtctttaccagcttcctcctggtggccaagacagcctgtttcagagggttgttttgtttggggtgtgggtgttatcaagtgaattagtcacttgaaagatgggcgtcagacttgcatacgcagcagatcagcatccttcgctgccccttagcaacttaggtggttgatttgaaactgtgaaggtgtgattttttcaggagctggaagtcttagaaaagccttgtaaatgcctatattgtgggcttttaacgtatttaagggaccacttaagacgagattagatgggctcttctggatttgttcctcatttgtcacaggtgtcttgtgattgaaaatcatgagcgaagtgaaattgcattgaatttcaagggaatttagtatgtaaatcgtgccttagaaacacatctgttgtcttttctgtgtttggtcgatattaataatggcaaaatttttgcctatctagtatcttcaaattgtagtctttgtaacaaccaaataaccttttgtggtcactgtaaaattaatatttggtagacagaatccatgtacctttgctaaggttagaatgaataatttattgtatttttaatttgaatgtttgtgctttttaaatgagccaagactagaggggaaactatcacctaaaatcagtttggaaaacaagacctaaaaagggaaggggatggggattgtggggagagagtgggcgaggtgcctttactacatgtgtgatctgaaaaccctgcttggttctgagctgcgtctattgaattggtaaagtaataccaatggctttttatcatttccttcttccctttaagtttcacttgaaattttaaaaatcatggttatttttatcgttgggatctttctgtcttctgggttccattttttaaatgtttaaaaatatgttgacatggtagttcagttcttaaccaatgacttggggatgatgcaaacaattactgtcgttgggatttagagtgtattagtcacgcatgtatggggaagtagtctcgggtatgctgttgtgaaattgaaactgtaaaagtagatggttgaaagtactggtatgttgctctgtatggtaagaactaattctgttacgtcatgtacataattactaatcacttttcttcccctttacagcacaaataaagtttgagttctaaaactcattagaattgttgtattgctatgttacatttctcgacccctatcacattgccttcataacgactttggatgtatcttcatattgtagatttaggtctagatttgctagctccaagtaattaaggccatgtaggagagcatggtaaccacagatagaactggtattatcccaagtggtctgcagactgctgagtggggatgggatctgctctctgttgagagttggtaatcattggtttgaaatgtgatgaaaccactcaagccaatgaaggtgggtgtgtaggtggggagtactttgccataatattttaaaacattacctggttagagttctaagtggtacttatttttgtttggttaggggaaagcctgaataaaaacagaaatggacacataatatgcatattccatagtctttgggaggctggaatgtgcctgggatttgggtctaagtgtatgcgtaattcttacctcactaaagaatttgccttgtttttttccttttggtgagtgactaaaacgtctgggcttccctgtgtgcgtgctacagtaagcaagcagaggctgtgcaaaggtgtgagcaggatcacgtggaatctggaggatacatcttggcttgcaaactgcctctgtctcctgggtgggactgttctgtccttgcactgctgttctgtgttacctcttggggtgtaaggttttgcttacaggagacaaactttgggcgtagaatggaagccactgccagcctctgtgctgagaaggaaggtgcttgtttcaaagggagcagcaagggaggcttgttctactcacctgggcctgtttgcctgagaaggggagataagggctgaactgggactagccagggggaccaacacaaatggtgggggatcatgacctgaaggattctttccttcccatgagctgcagggctggttgccgtccttgcaactgtgtcttatttgcctgtgccgttatatcttggtgacccctccacgtgtacactactgacaaacgggtggagtgctggggagaagtcactgtgccgcccacctagtaaaccttctgtctgtgctcatggcatctccaagatggggcactgctgtgtgcagaatccagggtcctctttctgcttgcaactcctttccctggatgccccagaaacaatccaggcctcctttcctatcttacccctttgctttgctttttaccccagcacctctataaccgccttctcttcttttcagaactccttgtttctcatcctgttttttatgattacaaaactcttgcttccaccctggaagataactgctatagatgcctgtatgtaaatggtgctgtctccagcaactggcatgctgaagaagaattgattcacggggtataaatgttggggattggaagtggggatgaaatggcacttgttgatacaggagcagagaggtgaggccgactgctgaagacagctcgccaccctccttgcctccactccaatccaggggctggggccacattctttgccttcatttatcctcagatcaggtgagatcgacaggaggtgttgatggcagtgccagcaattattgctaatccgtttgcatccttatgcatagatctgaattcagactttgtgaatttccagaggtgtgggtaatataatagaattcagtgagtgggcatggctgatcttgtgcaaattaaaagttatggggcataagaatagcaaaagttgaacttcttttaaaaaggaaagtaccctgagagccagtattggttgaggctcttcagtatgcccaggttggcagcactgagaaccgcaggaacggcctgttgttacaaaaaggagattgactcagctgcccttggtgcatctgactgactatgactgctgagagattccaaggacccttaatgccagggctaacctctccatgtgcagtgagacctctggaggaagtgtcatcctctggctttgtgtggtactcattatggtgcagtgcgggcatgaaatgaagacacccaaataggcttacagatacgatatgttttaaatgttcgtatttaacaaaaacatactgacactgtttggaaatggcaacaggaagatagcaaaatgaatactaacattacgaaaagatgaacaggtacatgttccaaggcaggtggctgtgaacttcctctgagtgaaggcatcccctccagcacctttcagcctgctagttaggacgacccgccgccaccctccaggacctccagccctgcactgcctttcctctcttttaaataattcttcattgagttctaatatgtaaaaaaaaaaagtttactgtaaagtttgcaaataaggaaattttttttaaaagtcctcagtaatcttaccagtaacaattgttatgggcacatttgcttttggaagatttcttttgtatgcatgggataagtacatttttaaacaaaaatgggattatgccataaattctattttgtgactttaatatatagtgaacaccttttttaatgatgacaggatgttcccttgcatggctgtatcaatttaaacaatcttgtttcaatgggcatacagggtattttctagtttttttttcctcttagaaaataatacttgcgatgactttccttgtagctcagactttttcacgtctgttgttatctctttgggaatgctgaatacatacatttcgagaaggaaatgactgttaaactcttaagacttcaggttcatattgctaaactgcccagcagggagggattttttcaattagtgttctcactggtgaggcaaacctgatgccttcccctcttcctcagaaccggctttatcacattgaaaacctttgctcctccgacggatcgagtctgctttccctgtggatgtgagcattgctttgtctgctggtgactgaacatctctaccatgtgtcaattggccatttgtggtgtgtgtgtgtgtgcgtgtgtgtgtgtgtgtgtgtgtgtatgattttctaattcctagtcatttttctattgattgttttgcaaaagccatttacatcttaaggatattgataatcttttgttatatttgatgcaaatatttttttccagtttataggttgccttttaattttgtgtttcaggtagataaaagttaaacgattttcttaggttagtttatcactgtggtttctgaacttgttatgtgtagatcttttccaccccaagagtacataaatattaatccatactttcttatggaacttgtatggtttcgttttttacatttaaaccttcttccccgtggtgtgtgttgtggaatctgtgtttgtgtgaggaggggcatggtgctctcagaacccacctcctgtggccagagagccctgtcctgtgagggtggttatcacagtggcagggttcaattcagaagaccttgagggcaggctgatgtttcctgaatgggcccctggttgttgcttgtccctgactctccatttccccatctgagtggatttggacctaatagggcactggagctggttcgaatcctgactggactacttggcaactttatgtctgggagcaagttacttaacctccccaagcctgtgtctgtgaaatgcgggtaaatgaatgtagatgtttggcagcagctactccttgttgagctctcacagtgaactctcctgcctctgccctccttccccgcctcccctggtgcctagcgtcaggtctagccacttcctcctgggcccctctcccttttctgtggctggctgcctgcccgcctggcgctggacctttcatgtaacgggaatcagcatgtatattctggtctggtctgtttctacacttaattttgtttccagtagtatttccctgtaccggcagagttcacaaacacatttgaagaggctttttctcaggattcttaaccttcccaaaggaagtcccatggatgggtttctagaagtctataaatgctctgaaattgtatttttctgtggaaagcataactttcatctgcttgttcgtgctcaaaaaagatcatgaatgaatgattgcatgattttatgccattgtgcttatactaaaggatatgtagcccatctcttgagctgttaaactgttttgactactttaaatcgtgcagctgtgagcatctctgtaaatttagtgtacacatgtatcccctggagtggcattgcctcggcagtgagcacttatggttttataactctcttcacagactcaaatgactccagaaagctacacttcctgttgtgagtatatgatatccatttccctacatagccactaacatcaggtttttacaattttatttatttcttgctactttaagaaatttttgtggtgaaatacatataatagaagttgactatctgaatcatttttaagtatacattcagtagtgttaagtatgtcgccattgttgtacaaccaatctccagaactttttcatcttgcaaaacaaactctgtacccattaaataacattaaacattccattccctccagcctcagcaaccccattctactttctgtttctgtgagtttgactattccaagcacttcatatcagttaaatcatgaagtatttgtctgtctgtgactggcttatttctctgagcacagtgtcctcgagatgcgtctatgttgtagcatatgtcagaatttccttcctttttaaaagatccaaataatattcttattttatatcttttttttatccattcatccattagtggacacttgggttgcttttggctattgtaaataatggtgctatgtacaaatatctatattattgtatttacaagtataatgctgtaatgtacacacatctttttgagatcctaccttcagttcttttgagtatatagccagaagtggtattactaaatcttacgatatttctatttttaatttattgaggaaccactgtagtttttcatagcaactgcaccattttacgttctcaccaagagtgcacaagggttccgaggttcccacatcctccccaacacttgttattttctgctttttttagattgcagccatcatagtgggtgtgaggtgacatttcattgtggttttgatttgcatttccctaatgaggagtgatgctgagcatcttttcatatgcttactggtcatttgtatgttgtctttggaaaaatgtctattcaagtcctttgactattttaaaaattgggttattagagttatcgttgttgttgacttgtaggagtttctttctatattctggatattaatcccctatcagatatatgatttgcaaatatcttctcttattccataaggttactttttcactttgttgattgtgttctttgatgtatagaagtttttagttttgaaatagtctaatttatctgtttttacttttgtggtctgtgcttttggtgtcatatccaagaaatccttgccaaatccaacgttataaggtacttttaaggtattttagttgtcttagtctatatttctgtactcacctttctttatccactcatcagttgatgggcatgtaggttggttccatatctttgcaattctgaattgtgctgtgatcaggtgtctttttagtataatgatttactctcctttgggtagatacccagagtgggattgctagatcaaatggttcttaacattttctctctggatctatttctggaaattttaggctccagtttttgttgttgttgttaataaaatgcaatggaatgtaatgatcatcacttttcattatgctttaaaatctggtaaatggaggctagaacactcctgtaaggcaagaatattctctctgttggaactcaaatacacagaactgggtaaatctcaatcttaatctttgattcaggacacaacatggctctcttttacttgctttctttaattgttttttaataatgtggtaagcatttctgaatctcctatccaatacaaaaactaggacaatacagacagtaactcctatggttacaatgaacactcctctccacttaaattaattatttacactgatgaaattgaaatagcaaaattttaatgactaaatactgtctttgattttttgttccaggtctgtcaatattaacttcttataattttctttttttttctttatgtgtgtgtgtgtgtgtatatatatatatatttaatttcaatggcttttggggtacaaatggcttttggtcatatatatgagttctacagtagtgaagtctgagattttactacaccttccacttatgtggtcccacaccacccgcctcccctgccgcct

SEQ ID NO: 467090 - DNA, 3843 bp, Homo sapiens
  misc_feature (90)..(90): n is a, c, g, or t
  misc_feature (152)..(152): n is a, c, g, or t
cagtgagcaacgtgggcttgtgagagtgggggggcctctcacaagaagtgtaggcatgcattgtgtcagataaggttgggaggagactgngacaagatcaagggcagggggcaggggcaggaggctggtagtgctgtggcccagatattggncagaagtacagggaggatctcctcagggcttcaggggacagacagggagagatgactgagttagatgagactagggggcgggctgggggtgcgagaaggaagcttggcaaggagactaggtctagggggaccacagtggggcaggctgcatggaaaatatccgcagggtcccccaggcagaacagccacgctccaggccaggctgtccctactgcctggtggagggggaacttgacctctgggagggcgccgctcttgcatagctgagcgagcccgggtgcgctggtctgtgtggaaggaggaaggcagggagaggtagaaggggtggaggagtcaggaggaataggccgcagcagccctggaaatgatcaggaaggcaggcagtgggtgcagggctgcaggagggccgggagggctaatcttcaacttgtccatgccagcagcccctttttttccagaccaagggctgtgaacccgcctggggatgaggcctggtcttgtggaactgaacttagctcgacggggctgaccgctctggcccagggtggtatgtaattttcgctcggcctgggacggggcccaggccgggcccagcctggtggagcgtccaggtctgggtgcgaagccaggcccctgggcggaggtgaggggtggtctgaggagtgatgtggagttaaggcgccatcctcaccggtgactggtgcggcacctagcatgtttgacaggcggggactgcgaggcacgctgctcgggtgttggggacaacattgaccaacgctttattttccaggtggcagtgctccttttggacttttctctaggtttggcgctaaactcttcttgtgagctcactccaccccttcttcctccctttaacttatccattcacttaaaacattagctggtcatctggtaagcccgggacagtaagccgagtggctgttggagtcggtattgttggtaatggtggaggaagagaggccttcccgctgaggctggggtggggcggatcggtgttgcttgcctgcagagagggtggggagtgaatgtgcacccttgggtgggcctgcagccatccagctgaaagttacaaaaatgcttcatggaccgtggtttgttactatagtgttcctcatggcgagcagatggaaccgggagacatggagtccctggccagtgtgagtcctagcattgcaggaggggagaccctggaggagagagcccgcctcaattgatgcctgcagattgaatttccagaggcttaggaggaggaagttctccaatgttctgtttccaggccttgctcaggaagccctgtattcaggaggctaccatttaaagtttgcagatgagcttatggggggcaatcttaaaaagtccacagcagatgcatccggctcgaggggccatcagctttgaataaatgcttgttccagagcccatgaatgccagcaggcacccctcctttcctggggtaaaggttttcagatgctgcatcttctaaattgagcctccggtcatactagttttgtgcttggaaccttgcttcaagaagatccctaagctgtagaacattttaacgttgatgccacaacgcagattgatgccttgtagatggagcttgcagatggagccccgtgacctctcacctacccacctgtttgcctgccttcttgtgcgtttctcggagaagttcttagcctgatgaaataacttggggcgttgaagagctgtttaattttaaatgccttagactggggatatattagaggaagcagattgtcaaattaagggtgtcattgtgttgtgctaaacgctgggagggtacaagttggtcattcctaaatctgtgtgtgagaaatggcaggtctagtttgggcattgtgattgcattgcagattactaggagaagggaatggtgggtacaccggtagtgctcttttgttcttgcttcgtttttttaaacttgaactttacttcgttagatttcataatactttcttggcattctagtaagaggaccctgaggtgggagttgtgggggacggggagaaggggacagcttggcaccggtcccgtgggcgttgcagtgtgggggatgggggtatgcagcttggcactggtactgggagggatgagggtgaagaaggggagagggttggttagagatacagtgtgggtggtgggggtggtaggaaatgcaggttgaagggaattctctggggctttggggaatttagtgcgtgggtgagccaagaaaatactaattaataatagtaagttgttagtgttggttaagttgttgcttggaagtgagaagttgcttagaaactttccaaagtgcttagaactttaagtgcaaacagacaaactaacaaacaaaaattgttttgctttgctacaaggtggggaagactgaagaagtgttaactgaaaacaggtgacacagagtcaccagttttccgagaaccaaagggaggggtgtgtgatgccatctcacaggcaggggaaatgtctttaccagcttcctcctggtggccaagacagcctgtttcagagggttgttttgtttggggtgtgggtgttatcaagtgaattagtcacttgaaagatgggcgtcagacttgcatacgcagcagatcagcatccttcgctgccccttagcaacttaggtggttgatttgaaactgtgaaggtgtgattttttcaggagctggaagtcttagaaaagccttgtaaatgcctatattgtgggcttttaacgtatttaagggaccacttaagacgagattagatgggctcttctggatttgttcctcatttgtcacaggtgtcttgtgattgaaaatcatgagcgaagtgaaattgcattgaatttcaagggaatttagtatgtaaatcgtgccttagaaacacatctgttgtcttttctgtgtttggtcgatattaataatggcaaaatttttgcctatctagtatcttcaaattgtagtctttgtaacaaccaaataaccttttgtggtcactgtaaaattaatatttggtagacagaatccatgtacctttgctaaggttagaatgaataatttattgtatttttaatttgaatgtttgtgctttttaaatgagccaagactagaggggaaactatcacctaaaatcagtttggaaaacaagacctaaaaagggaaggggatggggattgtggggagagagtgggcgaggtgcctttactacatgtgtgatctgaaaaccctgcttggttctgagctgcgtctattgaattggtaaagtaataccaatggctttttatcatttccttcttccctttaagtttcacttgaaattttaaaaatcatggttatttttatcgttgggatctttctgtcttctgggttccattttttaaatgtttaaaaatatgttgacatggtagttcagttcttaaccaatgacttggggatgatgcaaacaattactgtcgttgggatttagagtgtattagtcacgcatgtatggggaagtagtctcgggtatgctgttgtgaaattgaaactgtaaaagtagatggttgaaagtactggtatgttgctctgtatggtaagaactaattctgttacgtcatgtacataattactaatcacttttcttcccctttacagcacaaataaagtttgagttctaaaactca

SEQ ID NO: 467091 - DNA, 8795 bp, Homo sapiens
  misc_feature (90)..(90): n is a, c, g, or t
  misc_feature (152)..(152): n is a, c, g, or t
  misc_feature (8782)..(8782): n is a, c, g, or t
cagtgagcaacgtgggcttgtgagagtgggggggcctctcacaagaagtgtaggcatgcattgtgtcagataaggttgggaggagactgngacaagatcaagggcagggggcaggggcaggaggctggtagtgctgtggcccagatattggncagaagtacagggaggatctcctcagggcttcaggggacagacagggagagatgactgagttagatgagactagggggcgggctgggggtgcgagaaggaagcttggcaaggagactaggtctagggggaccacagtggggcaggctgcatggaaaatatccgcagggtcccccaggcagaacagccacgctccaggccaggctgtccctactgcctggtggagggggaacttgacctctgggagggcgccgctcttgcatagctgagcgagcccgggtgcgctggtctgtgtggaaggaggaaggcagggagaggtagaaggggtggaggagtcaggaggaataggccgcagcagccctggaaatgatcaggaaggcaggcagtgggtgcagggctgcaggagggccgggagggctaatcttcaacttgtccatgccagcagcccctttttttccagaccaagggctgtgaacccgcctggggatgaggcctggtcttgtggaactgaacttagctcgacggggctgaccgctctggcccagggtggtatgtaattttcgctcggcctgggacggggcccaggccgggcccagcctggtggagcgtccaggtctgggtgcgaagccaggcccctgggcggaggtgaggggtggtctgaggagtgatgtggagttaaggcgccatcctcaccggtgactggtgcggcacctagcatgtttgacaggcggggactgcgaggcacgctgctcgggtgttggggacaacattgaccaacgctttattttccaggtggcagtgctccttttggacttttctctaggtttggcgctaaactcttcttgtgagctcactccaccccttcttcctccctttaacttatccattcacttaaaacattagctggtcatctggtaagcccgggacagtaagccgagtggctgttggagtcggtattgttggtaatggtggaggaagagaggccttcccgctgaggctggggtggggcggatcggtgttgcttgcctgcagagagggtggggagtgaatgtgcacccttgggtgggcctgcagccatccagctgaaagttacaaaaatgcttcatggaccgtggtttgttactatagtgttcctcatggcgagcagatggaaccgggagacatggagtccctggccagtgtgagtcctagcattgcaggaggggagaccctggaggagagagcccgcctcaattgatgcctgcagattgaatttccagaggcttaggaggaggaagttctccaatgttctgtttccaggccttgctcaggaagccctgtattcaggaggctaccatttaaagtttgcagatgagcttatggggggcaatcttaaaaagtccacagcagatgcatccggctcgaggggccatcagctttgaataaatgcttgttccagagcccatgaatgccagcaggcacccctcctttcctggggtaaaggttttcagatgctgcatcttctaaattgagcctccggtcatactagttttgtgcttggaaccttgcttcaagaagatccctaagctgtagaacattttaacgttgatgccacaacgcagattgatgccttgtagatggagcttgcagatggagccccgtgacctctcacctacccacctgtttgcctgccttcttgtgcgtttctcggagaagttcttagcctgatgaaataacttggggcgttgaagagctgtttaattttaaatgccttagactggggatatattagaggaagcagattgtcaaattaagggtgtcattgtgttgtgctaaacgctgggagggtacaagttggtcattcctaaatctgtgtgtgagaaatggcaggtctagtttgggcattgtgattgcattgcagattactaggagaagggaatggtgggtacaccggtagtgctcttttgttcttgcttcgtttttttaaacttgaactttacttcgttagatttcataatactttcttggcattctagtaagaggaccctgaggtgggagttgtgggggacggggagaaggggacagcttggcaccggtcccgtgggcgttgcagtgtgggggatgggggtatgcagcttggcactggtactgggagggatgagggtgaagaaggggagagggttggttagagatacagtgtgggtggtgggggtggtaggaaatgcaggttgaagggaattctctggggctttggggaatttagtgcgtgggtgagccaagaaaatactaattaataatagtaagttgttagtgttggttaagttgttgcttggaagtgagaagttgcttagaaactttccaaagtgcttagaactttaagtgcaaacagacaaactaacaaacaaaaattgttttgctttgctacaaggtggggaagactgaagaagtgttaactgaaaacaggtgacacagagtcaccagttttccgagaaccaaagggaggggtgtgtgatgccatctcacaggcaggggaaatgtctttaccagcttcctcctggtggccaagacagcctgtttcagagggttgttttgtttggggtgtgggtgttatcaagtgaattagtcacttgaaagatgggcgtcagacttgcatacgcagcagatcagcatccttcgctgccccttagcaacttaggtggttgatttgaaactgtgaaggtgtgattttttcaggagctggaagtcttagaaaagccttgtaaatgcctatattgtgggcttttaacgtatttaagggaccacttaagacgagattagatgggctcttctggatttgttcctcatttgtcacaggtgtcttgtgattgaaaatcatgagcgaagtgaaattgcattgaatttcaagggaatttagtatgtaaatcgtgccttagaaacacatctgttgtcttttctgtgtttggtcgatattaataatggcaaaatttttgcctatctagtatcttcaaattgtagtctttgtaacaaccaaataaccttttgtggtcactgtaaaattaatatttggtagacagaatccatgtacctttgctaaggttagaatgaataatttattgtatttttaatttgaatgtttgtgctttttaaatgagccaagactagaggggaaactatcacctaaaatcagtttggaaaacaagacctaaaaagggaaggggatggggattgtggggagagagtgggcgaggtgcctttactacatgtgtgatctgaaaaccctgcttggttctgagctgcgtctattgaattggtaaagtaataccaatggctttttatcatttccttcttccctttaagtttcacttgaaattttaaaaatcatggttatttttatcgttgggatctttctgtcttctgggttccattttttaaatgtttaaaaatatgttgacatggtagttcagttcttaaccaatgacttggggatgatgcaaacaattactgtcgttgggatttagagtgtattagtcacgcatgtatggggaagtagtctcgggtatgctgttgtgaaattgaaactgtaaaagtagatggttgaaagtactggtatgttgctctgtatggtaagaactaattctgttacgtcatgtacataattactaatcacttttcttcccctttacagcacaaataaagtttgagttctaaaactcattagaattgttgtattgctatgttacatttctcgacccctatcacattgccttcataacgactttggatgtatcttcatattgtagatttaggtctagatttgctagctccaagtaattaaggccatgtaggagagcatggtaaccacagatagaactggtattatcccaagtggtctgcagactgctgagtggggatgggatctgctctctgttgagagttggtaatcattggtttgaaatgtgatgaaaccactcaagccaatgaaggtgggtgtgtaggtggggagtactttgccataatattttaaaacattacctggttagagttctaagtggtacttatttttgtttggttaggggaaagcctgaataaaaacagaaatggacacataatatgcatattccatagtctttgggaggctggaatgtgcctgggatttgggtctaagtgtatgcgtaattcttacctcactaaagaatttgccttgtttttttccttttggtgagtgactaaaacgtctgggcttccctgtgtgcgtgctacagtaagcaagcagaggctgtgcaaaggtgtgagcaggatcacgtggaatctggaggatacatcttggcttgcaaactgcctctgtctcctgggtgggactgttctgtccttgcactgctgttctgtgttacctcttggggtgtaaggttttgcttacaggagacaaactttgggcgtagaatggaagccactgccagcctctgtgctgagaaggaaggtgcttgtttcaaagggagcagcaagggaggcttgttctactcacctgggcctgtttgcctgagaaggggagataagggctgaactgggactagccagggggaccaacacaaatggtgggggatcatgacctgaaggattctttccttcccatgagctgcagggctggttgccgtccttgcaactgtgtcttatttgcctgtgccgttatatcttggtgacccctccacgtgtacactactgacaaacgggtggagtgctggggagaagtcactgtgccgcccacctagtaaaccttctgtctgtgctcatggcatctccaagatggggcactgctgtgtgcagaatccagggtcctctttctgcttgcaactcctttccctggatgccccagaaacaatccaggcctcctttcctatcttacccctttgctttgctttttaccccagcacctctataaccgccttctcttcttttcagaactccttgtttctcatcctgttttttatgattacaaaactcttgcttccaccctggaagataactgctatagatgcctgtatgtaaatggtgctgtctccagcaactggcatgctgaagaagaattgattcacggggtataaatgttggggattggaagtggggatgaaatggcacttgttgatacaggagcagagaggtgaggccgactgctgaagacagctcgccaccctccttgcctccactccaatccaggggctggggccacattctttgccttcatttatcctcagatcaggtgagatcgacaggaggtgttgatggcagtgccagcaattattgctaatccgtttgcatccttatgcatagatctgaattcagactttgtgaatttccagaggtgtgggtaatataatagaattcagtgagtgggcatggctgatcttgtgcaaattaaaagttatggggcataagaatagcaaaagttgaacttcttttaaaaaggaaagtaccctgagagccagtattggttgaggctcttcagtatgcccaggttggcagcactgagaaccgcaggaacggcctgttgttacaaaaaggagattgactcagctgcccttggtgcatctgactgactatgactgctgagagattccaaggacccttaatgccagggctaacctctccatgtgcagtgagacctctggaggaagtgtcatcctctggctttgtgtggtactcattatggtgcagtgcgggcatgaaatgaagacacccaaataggcttacagatacgatatgttttaaatgttcgtatttaacaaaaacatactgacactgtttggaaatggcaacaggaagatagcaaaatgaatactaacattacgaaaagatgaacaggtacatgttccaaggcaggtggctgtgaacttcctctgagtgaaggcatcccctccagcacctttcagcctgctagttaggacgacccgccgccaccctccaggacctccagccctgcactgcctttcctctcttttaaataattcttcattgagttctaatatgtaaaaaaaaaaagtttactgtaaagtttgcaaataaggaaattttttttaaaagtcctcagtaatcttaccagtaacaattgttatgggcacatttgcttttggaagatttcttttgtatgcatgggataagtacatttttaaacaaaaatgggattatgccataaattctattttgtgactttaatatatagtgaacaccttttttaatgatgacaggatgttcccttgcatggctgtatcaatttaaacaatcttgtttcaatgggcatacagggtattttctagtttttttttcctcttagaaaataatacttgcgatgactttccttgtagctcagactttttcacgtctgttgttatctctttgggaatgctgaatacatacatttcgagaaggaaatgactgttaaactcttaagacttcaggttcatattgctaaactgcccagcagggagggattttttcaattagtgttctcactggtgaggcaaacctgatgccttcccctcttcctcagaaccggctttatcacattgaaaacctttgctcctccgacggatcgagtctgctttccctgtggatgtgagcattgctttgtctgctggtgactgaacatctctaccatgtgtcaattggccatttgtggtgtgtgtgtgtgtgcgtgtgtgtgtgtgtgtgtgtgtgtatgattttctaattcctagtcatttttctattgattgttttgcaaaagccatttacatcttaaggatattgataatcttttgttatatttgatgcaaatatttttttccagtttataggttgccttttaattttgtgtttcaggtagataaaagttaaacgattttcttaggttagtttatcactgtggtttctgaacttgttatgtgtagatcttttccaccccaagagtacataaatattaatccatactttcttatggaacttgtatggtttcgttttttacatttaaaccttcttccccgtggtgtgtgttgtggaatctgtgtttgtgtgaggaggggcatggtgctctcagaacccacctcctgtggccagagagccctgtcctgtgagggtggttatcacagtggcagggttcaattcagaagaccttgagggcaggctgatgtttcctgaatgggcccctggttgttgcttgtccctgactctccatttccccatctgagtggatttggacctaatagggcactggagctggttcgaatcctgactggactacttggcaactttatgtctgggagcaagttacttaacctccccaagcctgtgtctgtgaaatgcgggtaaatgaatgtagatgtttggcagcagctactccttgttgagctctcacagtgaactctcctgcctctgccctccttccccgcctcccctggtgcctagcgtcaggtctagccacttcctcctgggcccctctcccttttctgtggctggctgcctgcccgcctggcgctggacctttcatgtaacgggaatcagcatgtatattctggtctggtctgtttctacacttaattttgtttccagtagtatttccctgtaccggcagagttcacaaacacatttgaagaggctttttctcaggattcttaaccttcccaaaggaagtcccatggatgggtttctagaagtctataaatgctctgaaattgtatttttctgtggaaagcataactttcatctgcttgttcgtgctcaaaaaagatcatgaatgaatgattgcatgattttatgccattgtgcttatactaaaggatatgtagcccatctcttgagctgttaaactgttttgactactttaaatcgtgcagctgtgagcatctctgtaaatttagtgtacacatgtatcccctggagtggcattgcctcggcagtgagcacttatggttttataactctcttcacagactcaaatgactccagaaagctacacttcctgttgtgagtatatgatatccatttccctacatagccactaacatcaggtttttacaattttatttatttcttgctactttaagaaatttttgtggtgaaatacatataatagaagttgactatctgaatcatttttaagtatacattcagtagtgttaagtatgtcgccattgttgtacaaccaatctccagaactttttcatcttgcaaaacaaactctgtacccattaaataacattaaacattccattccctccagcctcagcaaccccattctactttctgtttctgtgagtttgactattccaagcacttcatatcagttaaatcatgaagtatttgtctgtctgtgactggcttatttctctgagcacagtgtcctcgagatgcgtctatgttgtagcatatgtcagaatttccttccttttttagtggacacttgggttgcttttggctattgtaaataatggtgctatgtacaaatatctatattattgtatttacaagtataatgctgtaatgtacacacatctttttgagatcctaccttcagttcttttgagtatatagccagaagtggtattactaaatcttacgatatttattttaataatgagaccctgagttttatacaacgccctttacgtctacaaatgcacaggtncagttcactctcc

SEQ ID NO: 467092 - DNA, 11140 bp, Homo sapiens
  misc_feature (90)..(90): n is a, c, g, or t
  misc_feature (152)..(152): n is a, c, g, or t
cagtgagcaacgtgggcttgtgagagtgggggggcctctcacaagaagtgtaggcatgcattgtgtcagataaggttgggaggagactgngacaagatcaagggcagggggcaggggcaggaggctggtagtgctgtggcccagatattggncagaagtacagggaggatctcctcagggcttcaggggacagacagggagagatgactgagttagatgagactagggggcgggctgggggtgcgagaaggaagcttggcaaggagactaggtctagggggaccacagtggggcaggctgcatggaaaatatccgcagggtcccccaggcagaacagccacgctccaggccaggctgtccctactgcctggtggagggggaacttgacctctgggagggcgccgctcttgcatagctgagcgagcccgggtgcgctggtctgtgtggaaggaggaaggcagggagaggtagaaggggtggaggagtcaggaggaataggccgcagcagccctggaaatgatcaggaaggcaggcagtgggtgcagggctgcaggagggccgggagggctaatcttcaacttgtccatgccagcagcccctttttttccagaccaagggctgtgaacccgcctggggatgaggcctggtcttgtggaactgaacttagctcgacggggctgaccgctctggcccagggtggtatgtaattttcgctcggcctgggacggggcccaggccgggcccagcctggtggagcgtccaggtctgggtgcgaagccaggcccctgggcggaggtgaggggtggtctgaggagtgatgtggagttaaggcgccatcctcaccggtgactggtgcggcacctagcatgtttgacaggcggggactgcgaggcacgctgctcgggtgttggggacaacattgaccaacgctttattttccaggtggcagtgctccttttggacttttctctaggtttggcgctaaactcttcttgtgagctcactccaccccttcttcctccctttaacttatccattcacttaaaacattagctggtcatctggtaagcccgggacagtaagccgagtggctgttggagtcggtattgttggtaatggtggaggaagagaggccttcccgctgaggctggggtggggcggatcggtgttgcttgcctgcagagagggtggggagtgaatgtgcacccttgggtgggcctgcagccatccagctgaaagttacaaaaatgcttcatggaccgtggtttgttactatagtgttcctcatggcgagcagatggaaccgggagacatggagtccctggccagtgtgagtcctagcattgcaggaggggagaccctggaggagagagcccgcctcaattgatgcctgcagattgaatttccagaggcttaggaggaggaagttctccaatgttctgtttccaggccttgctcaggaagccctgtattcaggaggctaccatttaaagtttgcagatgagcttatggggggcaatcttaaaaagtccacagcagatgcatccggctcgaggggccatcagctttgaataaatgcttgttccagagcccatgaatgccagcaggcacccctcctttcctggggtaaaggttttcagatgctgcatcttctaaattgagcctccggtcatactagttttgtgcttggaaccttgcttcaagaagatccctaagctgtagaacattttaacgttgatgccacaacgcagattgatgccttgtagatggagcttgcagatggagccccgtgacctctcacctacccacctgtttgcctgccttcttgtgcgtttctcggagaagttcttagcctgatgaaataacttggggcgttgaagagctgtttaattttaaatgccttagactggggatatattagaggaagcagattgtcaaattaagggtgtcattgtgttgtgctaaacgctgggagggtacaagttggtcattcctaaatctgtgtgtgagaaatggcaggtctagtttgggcattgtgattgcattgcagattactaggagaagggaatggtgggtacaccggtagtgctcttttgttcttgcttcgtttttttaaacttgaactttacttcgttagatttcataatactttcttggcattctagtaagaggaccctgaggtgggagttgtgggggacggggagaaggggacagcttggcaccggtcccgtgggcgttgcagtgtgggggatgggggtatgcagcttggcactggtactgggagggatgagggtgaagaaggggagagggttggttagagatacagtgtgggtggtgggggtggtaggaaatgcaggttgaagggaattctctggggctttggggaatttagtgcgtgggtgagccaagaaaatactaattaataatagtaagttgttagtgttggttaagttgttgcttggaagtgagaagttgcttagaaactttccaaagtgcttagaactttaagtgcaaacagacaaactaacaaacaaaaattgttttgctttgctacaaggtggggaagactgaagaagtgttaactgaaaacaggtgacacagagtcaccagttttccgagaaccaaagggaggggtgtgtgatgccatctcacaggcaggggaaatgtctttaccagcttcctcctggtggccaagacagcctgtttcagagggttgttttgtttggggtgtgggtgttatcaagtgaattagtcacttgaaagatgggcgtcagacttgcatacgcagcagatcagcatccttcgctgccccttagcaacttaggtggttgatttgaaactgtgaaggtgtgattttttcaggagctggaagtcttagaaaagccttgtaaatgcctatattgtgggcttttaacgtatttaagggaccacttaagacgagattagatgggctcttctggatttgttcctcatttgtcacaggtgtcttgtgattgaaaatcatgagcgaagtgaaattgcattgaatttcaagggaatttagtatgtaaatcgtgccttagaaacacatctgttgtcttttctgtgtttggtcgatattaataatggcaaaatttttgcctatctagtatcttcaaattgtagtctttgtaacaaccaaataaccttttgtggtcactgtaaaattaatatttggtagacagaatccatgtacctttgctaaggttagaatgaataatttattgtatttttaatttgaatgtttgtgctttttaaatgagccaagactagaggggaaactatcacctaaaatcagtttggaaaacaagacctaaaaagggaaggggatggggattgtggggagagagtgggcgaggtgcctttactacatgtgtgatctgaaaaccctgcttggttctgagctgcgtctattgaattggtaaagtaataccaatggctttttatcatttccttcttccctttaagtttcacttgaaattttaaaaatcatggttatttttatcgttgggatctttctgtcttctgggttccattttttaaatgtttaaaaatatgttgacatggtagttcagttcttaaccaatgacttggggatgatgcaaacaattactgtcgttgggatttagagtgtattagtcacgcatgtatggggaagtagtctcgggtatgctgttgggtaagaactaattctgttacgtcatgtacataattactaatcacttttcttcccctttacagcacaaataaagtttgagttctaaaactcattagaattgttgtattgctatgttacatttctcgacccctatcacattgccttcataacgactttggatgtatcttcatattgtagatttaggtctagatttgctagctccaagtaattaaggccatgtaggagagcatggtaaccacagatagaactggtattatcccaagtggtctgcagactgctgagtggggatgggatctgctctctgttgagagttggtaatcattggtttgaaatgtgatgaaaccactcaagccaatgaaggtgggtgtgtaggtggggagtactttgccataatattttaaaacattacctggttagagttctaagtggtacttatttttgtttggttaggggaaagcctgaataaaaacagaaatggacacataatatgcatattccatagtctttgggaggctggaatgtgcctgggatttgggtctaagtgtatgcgtaattcttacctcactaaagaatttgccttgtttttttccttttggtgagtgactaaaacgtctgggcttccctgtgtgcgtgctacagtaagcaagcagaggctgtgcaaaggtgtgagcaggatcacgtggaatctggaggatacatcttggcttgcaaactgcctctgtctcctgggtgggactgttctgtccttgcactgctgttctgtgttacctcttggggtgtaaggttttgcttacaggagacaaactttgggcgtagaatggaagccactgccagcctctgtgctgagaaggaaggtgcttgtttcaaagggagcagcaagggaggcttgttctactcacctgggcctgtttgcctgagaaggggagataagggctgaactgggactagccagggggaccaacacaaatggtgggggatcatgacctgaaggattctttccttcccatgagctgcagggctggttgccgtccttgcaactgtgtcttatttgcctgtgccgttatatcttggtgacccctccacgtgtacactactgacaaacgggtggagtgctggggagaagtcactgtgccgcccacctagtaaaccttctgtctgtgctcatggcatctccaagatggggcactgctgtgtgcagaatccagggtcctctttctgcttgcaactcctttccctggatgccccagaaacaatccaggcctcctttcctatcttacccctttgctttgctttttaccccagcacctctataaccgccttctcttcttttcagaactccttgtttctcatcctgttttttatgattacaaaactcttgcttccaccctggaagataactgctatagatgcctgtatgtaaatggtgctgtctccagcaactggcatgctgaagaagaattgattcacggggtataaatgttggggattggaagtggggatgaaatggcacttgttgatacaggagcagagaggtgaggccgactgctgaagacagctcgccaccctccttgcctccactccaatccaggggctggggccacattctttgccttcatttatcctcagatcaggtgagatcgacaggaggtgttgatggcagtgccagcaattattgctaatccgtttgcatccttatgcatagatctgaattcagactttgtgaatttccagaggtgtgggtaatataatagaattcagtgagtgggcatggctgatcttgtgcaaattaaaagttatggggcataagaatagcaaaagttgaacttcttttaaaaaggaaagtaccctgagagccagtattggttgaggctcttcagtatgcccaggttggcagcactgagaaccgcaggaacggcctgttgttacaaaaaggagattgactcagctgcccttggtgcatctgactgactatgactgctgagagattccaaggacccttaatgccagggctaacctctccatgtgcagtgagacctctggaggaagtgtcatcctctggctttgtgtggtactcattatggtgcagtgcgggcatgaaatgaagacacccaaataggcttacagatacgatatgttttaaatgttcgtatttaacaaaaacatactgacactgtttggaaatggcaacaggaagatagcaaaatgaatactaacattacgaaaagatgaacaggtacatgttccaaggcaggtggctgtgaacttcctctgagtgaaggcatcccctccagcacctttcagcctgctagttaggacgacccgccgccaccctccaggacctccagccctgcactgcctttcctctcttttaaataattcttcattgagttctaatatgtaaaaaaaaaaagtttactgtaaagtttgcaaataaggaaattttttttaaaagtcctcagtaatcttaccagtaacaattgttatgggcacatttgcttttggaagatttcttttgtatgcatgggataagtacatttttaaacaaaaatgggattatgccataaattctattttgtgactttaatatatagtgaacaccttttttaatgatgacaggatgttcccttgcatggctgtatcaatttaaacaatcttgtttcaatgggcatacagggtattttctagtttttttttcctcttagaaaataatacttgcgatgactttccttgtagctcagactttttcacgtctgttgttatctctttgggaatgctgaatacatacatttcgagaaggaaatgactgttaaactcttaagacttcaggttcatattgctaaactgcccagcagggagggattttttcaattagtgttctcactggtgaggcaaacctgatgccttcccctcttcctcagaaccggctttatcacattgaaaacctttgctcctccgacggatcgagtctgctttccctgtggatgtgagcattgctttgtctgctggtgactgaacatctctaccatgtgtcaattggccatttgtggtgtgtgtgtgtgtgcgtgtgtgtgtgtgtgtgtgtgtgtatgattttctaattcctagtcatttttctattgattgttttgcaaaagccatttacatcttaaggatattgataatcttttgttatatttgatgcaaatatttttttccagtttataggttgccttttaattttgtgtttcaggtagataaaagttaaacgattttcttaggttagtttatcactgtggtttctgaacttgttatgtgtagatcttttccaccccaagagtacataaatattaatccatactttcttatggaacttgtatggtttcgttttttacatttaaaccttcttccccgtggtgtgtgttgtggaatctgtgtttgtgtgaggaggggcatggtgctctcagaacccacctcctgtggccagagagccctgtcctgtgagggtggttatcacagtggcagggttcaattcagaagaccttgagggcaggctgatgtttcctgaatgggcccctggttgttgcttgtccctgactctccatttccccatctgagtggatttggacctaatagggcactggagctggttcgaatcctgactggactacttggcaactttatgtctgggagcaagttacttaacctccccaagcctgtgtctgtgaaatgcgggtaaatgaatgtagatgtttggcagcagctactccttgttgagctctcacagtgaactctcctgcctctgccctccttccccgcctcccctggtgcctagcgtcaggtctagccacttcctcctgggcccctctcccttttctgtggctggctgcctgcccgcctggcgctggacctttcatgtaacgggaatcagcatgtatattctggtctggtctgtttctacacttaattttgtttccagtagtatttccctgtaccggcagagttcacaaacacatttgaagaggctttttctcaggattcttaaccttcccaaaggaagtcccatggatgggtttctagaagtctataaatgctctgaaattgtatttttctgtggaaagcataactttcatctgcttgttcgtgctcaaaaaagatcatgaatgaatgattgcatgattttatgccattgtgcttatactaaaggatatgtagcccatctcttgagctgttaaactgttttgactactttaaatcgtgcagctgtgagcatctctgtaaatttagtgtacacatgtatcccctggagtggcattgcctcggcagtgagcacttatggttttataactctcttcacagactcaaatgactccagaaagctacacttcctgttgtgagtatatgatatccatttccctacatagccactaacatcaggtttttacaattttatttatttcttgctactttaagaaatttttgtggtgaaatacatataatagaagttgactatctgaatcatttttaagtatacattcagtagtgttaagtatgtcgccattgttgtacaaccaatctccagaactttttcatcttgcaaaacaaactctgtacccattaaataacattaaacattccattccctccagcctcagcaaccccattctactttctgtttctgtgagtttgactattccaagcacttcatatcagttaaatcatgaagtatttgtctgtctgtgactggcttatttctctgagcacagtgtcctcgagatgcgtctatgttgtagcatatgtcagaatttccttcctttttaaaagatccaaataatattcttattttatatcttttttttatccattcatccattagtggacacttgggttgcttttggctattgtaaataatggtgctatgtacaaatatctatattattgtatttacaagtataatgctgtaatgtacacacatctttttgagatcctaccttcagttcttttgagtatatagccagaagtggtattactaaatcttacgatatttctatttttaatttattgaggaaccactgtagtttttcatagcaactgcaccattttacgttctcaccaagagtgcacaagggttccgaggttcccacatcctccccaacacttgttattttctgctttttttagattgcagccatcatagtgggtgtgaggtgacatttcattgtggttttgatttgcatttccctaatgaggagtgatgctgagcatcttttcatatgcttactggtcatttgtatgttgtctttggaaaaatgtctattcaagtcctttgactattttaaaaattgggttattagagttatcgttgttgttgacttgtaggagtttctttctatattctggatattaatcccctatcagatatatgatttgcaaatatcttctcttattccataaggttactttttcactttgttgattgtgttctttgatgtatagaagtttttagttttgaaatagtctaatttatctgtttttacttttgtggtctgtgcttttggtgtcatatccaagaaatccttgccaaatccaacgttataaggtacttttaaggtattttagttgtcttagtctatatttctgtactcacctttctttatccactcatcagttgatgggcatgtaggttggttccatatctttgcaattctgaattgtgctgtgatcaggtgtctttttagtataatgatttactctcctttgggtagatacccagtagtgggattgctggatcgaatggtttttataattttctattttaccacagtttctctctgcatttttcctctttgaccactaaccatgtgaaattctcatattgacctttataatgatcatgaactcttagtatcattgggaaggccacatttgccacttatgattgtaaaccttatcctccatttttcctgttattgttggtgcaaaaagcacctattataccaggactttaaaaatcagtctgataagtctttgataagtctaataataataactgataagtccattgaatttgcttctgattactttttctttagtagctaaacatgtatgtactcctatgattacaatgaacactcctctccatttaaattaattatttacattgatgaaatagcaaaatgttaatgactaaatactgtcttggttttttcgttccaggtcagtcaatattaacttcttataattttcttttttttctttatgtgtgtgtgtgtgtgtatttttttttttttaatttcaatggcttttggggtacaaatggcttttggtcatatagatgaattctacagtagtgaagtctgagattttactgcaccggtcacctgagtagtgtacattgtacccaatatgtggttttttataccttgcccccctcttaccctccccactttgagtctctagtgtccattatgtcactctgtatacctttttgtacccataagttagctctcacttataagtgagaacacacagtatttggttttccattcctgagttgcttcacttagaataatatcctccagctccatccaaaattgctgcaaaaaaaaaaaaaaccacaaacattattttgttcttttttattgctaagtcatattccatggtgtagagataccacattttatttatccactcactggttgatgggttggttccacatctttgcaattgtgacttgtactgccatcaagtgtctttctggtataatgacttcttttcctttgggtagatacccaggagtgggattgctagatcaaatggttcttaacattttctctctggatctatttctggaaattttaggctccagtttttgttgttgttgttaataaaatgcaatggaatgtaatgatcatcacttttcattatgctttaaaatctggtaaatggaggctagaacactcctgtaaggcaagaatattctctctgttggaactcaaatacacagaactgggtaaatctcaatcttaatctttgattcaggacacaacatggctctcttttacttgctttctttaattgttttttaataatgtggtaagcatttctgaatctcctatccaatacaaaaactaggacaatacagacagtaactcctatggttacaatgaacactcctctccacttaaattaattatttacactgatgaaattgaaatagcaaaattttaatgactaaatactgtctttgattttttgttccaggtctgtcaatattaacttcttataattttctttttttttctttatgtgtgtgtgtgtgtgtatatatatatatatttaatttcaatggcttttggggtacaaatggcttttggtcatatatatgagttctacagtagtgaagtctgagattttactacaccttccacttatgtggtcccacaccacccgcctcccctgccgcct

SEQ ID NO: 467093 - DNA, 6083 bp, Homo sapiens
  misc_feature (90)..(90): n is a, c, g, or t
  misc_feature (152)..(152): n is a, c, g, or t
cagtgagcaacgtgggcttgtgagagtgggggggcctctcacaagaagtgtaggcatgcattgtgtcagataaggttgggaggagactgngacaagatcaagggcagggggcaggggcaggaggctggtagtgctgtggcccagatattggncagaagtacagggaggatctcctcagggcttcaggggacagacagggagagatgactgagttagatgagactagggggcgggctgggggtgcgagaaggaagcttggcaaggagactaggtctagggggaccacagtggggcaggctgcatggaaaatatccgcagggtcccccaggcagaacagccacgctccaggccaggctgtccctactgcctggtggagggggaacttgacctctgggagggcgccgctcttgcatagctgagcgagcccgggtgcgctggtctgtgtggaaggaggaaggcagggagaggtagaaggggtggaggagtcaggaggaataggccgcagcagccctggaaatgatcaggaaggcaggcagtgggtgcagggctgcaggagggccgggagggctaatcttcaacttgtccatgccagcagcccctttttttccagaccaagggctgtgaacccgcctggggatgaggcctggtcttgtggaactgaacttagctcgacggggctgaccgctctggcccagggtggtatgtaattttcgctcggcctgggacggggcccaggccgggcccagcctggtggagcgtccaggtctgggtgcgaagccaggcccctgggcggaggtgaggggtggtctgaggagtgatgtggagttaaggcgccatcctcaccggtgactggtgcggcacctagcatgtttgacaggcggggactgcgaggcacgctgctcgggtgttggggacaacattgaccaacgctttattttccaggtggcagtgctccttttggacttttctctaggtttggcgctaaactcttcttgtgagctcactccaccccttcttcctccctttaacttatccattcacttaaaacattagctggtcatctggtaagcccgggacagtaagccgagtggctgttggagtcggtattgttggtaatggtggaggaagagaggccttcccgctgaggctggggtggggcggatcggtgttgcttgcctgcagagagggtggggagtgaatgtgcacccttgggtgggcctgcagccatccagctgaaagttacaaaaatgcttcatggaccgtggtttgttactatagtgttcctcatggcgagcagatggaaccgggagacatggagtccctggccagtgtgagtcctagcattgcaggaggggagaccctggaggagagagcccgcctcaattgatgcctgcagattgaatttccagaggcttaggaggaggaagttctccaatgttctgtttccaggccttgctcaggaagccctgtattcaggaggctaccatttaaagtttgcagatgagcttatggggggcaatcttaaaaagtccacagcagatgcatccggctcgaggggccatcagctttgaataaatgcttgttccagagcccatgaatgccagcaggcacccctcctttcctggggtaaaggttttcagatgctgcatcttctaaattgagcctccggtcatactagttttgtgcttggaaccttgcttcaagaagatccctaagctgtagaacattttaacgttgatgccacaacgcagattgatgccttgtagatggagcttgcagatggagccccgtgacctctcacctacccacctgtttgcctgccttcttgtgcgtttctcggagaagttcttagcctgatgaaataacttggggcgttgaagagctgtttaattttaaatgccttagactggggatatattagaggaagcagattgtcaaattaagggtgtcattgtgttgtgctaaacgctgggagggtacaagttggtcattcctaaatctgtgtgtgagaaatggcaggtctagtttgggcattgtgattgcattgcagattactaggagaagggaatggtgggtacaccggtagtgctcttttgttcttgcttcgtttttttaaacttgaactttacttcgttagatttcataatactttcttggcattctagtaagaggaccctgaggtgggagttgtgggggacggggagaaggggacagcttggcaccggtcccgtgggcgttgcagtgtgggggatgggggtatgcagcttggcactggtactgggagggatgagggtgaagaaggggagagggttggttagagatacagtgtgggtggtgggggtggtaggaaatgcaggttgaagggaattctctggggctttggggaatttagtgcgtgggtgagccaagaaaatactaattaataatagtaagttgttagtgttggttaagttgttgcttggaagtgagaagttgcttagaaactttccaaagtgcttagaactttaagtgcaaacagacaaactaacaaacaaaaattgttttgctttgctacaaggtggggaagactgaagaagtgttaactgaaaacaggtgacacagagtcaccagttttccgagaaccaaagggaggggtgtgtgatgccatctcacaggcaggggaaatgtctttaccagcttcctcctggtggccaagacagcctgtttcagagggttgttttgtttggggtgtgggtgttatcaagtgaattagtcacttgaaagatgggcgtcagacttgcatacgcagcagatcagcatccttcgctgccccttagcaacttaggtggttgatttgaaactgtgaaggtgtgattttttcaggagctggaagtcttagaaaagccttgtaaatgcctatattgtgggcttttaacgtatttaagggaccacttaagacgagattagatgggctcttctggatttgttcctcatttgtcacaggtgtcttgtgattgaaaatcatgagcgaagtgaaattgcattgaatttcaagggaatttagtatgtaaatcgtgccttagaaacacatctgttgtcttttctgtgtttggtcgatattaataatggcaaaatttttgcctatctagtatcttcaaattgtagtctttgtaacaaccaaataaccttttgtggtcactgtaaaattaatatttggtagacagaatccatgtacctttgctaaggttagaatgaataatttattgtatttttaatttgaatgtttgtgctttttaaatgagccaagactagaggggaaactatcacctaaaatcagtttggaaaacaagacctaaaaagggaaggggatggggattgtggggagagagtgggcgaggtgcctttactacatgtgtgatctgaaaaccctgcttggttctgagctgcgtctattgaattggtaaagtaataccaatggctttttatcatttccttcttccctttaagtttcacttgaaattttaaaaatcatggttatttttatcgttgggatctttctgtcttctgggttccattttttaaatgtttaaaaatatgttgacatggtagttcagttcttaaccaatgacttggggatgatgcaaacaattactgtcgttgggatttagagtgtattagtcacgcatgtatggggaagtagtctcgggtatgctgttgtgaaattgaaactgtaaaagtagatggttgaaagtactggtatgttgctctgtatggtaagaactaattctgttacgtcatgtacataattactaatcacttttcttcccctttacagcacaaataaagtttgagttctaaaactcattagaattgttgtattgctatgttacatttctcgacccctatcacattgccttcataacgactttggatgtatcttcatattgtagatttaggtctagatttgctagctccaagtaattaaggccatgtaggagagcatggtaaccacagatagaactggtattatcccaagtggtctgcagactgctgagtggggatgggatctgctctctgttgagagttggtaatcattggtttgaaatgtgatgaaaccactcaagccaatgaaggtgggtgtgtaggtggggagtactttgccataatattttaaaacattacctggttagagttctaagtggtacttatttttgtttggttaggggaaagcctgaataaaaacagaaatggacacataatatgcatattccatagtctttgggaggctggaatgtgcctgggatttgggtctaagtgtatgcgtaattcttacctcactaaagaatttgccttgtttttttccttttggtgagtgactaaaacgtctgggcttccctgtgtgcgtgctacagtaagcaagcagaggctgtgcaaaggtgtgagcaggatcacgtggaatctggaggatacatcttggcttgcaaactgcctctgtctcctgggtgggactgttctgtccttgcactgctgttctgtgttacctcttggggtgtaaggttttgcttacaggagacaaactttgggcgtagaatggaagccactgccagcctctgtgctgagaaggaaggtgcttgtttcaaagggagcagcaagggaggcttgttctactcacctgggcctgtttgcctgagaaggggagataagggctgaactgggactagccagggggaccaacacaaatggtgggggatcatgacctgaaggattctttccttcccatgagctgcagggctggttgccgtccttgcaactgtgtcttatttgcctgtgccgttatatcttggtgacccctccacgtgtacactactgacaaacgggtggagtgctggggagaagtcactgtgccgcccacctagtaaaccttctgtctgtgctcatggcatctccaagatggggcactgctgtgtgcagaatccagggtcctctttctgcttgcaactcctttccctggatgccccagaaacaatccaggcctcctttcctatcttacccctttgctttgctttttaccccagcacctctataaccgccttctcttcttttcagaactccttgtttctcatcctgttttttatgattacaaaactcttgcttccaccctggaagataactgctatagatgcctgtatgtaaatggtgctgtctccagcaactggcatgctgaagaagaattgattcacggggtataaatgttggggattggaagtggggatgaaatggcacttgttgatacaggagcagagaggtgaggccgactgctgaagacagctcgccaccctccttgcctccactccaatccaggggctggggccacattctttgccttcatttatcctcagatcaggtgagatcgacaggaggtgttgatggcagtgccagcaattattgctaatccgtttgcatccttatgcatagatctgaattcagactttgtgaatttccagaggtgtgggtaatataatagaattcagtgagtgggcatggctgatcttgtgcaaattaaaagttatggggcataagaatagcaaaagttgaacttcttttaaaaaggaaagtaccctgagagccagtattggttgaggctcttcagtatgcccaggttggcagcactgagaaccgcaggaacggcctgttgttacaaaaaggagattgactcagctgcccttggtgcatctgactgactatgactgctgagagattccaaggacccttaatgccagggctaacctctccatgtgcagtgagacctctggaggaagtgtcatcctctggctttgtgtggtactcattatggtgcagtgcgggcatgaaatgaagacacccaaataggcttacagatacgatatgttttaaatgttcgtatttaacaaaaacatactgacactgtttggaaatggcaacaggaagatagcaaaatgaatactaacattacgaaaagatgaacaggtacatgttccaaggccagggggggcttgtgaaaccattcccttttgaggtggaaagggcaattcccctttcccaggccaccctttttaaagctctct

SEQ ID NO: 467094 - DNA, 4264 bp, Homo sapiens
  misc_feature (90)..(90): n is a, c, g, or t
  misc_feature (152)..(152): n is a, c, g, or t
cagtgagcaacgtgggcttgtgagagtgggggggcctctcacaagaagtgtaggcatgcattgtgtcagataaggttgggaggagactgngacaagatcaagggcagggggcaggggcaggaggctggtagtgctgtggcccagatattggncagaagtacagggaggatctcctcagggcttcaggggacagacagggagagatgactgagttagatgagactagggggcgggctgggggtgcgagaaggaagcttggcaaggagactaggtctagggggaccacagtggggcaggctgcatggaaaatatccgcagggtcccccaggcagaacagccacgctccaggccaggctgtccctactgcctggtggagggggaacttgacctctgggagggcgccgctcttgcatagctgagcgagcccgggtgcgctggtctgtgtggaaggaggaaggcagggagaggtagaaggggtggaggagtcaggaggaataggccgcagcagccctggaaatgatcaggaaggcaggcagtgggtgcagggctgcaggagggccgggagggctaatcttcaacttgtccatgccagcagcccctttttttccagaccaagggctgtgaacccgcctggggatgaggcctggtcttgtggaactgaacttagctcgacggggctgaccgctctggcccagggtggtatgtaattttcgctcggcctgggacggggcccaggccgggcccagcctggtggagcgtccaggtctgggtgcgaagccaggcccctgggcggaggtgaggggtggtctgaggagtgatgtggagttaaggcgccatcctcaccggtgactggtgcggcacctagcatgtttgacaggcggggactgcgaggcacgctgctcgggtgttggggacaacattgaccaacgctttattttccaggtggcagtgctccttttggacttttctctaggtttggcgctaaactcttcttgtgagctcactccaccccttcttcctccctttaacttatccattcacttaaaacattagctggtcatctggtaagcccgggacagtaagccgagtggctgttggagtcggtattgttggtaatggtggaggaagagaggccttcccgctgaggctggggtggggcggatcggtgttgcttgcctgcagagagggtggggagtgaatgtgcacccttgggtgggcctgcagccatccagctgaaagttacaaaaatgcttcatggaccgtggtttgttactatagtgttcctcatggcgagcagatggaaccgggagacatggagtccctggccagtgtgagtcctagcattgcaggaggggagaccctggaggagagagcccgcctcaattgatgcctgcagattgaatttccagaggcttaggaggaggaagttctccaatgttctgtttccaggccttgctcaggaagccctgtattcaggaggctaccatttaaagtttgcagatgagcttatggggggcaatcttaaaaagtccacagcagatgcatccggctcgaggggccatcagctttgaataaatgcttgttccagagcccatgaatgccagcaggcacccctcctttcctggggtaaaggttttcagatgctgcatcttctaaattgagcctccggtcatactagttttgtgcttggaaccttgcttcaagaagatccctaagctgtagaacattttaacgttgatgccacaacgcagattgatgccttgtagatggagcttgcagatggagccccgtgacctctcacctacccacctgtttgcctgccttcttgtgcgtttctcggagaagttcttagcctgatgaaataacttggggcgttgaagagctgtttaattttaaatgccttagactggggatatattagaggaagcagattgtcaaattaagggtgtcattgtgttgtgctaaacgctgggagggtacaagttggtcattcctaaatctgtgtgtgagaaatggcaggtctagtttgggcattgtgattgcattgcagattactaggagaagggaatggtgggtacaccggtagtgctcttttgttcttgcttcgtttttttaaacttgaactttacttcgttagatttcataatactttcttggcattctagtaagaggaccctgaggtgggagttgtgggggacggggagaaggggacagcttggcaccggtcccgtgggcgttgcagtgtgggggatgggggtatgcagcttggcactggtactgggagggatgagggtgaagaaggggagagggttggttagagatacagtgtgggtggtgggggtggtaggaaatgcaggttgaagggaattctctggggctttggggaatttagtgcgtgggtgagccaagaaaatactaattaataatagtaagttgttagtgttggttaagttgttgcttggaagtgagaagttgcttagaaactttccaaagtgcttagaactttaagtgcaaacagacaaactaacaaacaaaaattgttttgctttgctacaaggtggggaagactgaagaagtgttaactgaaaacaggtgacacagagtcaccagttttccgagaaccaaagggaggggtgtgtgatgccatctcacaggcaggggaaatgtctttaccagcttcctcctggtggccaagacagcctgtttcagagggttgttttgtttggggtgtgggtgttatcaagtgaattagtcacttgaaagatgggcgtcagacttgcatacgcagcagatcagcatccttcgctgccccttagcaacttaggtggttgatttgaaactgtgaaggtgtgattttttcaggagctggaagtcttagaaaagccttgtaaatgcctatattgtgggcttttaacgtatttaagggaccacttaagacgagattagatgggctcttctggatttgttcctcatttgtcacaggtgtcttgtgattgaaaatcatgagcgaagtgaaattgcattgaatttcaagggaatttagtatgtaaatcgtgccttagaaacacatctgttgtcttttctgtgtttggtcgatattaataatggcaaaatttttgcctatctagtatcttcaaattgtagtctttgtaacaaccaaataaccttttgtggtcactgtaaaattaatatttggtagacagaatccatgtacctttgctaaggttagaatgaataatttattgtatttttaatttgaatgtttgtgctttttaaatgagccaagactagaggggaaactatcacctaaaatcagtttggaaaacaagacctaaaaagggaaggggatggggattgtggggagagagtgggcgaggtgcctttactacatgtgtgatctgaaaaccctgcttggttctgagctgcgtctattgaattggtaaagtaataccaatggctttttatcatttccttcttccctttaagtttcacttgaaattttaaaaatcatggttatttttatcgttgggatctttctgtcttctgggttccattttttaaatgtttaaaaatatgttgacatggtagttcagttcttaaccaatgacttggggatgatgcaaacaattactgtcgttgggatttagagtgtattagtcacgcatgtatggggaagtagtctcgggtatgctgttgtgaaattgaaactgtaaaagtagatggttgaaagtactggtatgttgctctgtatggtaagaactaattctgttacgtcatgtacataattactaatcacttttcttcccctttacagcacaaataaagtttgagttctaaaactcaaaaaaaaaaaaaaaaaaaaaaaaaaaaaaacaaaaaaaacaaaaaaaaaaaaaaaaaaaaaaaaaaaaaaaaaaaaacaaaaaaaaaaaaggtgggggggggggggggcccagaaaaaacgcttcaaaacaccattgcgggaggggccggggggcccaaggaagggaaagagaaaacgcggcgcaaaggggtggcccacaggaaagacactgcgggggaaaaagaaatgagggggggaggatatcctcacacaatataaaacagaagccgcgcgggggggaggaacaaagcacgagagccggcttagagaaaacactccgcaaagaggggagcttcagaggagcggacaacaggggggagactacaaccaaaggaggggacgacacaaggacagacgaccagagaattaagaaatgaccgg

SEQ ID NO: 467095 - DNA, 4103 bp, Homo sapiens
  misc_feature (90)..(90): n is a, c, g, or t
  misc_feature (152)..(152): n is a, c, g, or t
cagtgagcaacgtgggcttgtgagagtgggggggcctctcacaagaagtgtaggcatgcattgtgtcagataaggttgggaggagactgngacaagatcaagggcagggggcaggggcaggaggctggtagtgctgtggcccagatattggncagaagtacagggaggatctcctcagggcttcaggggacagacagggagagatgactgagttagatgagactagggggcgggctgggggtgcgagaaggaagcttggcaaggagactaggtctagggggaccacagtggggcaggctgcatggaaaatatccgcagggtcccccaggcagaacagccacgctccaggccaggctgtccctactgcctggtggagggggaacttgacctctgggagggcgccgctcttgcatagctgagcgagcccgggtgcgctggtctgtgtggaaggaggaaggcagggagaggtagaaggggtggaggagtcaggaggaataggccgcagcagccctggaaatgatcaggaaggcaggcagtgggtgcagggctgcaggagggccgggagggctaatcttcaacttgtccatgccagcagcccctttttttccagaccaagggctgtgaacccgcctggggatgaggcctggtcttgtggaactgaacttagctcgacggggctgaccgctctggcccagggtggtatgtaattttcgctcggcctgggacggggcccaggccgggcccagcctggtggagcgtccaggtctgggtgcgaagccaggcccctgggcggaggtgaggggtggtctgaggagtgatgtggagttaaggcgccatcctcaccggtgactggtgcggcacctagcatgtttgacaggcggggactgcgaggcacgctgctcgggtgttggggacaacattgaccaacgctttattttccaggtggcagtgctccttttggacttttctctaggtttggcgctaaactcttcttgtgagctcactccaccccttcttcctccctttaacttatccattcacttaaaacattagctggtcatctggtaagcccgggacagtaagccgagtggctgttggagtcggtattgttggtaatggtggaggaagagaggccttcccgctgaggctggggtggggcggatcggtgttgcttgcctgcagagagggtggggagtgaatgtgcacccttgggtgggcctgcagccatccagctgaaagttacaaaaatgcttcatggaccgtggtttgttactatagtgttcctcatggcgagcagatggaaccgggagacatggagtccctggccagtgtgagtcctagcattgcaggaggggagaccctggaggagagagcccgcctcaattgatgcctgcagattgaatttccagaggcttaggaggaggaagttctccaatgttctgtttccaggccttgctcaggaagccctgtattcaggaggctaccatttaaagtttgcagatgagcttatggggggcaatcttaaaaagtccacagcagatgcatccggctcgaggggccatcagctttgaataaatgcttgttccagagcccatgaatgccagcaggcacccctcctttcctggggtaaaggttttcagatgctgcatcttctaaattgagcctccggtcatactagttttgtgcttggaaccttgcttcaagaagatccctaagctgtagaacattttaacgttgatgccacaacgcagattgatgccttgtagatggagcttgcagatggagccccgtgacctctcacctacccacctgtttgcctgccttcttgtgcgtttctcggagaagttcttagcctgatgaaataacttggggcgttgaagagctgtttaattttaaatgccttagactggggatatattagaggaagcagattgtcaaattaagggtgtcattgtgttgtgctaaacgctgggagggtacaagttggtcattcctaaatctgtgtgtgagaaatggcaggtctagtttgggcattgtgattgcattgcagattactaggagaagggaatggtgggtacaccggtagtgctcttttgttcttgcttcgtttttttaaacttgaactttacttcgttagatttcataatactttcttggcattctagtaagaggaccctgaggtgggagttgtgggggacggggagaaggggacagcttggcaccggtcccgtgggcgttgcagtgtgggggatgggggtatgcagcttggcactggtactgggagggatgagggtgaagaaggggagagggttggttagagatacagtgtgggtggtgggggtggtaggaaatgcaggttgaagggaattctctggggctttggggaatttagtgcgtgggtgagccaagaaaatactaattaataatagtaagttgttagtgttggttaagttgttgcttggaagtgagaagttgcttagaaactttccaaagtgcttagaactttaagtgcaaacagacaaactaacaaacaaaaattgttttgctttgctacaaggtggggaagactgaagaagtgttaactgaaaacaggtgacacagagtcaccagttttccgagaaccaaagggaggggtgtgtgatgccatctcacaggcaggggaaatgtctttaccagcttcctcctggtggccaagacagcctgtttcagagggttgttttgtttggggtgtgggtgttatcaagtgaattagtcacttgaaagatgggcgtcagacttgcatacgcagcagatcagcatccttcgctgccccttagcaacttaggtggttgatttgaaactgtgaaggtgtgattttttcaggagctggaagtcttagaaaagccttgtaaatgcctatattgtgggcttttaacgtatttaagggaccacttaagacgagattagatgggctcttctggatttgttcctcatttgtcacaggtgtcttgtgattgaaaatcatgagcgaagtgaaattgcattgaatttcaagggaatttagtatgtaaatcgtgccttagaaacacatctgttgtcttttctgtgtttggtcgatattaataatggcaaaatttttgcctatctagtatcttcaaattgtagtctttgtaacaaccaaataaccttttgtggtcactgtaaaattaatatttggtagacagaatccatgtacctttgctaaggttagaatgaataatttattgtatttttaatttgaatgtttgtgctttttaaatgagccaagactagaggggaaactatcacctaaaatcagtttggaaaacaagacctaaaaagggaaggggatggggattgtggggagagagtgggcgaggtgcctttactacatgtgtgatctgaaaaccctgcttggttctgagctgcgtctattgaattggtaaagtaataccaatggctttttatcatttccttcttccctttaagtttcacttgaaattttaaaaatcatggttatttttatcgttgggatctttctgtcttctgggttccattttttaaatgtttaaaaatatgttgacatggtagttcagttcttaaccaatgacttggggatgatgcaaacaattactgtcgttgggatttagagtgtattagtcacgcatgtatggggaagtagtctcgggtatgctgttgtgaaattgaaactgtaaaagtagatggttgaaagtactggtatgttgctctgtatggtaagaactaattctgttacgtcatgtacataattactaatcacttttcttcccctttacagcacaaataaagtttgagttctaaaactcaaaaaaaaaaaaaaaaaaaaaaaaaaaaaaacaaaaaaaacaaaaaaaaaaaaaaaaaaaaaaaaaaaaaaaaaaaaaaaaaaaaaaaaaaaaatcatttatcttccactataagccattctactactcctttcctgcggcatactctaacccctaatcttaatccaactttctctttaccttcttttaatttcccatcttttactcttttgattacttcgtattattttacatcctcctgactattctcaattcctctct

SEQ ID NO: 467096 - DNA, 5216 bp, Homo sapiens
  misc_feature (90)..(90): n is a, c, g, or t
  misc_feature (152)..(152): n is a, c, g, or t
cagtgagcaacgtgggcttgtgagagtgggggggcctctcacaagaagtgtaggcatgcattgtgtcagataaggttgggaggagactgngacaagatcaagggcagggggcaggggcaggaggctggtagtgctgtggcccagatattggncagaagtacagggaggatctcctcagggcttcaggggacagacagggagagatgactgagttagatgagactagggggcgggctgggggtgcgagaaggaagcttggcaaggagactaggtctagggggaccacagtggggcaggctgcatggaaaatatccgcagggtcccccaggcagaacagccacgctccaggccaggctgtccctactgcctggtggagggggaacttgacctctgggagggcgccgctcttgcatagctgagcgagcccgggtgcgctggtctgtgtggaaggaggaaggcagggagaggtagaaggggtggaggagtcaggaggaataggccgcagcagccctggaaatgatcaggaaggcaggcagtgggtgcagggctgcaggagggccgggagggctaatcttcaacttgtccatgccagcagcccctttttttccagaccaagggctgtgaacccgcctggggatgaggcctggtcttgtggaactgaacttagctcgacggggctgaccgctctggcccagggtggtatgtaattttcgctcggcctgggacggggcccaggccgggcccagcctggtggagcgtccaggtctgggtgcgaagccaggcccctgggcggaggtgaggggtggtctgaggagtgatgtggagttaaggcgccatcctcaccggtgactggtgcggcacctagcatgtttgacaggcggggactgcgaggcacgctgctcgggtgttggggacaacattgaccaacgctttattttccaggtggcagtgctccttttggacttttctctaggtttggcgctaaactcttcttgtgagctcactccaccccttcttcctccctttaacttatccattcacttaaaacattagctggtcatctggtaagcccgggacagtaagccgagtggctgttggagtcggtattgttggtaatggtggaggaagagaggccttcccgctgaggctggggtggggcggatcggtgttgcttgcctgcagagagggtggggagtgaatgtgcacccttgggtgggcctgcagccatccagctgaaagttacaaaaatgcttcatggaccgtggtttgttactatagtgttcctcatggcgagcagatggaaccgggagacatggagtccctggccagtgtgagtcctagcattgcaggaggggagaccctggaggagagagcccgcctcaattgatgcctgcagattgaatttccagaggcttaggaggaggaagttctccaatgttctgtttccaggccttgctcaggaagccctgtattcaggaggctaccatttaaagtttgcagatgagcttatggggggcaatcttaaaaagtccacagcagatgcatccggctcgaggggccatcagctttgaataaatgcttgttccagagcccatgaatgccagcaggcacccctcctttcctggggtaaaggttttcagatgctgcatcttctaaattgagcctccggtcatactagttttgtgcttggaaccttgcttcaagaagatccctaagctgtagaacattttaacgttgatgccacaacgcagattgatgccttgtagatggagcttgcagatggagccccgtgacctctcacctacccacctgtttgcctgccttcttgtgcgtttctcggagaagttcttagcctgatgaaataacttggggcgttgaagagctgtttaattttaaatgccttagactggggatatattagaggaagcagattgtcaaattaagggtgtcattgtgttgtgctaaacgctgggagggtacaagttggtcattcctaaatctgtgtgtgagaaatggcaggtctagtttgggcattgtgattgcattgcagattactaggagaagggaatggtgggtacaccggtagtgctcttttgttcttgcttcgtttttttaaacttgaactttacttcgttagatttcataatactttcttggcattctagtaagaggaccctgaggtgggagttgtgggggacggggagaaggggacagcttggcaccggtcccgtgggcgttgcagtgtgggggatgggggtatgcagcttggcactggtactgggagggatgagggtgaagaaggggagagggttggttagagatacagtgtgggtggtgggggtggtaggaaatgcaggttgaagggaattctctggggctttggggaatttagtgcgtgggtgagccaagaaaatactaattaataatagtaagttgttagtgttggttaagttgttgcttggaagtgagaagttgcttagaaactttccaaagtgcttagaactttaagtgcaaacagacaaactaacaaacaaaaattgttttgctttgctacaaggtggggaagactgaagaagtgttaactgaaaacaggtgacacagagtcaccagttttccgagaaccaaagggaggggtgtgtgatgccatctcacaggcaggggaaatgtctttaccagcttcctcctggtggccaagacagcctgtttcagagggttgttttgtttggggtgtgggtgttatcaagtgaattagtcacttgaaagatgggcgtcagacttgcatacgcagcagatcagcatccttcgctgccccttagcaacttaggtggttgatttgaaactgtgaaggtgtgattttttcaggagctggaagtcttagaaaagccttgtaaatgcctatattgtgggcttttaacgtatttaagggaccacttaagacgagattagatgggctcttctggatttgttcctcatttgtcacaggtgtcttgtgattgaaaatcatgagcgaagtgaaattgcattgaatttcaagggaatttagtatgtaaatcgtgccttagaaacacatctgttgtcttttctgtgtttggtcgatattaataatggcaaaatttttgcctatctagtatcttcaaattgtagtctttgtaacaaccaaataaccttttgtggtcactgtaaaattaatatttggtagacagaatccatgtacctttgctaaggttagaatgaataatttattgtatttttaatttgaatgtttgtgctttttaaatgagccaagactagaggggaaactatcacctaaaatcagtttggaaaacaagacctaaaaagggaaggggatggggattgtggggagagagtgggcgaggtgcctttactacatgtgtgatctgaaaaccctgcttggttctgagctgcgtctattgaattggtaaagtaataccaatggctttttatcatttccttcttccctttaagtttcacttgaaattttaaaaatcatggttatttttatcgttgggatctttctgtcttctgggttccattttttaaatgtttaaaaatatgttgacatggtagttcagttcttaaccaatgacttggggatgatgcaaacaattactgtcgttgggatttagagtgtattagtcacgcatgtatggggaagtagtctcgggtatgctgttgtgaaattgaaactgtaaaagtagatggttgaaagtactggtatgttgctctgtatggtaagaactaattctgttacgtcatgtacataattactaatcacttttcttcccctttacagcacaaataaagtttgagttctaaaactcattagaattgttgtattgctatgttacatttctcgacccctatcacattgccttcataacgactttggatgtatcttcatattgtagatttaggtctagatttgctagctccaagtaattaaggccatgtaggagagcatggtaaccacagatagaactggtattatcccaagtggtctgcagactgctgagtggggatgggatctgctctctgttgagagttggtaatcattggtttgaaatgtgatgaaaccactcaagccaatgaaggtgggtgtgtaggtggggagtactttgccataatattttaaaacattacctggttagagttctaagtggtacttatttttgtttggttaggggaaagcctgaataaaaacagaaatggacacataatatgcatattccatagtctttgggaggctggaatgtgcctgggatttgggtctaagtgtatgcgtaattcttacctcactaaagaatttgccttgtttttttccttttggtgagtgactaaaacgtctgggcttccctgtgtgcgtgctacagtaagcaagcagaggctgtgcaaaggtgtgagcaggatcacgtggaatctggaggatacatcttggcttgcaaactgcctctgtctcctgggtgggactgttctgtccttgcactgctgttctgtgttacctcttggggtgtaaggttttgcttacaggagacaaactttgggcgtagaatggaagccactgccagcctctgtgctgagaaggaaggtgcttgtttcaaagggagcagcaagggaggcttgttctactcacctgggcctgtttgcctgagaaggggagataagggctgaactgggactagccagggggaccaacacaaatggtgggggatcatgacctgaaggattctttccttcccatgagctgcagggctggttgccgtccttgcaactgtgtcttatttgcctgtgccgttatatcttggtgacccctccacgtgtacactactgacaaacgggtggagtgctggggagaagtcactgtgccgcccacctagtaaaccttctgtctgtgctcatggcatctccaagatggggcactgctgtgtgcagaatccagggtcctcagccttcataacgactttggatgtatcttcatattgtagatttaggtctagatttgctagctccaagtaattaaggccatgtaggagagcatggtaacctcagatagaactggtattatcccaagtggtctgcagactgctgagtggggatgggatctgctctcaattgagagctggtaatcacttggtttgaaatgtgatgtatatctcactcaagcacaaagaaggtgcgcatgtgataagcctgaagta

SEQ ID NO: 467097 - DNA, 11133 bp, Homo sapiens
  misc_feature (90)..(90): n is a, c, g, or t
  misc_feature (152)..(152): n is a, c, g, or t
cagtgagcaacgtgggcttgtgagagtgggggggcctctcacaagaagtgtaggcatgcattgtgtcagataaggttgggaggagactgngacaagatcaagggcagggggcaggggcaggaggctggtagtgctgtggcccagatattggncagaagtacagggaggatctcctcagggcttcaggggacagacagggagagatgactgagttagatgagactagggggcgggctgggggtgcgagaaggaagcttggcaaggagactaggtctagggggaccacagtggggcaggctgcatggaaaatatccgcagggtcccccaggcagaacagccacgctccaggccaggctgtccctactgcctggtggagggggaacttgacctctgggagggcgccgctcttgcatagctgagcgagcccgggtgcgctggtctgtgtggaaggaggaaggcagggagaggtagaaggggtggaggagtcaggaggaataggccgcagcagccctggaaatgatcaggaaggcaggcagtgggtgcagggctgcaggagggccgggagggctaatcttcaacttgtccatgccagcagcccctttttttccagaccaagggctgtgaacccgcctggggatgaggcctggtcttgtggaactgaacttagctcgacggggctgaccgctctggcccagggtggtatgtaattttcgctcggcctgggacggggcccaggccgggcccagcctggtggagcgtccaggtctgggtgcgaagccaggcccctgggcggaggtgaggggtggtctgaggagtgatgtggagttaaggcgccatcctcaccggtgactggtgcggcacctagcatgtttgacaggcggggactgcgaggcacgctgctcgggtgttggggacaacattgaccaacgctttattttccaggtggcagtgctccttttggacttttctctaggtttggcgctaaactcttcttgtgagctcactccaccccttcttcctccctttaacttatccattcacttaaaacattagctggtcatctggtaagcccgggacagtaagccgagtggctgttggagtcggtattgttggtaatggtggaggaagagaggccttcccgctgaggctggggtggggcggatcggtgttgcttgcctgcagagagggtggggagtgaatgtgcacccttgggtgggcctgcagccatccagctgaaagttacaaaaatgcttcatggaccgtggtttgttactatagtgttcctcatggcgagcagatggaaccgggagacatggagtccctggccagtgtgagtcctagcattgcaggaggggagaccctggaggagagagcccgcctcaattgatgcctgcagattgaatttccagaggcttaggaggaggaagttctccaatgttctgtttccaggccttgctcaggaagccctgtattcaggaggctaccatttaaagtttgcagatgagcttatggggggcaatcttaaaaagtccacagcagatgcatccggctcgaggggccatcagctttgaataaatgcttgttccagagcccatgaatgccagcaggcacccctcctttcctggggtaaaggttttcagatgctgcatcttctaaattgagcctccggtcatactagttttgtgcttggaaccttgcttcaagaagatccctaagctgtagaacattttaacgttgatgccacaacgcagattgatgccttgtagatggagcttgcagatggagccccgtgacctctcacctacccacctgtttgcctgccttcttgtgcgtttctcggagaagttcttagcctgatgaaataacttggggcgttgaagagctgtttaattttaaatgccttagactggggatatattagaggaagcagattgtcaaattaagggtgtcattgtgttgtgctaaacgctgggagggtacaagttggtcattcctaaatctgtgtgtgagaaatggcaggtctagtttgggcattgtgattgcattgcagattactaggagaagggaatggtgggtacaccggtagtgctcttttgttcttgcttcgtttttttaaacttgaactttacttcgttagatttcataatactttcttggcattctagtaagaggaccctgaggtgggagttgtgggggacggggagaaggggacagcttggcaccggtcccgtgggcgttgcagtgtgggggatgggggtatgcagcttggcactggtactgggagggatgagggtgaagaaggggagagggttggttagagatacagtgtgggtggtgggggtggtaggaaatgcaggttgaagggaattctctggggctttggggaatttagtgcgtgggtgagccaagaaaatactaattaataatagtaagttgttagtgttggttaagttgttgcttggaagtgagaagttgcttagaaactttccaaagtgcttagaactttaagtgcaaacagacaaactaacaaacaaaaattgttttgctttgctacaaggtggggaagactgaagaagtgttaactgaaaacaggtgacacagagtcaccagttttccgagaaccaaagggaggggtgtgtgatgccatctcacaggcaggggaaatgtctttaccagcttcctcctggtggccaagacagcctgtttcagagggttgttttgtttggggtgtgggtgttatcaagtgaattagtcacttgaaagatgggcgtcagacttgcatacgcagcagatcagcatccttcgctgccccttagcaacttaggtggttgatttgaaactgtgaaggtgtgattttttcaggagctggaagtcttagaaaagccttgtaaatgcctatattgtgggcttttaacgtatttaagggaccacttaagacgagattagatgggctcttctggatttgttcctcatttgtcacaggtgtcttgtgattgaaaatcatgagcgaagtgaaattgcattgaatttcaagggaatttagtatgtaaatcgtgccttagaaacacatctgttgtcttttctgtgtttggtcgatattaataatggcaaaatttttgcctatctagtatcttcaaattgtagtctttgtaacaaccaaataaccttttgtggtcactgtaaaattaatatttggtagacagaatccatgtacctttgctaaggttagaatgaataatttattgtatttttaatttgaatgtttgtgctttttaaatgagccaagactagaggggaaactatcacctaaaatcagtttggaaaacaagacctaaaaagggaaggggatggggattgtggggagagagtgggcgaggtgcctttactacatgtgtgatctgaaaaccctgcttggttctgagctgcgtctattgaattggtaaagtaataccaatggctttttatcatttccttcttccctttaagtttcacttgaaattttaaaaatcatggttatttttatcgttgggatctttctgtcttctgggttccatttttcaaacaattactgtcgttgggatttagagtgtattagtcacgcatgtatggggaagtagtctcgggtatgctgttgtgaaattgaaactgtaaaagtagatggttgaaagtactggtatgttgctctgtatggtaagaactaattctgttacgtcatgtacataattactaatcacttttcttcccctttacagcacaaataaagtttgagttctaaaactcattagaattgttgtattgctatgttacatttctcgacccctatcacattgccttcataacgactttggatgtatcttcatattgtagatttaggtctagatttgctagctccaagtaattaaggccatgtaggagagcatggtaaccacagatagaactggtattatcccaagtggtctgcagactgctgagtggggatgggatctgctctctgttgagagttggtaatcattggtttgaaatgtgatgaaaccactcaagccaatgaaggtgggtgtgtaggtggggagtactttgccataatattttaaaacattacctggttagagttctaagtggtacttatttttgtttggttaggggaaagcctgaataaaaacagaaatggacacataatatgcatattccatagtctttgggaggctggaatgtgcctgggatttgggtctaagtgtatgcgtaattcttacctcactaaagaatttgccttgtttttttccttttggtgagtgactaaaacgtctgggcttccctgtgtgcgtgctacagtaagcaagcagaggctgtgcaaaggtgtgagcaggatcacgtggaatctggaggatacatcttggcttgcaaactgcctctgtctcctgggtgggactgttctgtccttgcactgctgttctgtgttacctcttggggtgtaaggttttgcttacaggagacaaactttgggcgtagaatggaagccactgccagcctctgtgctgagaaggaaggtgcttgtttcaaagggagcagcaagggaggcttgttctactcacctgggcctgtttgcctgagaaggggagataagggctgaactgggactagccagggggaccaacacaaatggtgggggatcatgacctgaaggattctttccttcccatgagctgcagggctggttgccgtccttgcaactgtgtcttatttgcctgtgccgttatatcttggtgacccctccacgtgtacactactgacaaacgggtggagtgctggggagaagtcactgtgccgcccacctagtaaaccttctgtctgtgctcatggcatctccaagatggggcactgctgtgtgcagaatccagggtcctctttctgcttgcaactcctttccctggatgccccagaaacaatccaggcctcctttcctatcttacccctttgctttgctttttaccccagcacctctataaccgccttctcttcttttcagaactccttgtttctcatcctgttttttatgattacaaaactcttgcttccaccctggaagataactgctatagatgcctgtatgtaaatggtgctgtctccagcaactggcatgctgaagaagaattgattcacggggtataaatgttggggattggaagtggggatgaaatggcacttgttgatacaggagcagagaggtgaggccgactgctgaagacagctcgccaccctccttgcctccactccaatccaggggctggggccacattctttgccttcatttatcctcagatcaggtgagatcgacaggaggtgttgatggcagtgccagcaattattgctaatccgtttgcatccttatgcatagatctgaattcagactttgtgaatttccagaggtgtgggtaatataatagaattcagtgagtgggcatggctgatcttgtgcaaattaaaagttatggggcataagaatagcaaaagttgaacttcttttaaaaaggaaagtaccctgagagccagtattggttgaggctcttcagtatgcccaggttggcagcactgagaaccgcaggaacggcctgttgttacaaaaaggagattgactcagctgcccttggtgcatctgactgactatgactgctgagagattccaaggacccttaatgccagggctaacctctccatgtgcagtgagacctctggaggaagtgtcatcctctggctttgtgtggtactcattatggtgcagtgcgggcatgaaatgaagacacccaaataggcttacagatacgatatgttttaaatgttcgtatttaacaaaaacatactgacactgtttggaaatggcaacaggaagatagcaaaatgaatactaacattacgaaaagatgaacaggtacatgttccaaggcaggtggctgtgaacttcctctgagtgaaggcatcccctccagcacctttcagcctgctagttaggacgacccgccgccaccctccaggacctccagccctgcactgcctttcctctcttttaaataattcttcattgagttctaatatgtaaaaaaaaaaagtttactgtaaagtttgcaaataaggaaattttttttaaaagtcctcagtaatcttaccagtaacaattgttatgggcacatttgcttttggaagatttcttttgtatgcatgggataagtacatttttaaacaaaaatgggattatgccataaattctattttgtgactttaatatatagtgaacaccttttttaatgatgacaggatgttcccttgcatggctgtatcaatttaaacaatcttgtttcaatgggcatacagggtattttctagtttttttttcctcttagaaaataatacttgcgatgactttccttgtagctcagactttttcacgtctgttgttatctctttgggaatgctgaatacatacatttcgagaaggaaatgactgttaaactcttaagacttcaggttcatattgctaaactgcccagcagggagggattttttcaattagtgttctcactggtgaggcaaacctgatgccttcccctcttcctcagaaccggctttatcacattgaaaacctttgctcctccgacggatcgagtctgctttccctgtggatgtgagcattgctttgtctgctggtgactgaacatctctaccatgtgtcaattggccatttgtggtgtgtgtgtgtgtgcgtgtgtgtgtgtgtgtgtgtgtgtatgattttctaattcctagtcatttttctattgattgttttgcaaaagccatttacatcttaaggatattgataatcttttgttatatttgatgcaaatatttttttccagtttataggttgccttttaattttgtgtttcaggtagataaaagttaaacgattttcttaggttagtttatcactgtggtttctgaacttgttatgtgtagatcttttccaccccaagagtacataaatattaatccatactttcttatggaacttgtatggtttcgttttttacatttaaaccttcttccccgtggtgtgtgttgtggaatctgtgtttgtgtgaggaggggcatggtgctctcagaacccacctcctgtggccagagagccctgtcctgtgagggtggttatcacagtggcagggttcaattcagaagaccttgagggcaggctgatgtttcctgaatgggcccctggttgttgcttgtccctgactctccatttccccatctgagtggatttggacctaatagggcactggagctggttcgaatcctgactggactacttggcaactttatgtctgggagcaagttacttaacctccccaagcctgtgtctgtgaaatgcgggtaaatgaatgtagatgtttggcagcagctactccttgttgagctctcacagtgaactctcctgcctctgccctccttccccgcctcccctggtgcctagcgtcaggtctagccacttcctcctgggcccctctcccttttctgtggctggctgcctgcccgcctggcgctggacctttcatgtaacgggaatcagcatgtatattctggtctggtctgtttctacacttaattttgtttccagtagtatttccctgtaccggcagagttcacaaacacatttgaagaggctttttctcaggattcttaaccttcccaaaggaagtcccatggatgggtttctagaagtctataaatgctctgaaattgtatttttctgtggaaagcataactttcatctgcttgttcgtgctcaaaaaagatcatgaatgaatgattgcatgattttatgccattgtgcttatactaaaggatatgtagcccatctcttgagctgttaaactgttttgactactttaaatcgtgcagctgtgagcatctctgtaaatttagtgtacacatgtatcccctggagtggcattgcctcggcagtgagcacttatggttttataactctcttcacagactcaaatgactccagaaagctacacttcctgttgtgagtatatgatatccatttccctacatagccactaacatcaggtttttacaattttatttatttcttgctactttaagaaatttttgtggtgaaatacatataatagaagttgactatctgaatcatttttaagtatacattcagtagtgttaagtatgtcgccattgttgtacaaccaatctccagaactttttcatcttgcaaaacaaactctgtacccattaaataacattaaacattccattccctccagcctcagcaaccccattctactttctgtttctgtgagtttgactattccaagcacttcatatcagttaaatcatgaagtatttgtctgtctgtgactggcttatttctctgagcacagtgtcctcgagatgcgtctatgttgtagcatatgtcagaatttccttcctttttaaaagatccaaataatattcttattttatatcttttttttatccattcatccattagtggacacttgggttgcttttggctattgtaaataatggtgctatgtacaaatatctatattattgtatttacaagtataatgctgtaatgtacacacatctttttgagatcctaccttcagttcttttgagtatatagccagaagtggtattactaaatcttacgatatttctatttttaatttattgaggaaccactgtagtttttcatagcaactgcaccattttacgttctcaccaagagtgcacaagggttccgaggttcccacatcctccccaacacttgttattttctgctttttttagattgcagccatcatagtgggtgtgaggtgacatttcattgtggttttgatttgcatttccctaatgaggagtgatgctgagcatcttttcatatgcttactggtcatttgtatgttgtctttggaaaaatgtctattcaagtcctttgactattttaaaaattgggttattagagttatcgttgttgttgacttgtaggagtttctttctatattctggatattaatcccctatcagatatatgatttgcaaatatcttctcttattccataaggttactttttcactttgttgattgtgttctttgatgtatagaagtttttagttttgaaatagtctaatttatctgtttttacttttgtggtctgtgcttttggtgtcatatccaagaaatccttgccaaatccaacgttataaggtacttttaaggtattttagttgtcttagtctatatttctgtactcacctttctttatccactcatcagttgatgggcatgtaggttggttccatatctttgcaattctgaattgtgctgtgatcaggtgtctttttagtataatgatttactctcctttgggtagatacccagtagtgggattgctggatcgaatggtttttataattttctattttaccacagtttctctctgcatttttcctctttgaccactaaccatgtgaaattctcatattgacctttataatgatcatgaactcttagtatcattgggaaggccacatttgccacttatgattgtaaaccttatcctccatttttcctgttattgttggtgcaaaaagcacctattataccaggactttaaaaatcagtctgataagtctttgataagtctaataataataactgataagtccattgaatttgcttctgattactttttctttagtagctaaacatgtatgtactcctatgattacaatgaacactcctctccatttaaattaattatttacattgatgaaatagcaaaatgttaatgactaaatactgtcttggttttttcgttccaggtcagtcaatattaacttcttataattttcttttttttctttatgtgtgtgtgtgtgtgtatttttttttttttaatttcaatggcttttggggtacaaatggcttttggtcatatagatgaattctacagtagtgaagtctgagattttactgcaccggtcacctgagtagtgtacattgtacccaatatgtggttttttataccttgcccccctcttaccctccccactttgagtctctagtgtccattatgtcactctgtatacctttttgtacccataagttagctctcacttataagtgagaacacacagtatttggttttccattcctgagttgcttcacttagaataatatcctccagctccatccaaaattgctgcaaaaaaaaaaaaaaccacaaacattattttgttcttttttattgctaagtcatattccatggtgtagagataccacattttatttatccactcactggttgatgggttggttccacatctttgcaattgtgacttgtactgccatcaagtgtctttctggtataatgacttcttttcctttgggtagatacccaggagtgggattgctagatcaaatggttcttaacattttctctctggatctatttctggaaattttaggctccagtttttgttgttgttgttaataaaatgcaatggaatgtaatgatcatcacttttcattatgctttaaaatctggtaaatggaggctagaacactcctgtaaggcaagaatattctctctgttggaactcaaatacacagaactgggtaaatctcaatcttaatctttgattcaggacacaacatggctctcttttacttgctttctttaattgttttttaataatgtggtaagcatttctgaatctcctatccaatacaaaaactaggacaatacagacagtaactcctatggttacaatgaacactcctctccacttaaattaattatttacactgatgaaattgaaatagcaaaattttaatgactaaatactgtctttgattttttgttccaggtctgtcaatattaacttcttataattttctttttttttctttatgtgtgtgtgtgtgtgtatatatatatatatttaatttcaatggcttttggggtacaaatggcttttggtcatatatatgagttctacagtagtgaagtctgagattttactacaccttccacttatgtggtcccacaccacccgcctcccctgccgcct

SEQ ID NO: 467098 - DNA, 11142 bp, Homo sapiens
  misc_feature (90)..(90): n is a, c, g, or t
  misc_feature (152)..(152): n is a, c, g, or t
cagtgagcaacgtgggcttgtgagagtgggggggcctctcacaagaagtgtaggcatgcattgtgtcagataaggttgggaggagactgngacaagatcaagggcagggggcaggggcaggaggctggtagtgctgtggcccagatattggncagaagtacagggaggatctcctcagggcttcaggggacagacagggagagatgactgagttagatgagactagggggcgggctgggggtgcgagaaggaagcttggcaaggagactaggtctagggggaccacagtggggcaggctgcatggaaaatatccgcagggtcccccaggcagaacagccacgctccaggccaggctgtccctactgcctggtggagggggaacttgacctctgggagggcgccgctcttgcatagctgagcgagcccgggtgcgctggtctgtgtggaaggaggaaggcagggagaggtagaaggggtggaggagtcaggaggaataggccgcagcagccctggaaatgatcaggaaggcaggcagtgggtgcagggctgcaggagggccgggagggctaatcttcaacttgtccatgccagcagcccctttttttccagaccaagggctgtgaacccgcctggggatgaggcctggtcttgtggaactgaacttagctcgacggggctgaccgctctggcccagggtggtatgtaattttcgctcggcctgggacggggcccaggccgggcccagcctggtggagcgtccaggtctgggtgcgaagccaggcccctgggcggaggtgaggggtggtctgaggagtgatgtggagttaaggcgccatcctcaccggtgactggtgcggcacctagcatgtttgacaggcggggactgcgaggcacgctgctcgggtgttggggacaacattgaccaacgctttattttccaggtggcagtgctccttttggacttttctctaggtttggcgctaaactcttcttgtgagctcactccaccccttcttcctccctttaacttatccattcacttaaaacattagctggtcatctggtaagcccgggacagtaagccgagtggctgttggagtcggtattgttggtaatggtggaggaagagaggccttcccgctgaggctggggtggggcggatcggtgttgcttgcctgcagagagggtggggagtgaatgtgcacccttgggtgggcctgcagccatccagctgaaagttacaaaaatgcttcatggaccgtggtttgttactatagtgttcctcatggcgagcagatggaaccgggagacatggagtccctggccagtgtgagtcctagcattgcaggaggggagaccctggaggagagagcccgcctcaattgatgcctgcagattgaatttccagaggcttaggaggaggaagttctccaatgttctgtttccaggccttgctcaggaagccctgtattcaggaggctaccatttaaagtttgcagatgagcttatggggggcaatcttaaaaagtccacagcagatgcatccggctcgaggggccatcagctttgaataaatgcttgttccagagcccatgaatgccagcaggcacccctcctttcctggggtaaaggttttcagatgctgcatcttctaaattgagcctccggtcatactagttttgtgcttggaaccttgcttcaagaagatccctaagctgtagaacattttaacgttgatgccacaacgcagattgatgccttgtagatggagcttgcagatggagccccgtgacctctcacctacccacctgtttgcctgccttcttgtgcgtttctcggagaagttcttagcctgatgaaataacttggggcgttgaagagctgtttaattttaaatgccttagactggggatatattagaggaagcagattgtcaaattaagggtgtcattgtgttgtgctaaacgctgggagggtacaagttggtcattcctaaatctgtgtgtgagaaatggcaggtctagtttgggcattgtgattgcattgcagattactaggagaagggaatggtgggtacaccggtagtgctcttttgttcttgcttcgtttttttaaacttgaactttacttcgttagatttcataatactttcttggcattctagtaagaggaccctgaggtgggagttgtgggggacggggagaaggggacagcttggcaccggtcccgtgggcgttgcagtgtgggggatgggggtatgcagcttggcactggtactgggagggatgagggtgaagaaggggagagggttggttagagatacagtgtgggtggtgggggtggtaggaaatgcaggttgaagggaattctctggggctttggggaatttagtgcgtgggtgagccaagaaaatactaattaataatagtaagttgttagtgttggttaagttgttgcttggaagtgagaagttgcttagaaactttccaaagtgcttagaactttaagtgcaaacagacaaactaacaaacaaaaattgttttgctttgctacaaggtggggaagactgaagaagtgttaactgaaaacaggtgacacagagtcaccagttttccgagaaccaaagggaggggtgtgtgatgccatctcacaggcaggggaaatgtctttaccagcttcctcctggtggccaagacagcctgtttcagagggttgttttgtttggggtgtgggtgttatcaagtgaattagtcacttgaaagatgggcgtcagacttgcatacgcagcagatcagcatccttcgctgccccttagcaacttaggtggttgatttgaaactgtgaaggtgtgattttttcaggagctggaagtcttagttaagacgagattagatgggctcttctggatttgttcctcatttgtcacaggtgtcttgtgattgaaaatcatgagcgaagtgaaattgcattgaatttcaagggaatttagtatgtaaatcgtgccttagaaacacatctgttgtcttttctgtgtttggtcgatattaataatggcaaaatttttgcctatctagtatcttcaaattgtagtctttgtaacaaccaaataaccttttgtggtcactgtaaaattaatatttggtagacagaatccatgtacctttgctaaggttagaatgaataatttattgtatttttaatttgaatgtttgtgctttttaaatgagccaagactagaggggaaactatcacctaaaatcagtttggaaaacaagacctaaaaagggaaggggatggggattgtggggagagagtgggcgaggtgcctttactacatgtgtgatctgaaaaccctgcttggttctgagctgcgtctattgaattggtaaagtaataccaatggctttttatcatttccttcttccctttaagtttcacttgaaattttaaaaatcatggttatttttatcgttgggatctttctgtcttctgggttccattttttaaatgtttaaaaatatgttgacatggtagttcagttcttaaccaatgacttggggatgatgcaaacaattactgtcgttgggatttagagtgtattagtcacgcatgtatggggaagtagtctcgggtatgctgttgtgaaattgaaactgtaaaagtagatggttgaaagtactggtatgttgctctgtatggtaagaactaattctgttacgtcatgtacataattactaatcacttttcttcccctttacagcacaaataaagtttgagttctaaaactcattagaattgttgtattgctatgttacatttctcgacccctatcacattgccttcataacgactttggatgtatcttcatattgtagatttaggtctagatttgctagctccaagtaattaaggccatgtaggagagcatggtaaccacagatagaactggtattatcccaagtggtctgcagactgctgagtggggatgggatctgctctctgttgagagttggtaatcattggtttgaaatgtgatgaaaccactcaagccaatgaaggtgggtgtgtaggtggggagtactttgccataatattttaaaacattacctggttagagttctaagtggtacttatttttgtttggttaggggaaagcctgaataaaaacagaaatggacacataatatgcatattccatagtctttgggaggctggaatgtgcctgggatttgggtctaagtgtatgcgtaattcttacctcactaaagaatttgccttgtttttttccttttggtgagtgactaaaacgtctgggcttccctgtgtgcgtgctacagtaagcaagcagaggctgtgcaaaggtgtgagcaggatcacgtggaatctggaggatacatcttggcttgcaaactgcctctgtctcctgggtgggactgttctgtccttgcactgctgttctgtgttacctcttggggtgtaaggttttgcttacaggagacaaactttgggcgtagaatggaagccactgccagcctctgtgctgagaaggaaggtgcttgtttcaaagggagcagcaagggaggcttgttctactcacctgggcctgtttgcctgagaaggggagataagggctgaactgggactagccagggggaccaacacaaatggtgggggatcatgacctgaaggattctttccttcccatgagctgcagggctggttgccgtccttgcaactgtgtcttatttgcctgtgccgttatatcttggtgacccctccacgtgtacactactgacaaacgggtggagtgctggggagaagtcactgtgccgcccacctagtaaaccttctgtctgtgctcatggcatctccaagatggggcactgctgtgtgcagaatccagggtcctctttctgcttgcaactcctttccctggatgccccagaaacaatccaggcctcctttcctatcttacccctttgctttgctttttaccccagcacctctataaccgccttctcttcttttcagaactccttgtttctcatcctgttttttatgattacaaaactcttgcttccaccctggaagataactgctatagatgcctgtatgtaaatggtgctgtctccagcaactggcatgctgaagaagaattgattcacggggtataaatgttggggattggaagtggggatgaaatggcacttgttgatacaggagcagagaggtgaggccgactgctgaagacagctcgccaccctccttgcctccactccaatccaggggctggggccacattctttgccttcatttatcctcagatcaggtgagatcgacaggaggtgttgatggcagtgccagcaattattgctaatccgtttgcatccttatgcatagatctgaattcagactttgtgaatttccagaggtgtgggtaatataatagaattcagtgagtgggcatggctgatcttgtgcaaattaaaagttatggggcataagaatagcaaaagttgaacttcttttaaaaaggaaagtaccctgagagccagtattggttgaggctcttcagtatgcccaggttggcagcactgagaaccgcaggaacggcctgttgttacaaaaaggagattgactcagctgcccttggtgcatctgactgactatgactgctgagagattccaaggacccttaatgccagggctaacctctccatgtgcagtgagacctctggaggaagtgtcatcctctggctttgtgtggtactcattatggtgcagtgcgggcatgaaatgaagacacccaaataggcttacagatacgatatgttttaaatgttcgtatttaacaaaaacatactgacactgtttggaaatggcaacaggaagatagcaaaatgaatactaacattacgaaaagatgaacaggtacatgttccaaggcaggtggctgtgaacttcctctgagtgaaggcatcccctccagcacctttcagcctgctagttaggacgacccgccgccaccctccaggacctccagccctgcactgcctttcctctcttttaaataattcttcattgagttctaatatgtaaaaaaaaaaagtttactgtaaagtttgcaaataaggaaattttttttaaaagtcctcagtaatcttaccagtaacaattgttatgggcacatttgcttttggaagatttcttttgtatgcatgggataagtacatttttaaacaaaaatgggattatgccataaattctattttgtgactttaatatatagtgaacaccttttttaatgatgacaggatgttcccttgcatggctgtatcaatttaaacaatcttgtttcaatgggcatacagggtattttctagtttttttttcctcttagaaaataatacttgcgatgactttccttgtagctcagactttttcacgtctgttgttatctctttgggaatgctgaatacatacatttcgagaaggaaatgactgttaaactcttaagacttcaggttcatattgctaaactgcccagcagggagggattttttcaattagtgttctcactggtgaggcaaacctgatgccttcccctcttcctcagaaccggctttatcacattgaaaacctttgctcctccgacggatcgagtctgctttccctgtggatgtgagcattgctttgtctgctggtgactgaacatctctaccatgtgtcaattggccatttgtggtgtgtgtgtgtgtgcgtgtgtgtgtgtgtgtgtgtgtgtatgattttctaattcctagtcatttttctattgattgttttgcaaaagccatttacatcttaaggatattgataatcttttgttatatttgatgcaaatatttttttccagtttataggttgccttttaattttgtgtttcaggtagataaaagttaaacgattttcttaggttagtttatcactgtggtttctgaacttgttatgtgtagatcttttccaccccaagagtacataaatattaatccatactttcttatggaacttgtatggtttcgttttttacatttaaaccttcttccccgtggtgtgtgttgtggaatctgtgtttgtgtgaggaggggcatggtgctctcagaacccacctcctgtggccagagagccctgtcctgtgagggtggttatcacagtggcagggttcaattcagaagaccttgagggcaggctgatgtttcctgaatgggcccctggttgttgcttgtccctgactctccatttccccatctgagtggatttggacctaatagggcactggagctggttcgaatcctgactggactacttggcaactttatgtctgggagcaagttacttaacctccccaagcctgtgtctgtgaaatgcgggtaaatgaatgtagatgtttggcagcagctactccttgttgagctctcacagtgaactctcctgcctctgccctccttccccgcctcccctggtgcctagcgtcaggtctagccacttcctcctgggcccctctcccttttctgtggctggctgcctgcccgcctggcgctggacctttcatgtaacgggaatcagcatgtatattctggtctggtctgtttctacacttaattttgtttccagtagtatttccctgtaccggcagagttcacaaacacatttgaagaggctttttctcaggattcttaaccttcccaaaggaagtcccatggatgggtttctagaagtctataaatgctctgaaattgtatttttctgtggaaagcataactttcatctgcttgttcgtgctcaaaaaagatcatgaatgaatgattgcatgattttatgccattgtgcttatactaaaggatatgtagcccatctcttgagctgttaaactgttttgactactttaaatcgtgcagctgtgagcatctctgtaaatttagtgtacacatgtatcccctggagtggcattgcctcggcagtgagcacttatggttttataactctcttcacagactcaaatgactccagaaagctacacttcctgttgtgagtatatgatatccatttccctacatagccactaacatcaggtttttacaattttatttatttcttgctactttaagaaatttttgtggtgaaatacatataatagaagttgactatctgaatcatttttaagtatacattcagtagtgttaagtatgtcgccattgttgtacaaccaatctccagaactttttcatcttgcaaaacaaactctgtacccattaaataacattaaacattccattccctccagcctcagcaaccccattctactttctgtttctgtgagtttgactattccaagcacttcatatcagttaaatcatgaagtatttgtctgtctgtgactggcttatttctctgagcacagtgtcctcgagatgcgtctatgttgtagcatatgtcagaatttccttcctttttaaaagatccaaataatattcttattttatatcttttttttatccattcatccattagtggacacttgggttgcttttggctattgtaaataatggtgctatgtacaaatatctatattattgtatttacaagtataatgctgtaatgtacacacatctttttgagatcctaccttcagttcttttgagtatatagccagaagtggtattactaaatcttacgatatttctatttttaatttattgaggaaccactgtagtttttcatagcaactgcaccattttacgttctcaccaagagtgcacaagggttccgaggttcccacatcctccccaacacttgttattttctgctttttttagattgcagccatcatagtgggtgtgaggtgacatttcattgtggttttgatttgcatttccctaatgaggagtgatgctgagcatcttttcatatgcttactggtcatttgtatgttgtctttggaaaaatgtctattcaagtcctttgactattttaaaaattgggttattagagttatcgttgttgttgacttgtaggagtttctttctatattctggatattaatcccctatcagatatatgatttgcaaatatcttctcttattccataaggttactttttcactttgttgattgtgttctttgatgtatagaagtttttagttttgaaatagtctaatttatctgtttttacttttgtggtctgtgcttttggtgtcatatccaagaaatccttgccaaatccaacgttataaggtacttttaaggtattttagttgtcttagtctatatttctgtactcacctttctttatccactcatcagttgatgggcatgtaggttggttccatatctttgcaattctgaattgtgctgtgatcaggtgtctttttagtataatgatttactctcctttgggtagatacccagtagtgggattgctggatcgaatggtttttataattttctattttaccacagtttctctctgcatttttcctctttgaccactaaccatgtgaaattctcatattgacctttataatgatcatgaactcttagtatcattgggaaggccacatttgccacttatgattgtaaaccttatcctccatttttcctgttattgttggtgcaaaaagcacctattataccaggactttaaaaatcagtctgataagtctttgataagtctaataataataactgataagtccattgaatttgcttctgattactttttctttagtagctaaacatgtatgtactcctatgattacaatgaacactcctctccatttaaattaattatttacattgatgaaatagcaaaatgttaatgactaaatactgtcttggttttttcgttccaggtcagtcaatattaacttcttataattttcttttttttctttatgtgtgtgtgtgtgtgtatttttttttttttaatttcaatggcttttggggtacaaatggcttttggtcatatagatgaattctacagtagtgaagtctgagattttactgcaccggtcacctgagtagtgtacattgtacccaatatgtggttttttataccttgcccccctcttaccctccccactttgagtctctagtgtccattatgtcactctgtatacctttttgtacccataagttagctctcacttataagtgagaacacacagtatttggttttccattcctgagttgcttcacttagaataatatcctccagctccatccaaaattgctgcaaaaaaaaaaaaaaccacaaacattattttgttcttttttattgctaagtcatattccatggtgtagagataccacattttatttatccactcactggttgatgggttggttccacatctttgcaattgtgacttgtactgccatcaagtgtctttctggtataatgacttcttttcctttgggtagatacccaggagtgggattgctagatcaaatggttcttaacattttctctctggatctatttctggaaattttaggctccagtttttgttgttgttgttaataaaatgcaatggaatgtaatgatcatcacttttcattatgctttaaaatctggtaaatggaggctagaacactcctgtaaggcaagaatattctctctgttggaactcaaatacacagaactgggtaaatctcaatcttaatctttgattcaggacacaacatggctctcttttacttgctttctttaattgttttttaataatgtggtaagcatttctgaatctcctatccaatacaaaaactaggacaatacagacagtaactcctatggttacaatgaacactcctctccacttaaattaattatttacactgatgaaattgaaatagcaaaattttaatgactaaatactgtctttgattttttgttccaggtctgtcaatattaacttcttataattttctttttttttctttatgtgtgtgtgtgtgtgtatatatatatatatttaatttcaatggcttttggggtacaaatggcttttggtcatatatatgagttctacagtagtgaagtctgagattttactacaccttccacttatgtggtcccacaccacccgcctcccctgccgcct

SEQ ID NO: 467099 - DNA, 4116 bp, Homo sapiens
  misc_feature (90)..(90): n is a, c, g, or t
  misc_feature (152)..(152): n is a, c, g, or t
cagtgagcaacgtgggcttgtgagagtgggggggcctctcacaagaagtgtaggcatgcattgtgtcagataaggttgggaggagactgngacaagatcaagggcagggggcaggggcaggaggctggtagtgctgtggcccagatattggncagaagtacagggaggatctcctcagggcttcaggggacagacagggagagatgactgagttagatgagactagggggcgggctgggggtgcgagaaggaagcttggcaaggagactaggtctagggggaccacagtggggcaggctgcatggaaaatatccgcagggtcccccaggcagaacagccacgctccaggccaggctgtccctactgcctggtggagggggaacttgacctctgggagggcgccgctcttgcatagctgagcgagcccgggtgcgctggtctgtgtggaaggaggaaggcagggagaggtagaaggggtggaggagtcaggaggaataggccgcagcagccctggaaatgatcaggaaggcaggcagtgggtgcagggctgcaggagggccgggagggctaatcttcaacttgtccatgccagcagcccctttttttccagaccaagggctgtgaacccgcctggggatgaggcctggtcttgtggaactgaacttagctcgacggggctgaccgctctggcccagggtggtatgtaattttcgctcggcctgggacggggcccaggccgggcccagcctggtggagcgtccaggtctgggtgcgaagccaggcccctgggcggaggtgaggggtggtctgaggagtgatgtggagttaaggcgccatcctcaccggtgactggtgcggcacctagcatgtttgacaggcggggactgcgaggcacgctgctcgggtgttggggacaacattgaccaacgctttattttccaggtggcagtgctccttttggacttttctctaggtttggcgctaaactcttcttgtgagctcactccaccccttcttcctccctttaacttatccattcacttaaaacattagctggtcatctggtaagcccgggacagtaagccgagtggctgttggagtcggtattgttggtaatggtggaggaagagaggccttcccgctgaggctggggtggggcggatcggtgttgcttgcctgcagagagggtggggagtgaatgtgcacccttgggtgggcctgcagccatccagctgaaagttacaaaaatgcttcatggaccgtggtttgttactatagtgttcctcatggcgagcagatggaaccgggagacatggagtccctggccagtgtgagtcctagcattgcaggaggggagaccctggaggagagagcccgcctcaattgatgcctgcagattgaatttccagaggcttaggaggaggaagttctccaatgttctgtttccaggccttgctcaggaagccctgtattcaggaggctaccatttaaagtttgcagatgagcttatggggggcaatcttaaaaagtccacagcagatgcatccggctcgaggggccatcagctttgaataaatgcttgttccagagcccatgaatgccagcaggcacccctcctttcctggggtaaaggttttcagatgctgcatcttctaaattgagcctccggtcatactagttttgtgcttggaaccttgcttcaagaagatccctaagctgtagaacattttaacgttgatgccacaacgcagattgatgccttgtagatggagcttgcagatggagccccgtgacctctcacctacccacctgtttgcctgccttcttgtgcgtttctcggagaagttcttagcctgatgaaataacttggggcgttgaagagctgtttaattttaaatgccttagactggggatatattagaggaagcagattgtcaaattaagggtgtcattgtgttgtgctaaacgctgggagggtacaagttggtcattcctaaatctgtgtgtgagaaatggcaggtctagtttgggcattgtgattgcattgcagattactaggagaagggaatggtgggtacaccggtagtgctcttttgttcttgcttcgtttttttaaacttgaactttacttcgttagatttcataatactttcttggcattctagtaagaggaccctgaggtgggagttgtgggggacggggagaaggggacagcttggcaccggtcccgtgggcgttgcagtgtgggggatgggggtatgcagcttggcactggtactgggagggatgagggtgaagaaggggagagggttggttagagatacagtgtgggtggtgggggtggtaggaaatgcaggttgaagggaattctctggggctttggggaatttagtgcgtgggtgagccaagaaaatactaattaataatagtaagttgttagtgttggttaagttgttgcttggaagtgagaagttgcttagaaactttccaaagtgcttagaactttaagtgcaaacagacaaactaacaaacaaaaattgttttgctttgctacaaggtggggaagactgaagaagtgttaactgaaaacaggtgacacagagtcaccagttttccgagaaccaaagggaggggtgtgtgatgccatctcacaggcaggggaaatgtctttaccagcttcctcctggtggccaagacagcctgtttcagagggttgttttgtttggggtgtgggtgttatcaagtgaattagtcacttgaaagatgggcgtcagacttgcatacgcagcagatcagcatccttcgctgccccttagcaacttaggtggttgatttgaaactgtgaaggtgtgattttttcaggagctggaagtcttagaaaagccttgtaaatgcctatattgtgggcttttaacgtatttaagggaccacttaagacgagattagatgggctcttctggatttgttcctcatttgtcacaggtgtcttgtgattgaaaatcatgagcgaagtgaaattgcattgaatttcaagggaatttagtatgtaaatcgtgccttagaaacacatctgttgtcttttctgtgtttggtcgatattaataatggcaaaatttttgcctatctagtatcttcaaattgtagtctttgtaacaaccaaataaccttttgtggtcactgtaaaattaatatttggtagacagaatccatgtacctttgctaaggttagaatgaataatttattgtatttttaatttgaatgtttgtgctttttaaatgagccaagactagaggggaaactatcacctaaaatcagtttggaaaacaagacctaaaaagggaaggggatggggattgtggggagagagtgggcgaggtgcctttactacatgtgtgatctgaaaaccctgcttggttctgagctgcgtctattgaattggtaaagtaataccaatggctttttatcatttccttcttccctttaagtttcacttgaaattttaaaaatcatggttatttttatcgttgggatctttctgtcttctgggttccattttttaaatgtttaaaaatatgttgacatggtagttcagttcttaaccaatgacttggggatgatgcaaacaattactgtcgttgggatttagagtgtattagtcacgcatgtatggggaagtagtctcgggtatgctgttgtgaaattgaaactgtaaaagtagatggttgaaagtactggtatgttgctctgtatggtaagaactaattctgttacgtcatgtacataattactaatcacttttcttcccctttacagcacaaataaagtttgagttctaaaactcaaaaatctaactatatacaccttctctctattatttttcattattatcatcgttcttcttttttttattttttgttataaaaataaaaaccttaaggggggccccattcccaaatttcccctttaatagacccttttcaattttattgaccttctttttacaacctcttaattggaaaaaccctagtttcccccacttttaattcctttaaaacaaaccccttttttccaatttgcctaattctcaaatagtcccaacgcaatctccttttcca

SEQ ID NO: 467100 - DNA, 11152 bp, Homo sapiens
  misc_feature (90)..(90): n is a, c, g, or t
  misc_feature (152)..(152): n is a, c, g, or t
cagtgagcaacgtgggcttgtgagagtgggggggcctctcacaagaagtgtaggcatgcattgtgtcagataaggttgggaggagactgngacaagatcaagggcagggggcaggggcaggaggctggtagtgctgtggcccagatattggncagaagtacagggaggatctcctcagggcttcaggggacagacagggagagatgactgagttagatgagactagggggcgggctgggggtgcgagaaggaagcttggcaaggagactaggtctagggggaccacagtggggcaggctgcatggaaaatatccgcagggtcccccaggcagaacagccacgctccaggccaggctgtccctactgcctggtggagggggaacttgacctctgggagggcgccgctcttgcatagctgagcgagcccgggtgcgctggtctgtgtggaaggaggaaggcagggagaggtagaaggggtggaggagtcaggaggaataggccgcagcagccctggaaatgatcaggaaggcaggcagtgggtgcagggctgcaggagggccgggagggctaatcttcaacttgtccatgccagcagcccctttttttccagaccaagggctgtgaacccgcctggggatgaggcctggtcttgtggaactgaacttagctcgacggggctgaccgctctggcccagggtggtatgtaattttcgctcggcctgggacggggcccaggccgggcccagcctggtggagcgtccaggtctgggtgcgaagccaggcccctgggcggaggtgaggggtggtctgaggagtgatgtggagttaaggcgccatcctcaccggtgactggtgcggcacctagcatgtttgacaggcggggactgcgaggcacgctgctcgggtgttggggacaacattgaccaacgctttattttccaggtggcagtgctccttttggacttttctctaggtttggcgctaaactcttcttgtgagctcactccaccccttcttcctccctttaacttatccattcacttaaaacattagctggtcatctggtaagcccgggacagtaagccgagtggctgttggagtcggtattgttggtaatggtggaggaagagaggccttcccgctgaggctggggtggggcggatcggtgttgcttgcctgcagagagggtggggagtgaatgtgcacccttgggtgggcctgcagccatccagctgaaagttacaaaaatgcttcatggaccgtggtttgttactatagtgttcctcatggcgagcagatggaaccgggagacatggagtccctggccagtgtgagtcctagcattgcaggaggggagaccctggaggagagagcccgcctcaattgatgcctgcagattgaatttccagaggcttaggaggaggaagttctccaatgttctgtttccaggccttgctcaggaagccctgtattcaggaggctaccatttaaagtttgcagatgagcttatggggggcaatcttaaaaagtccacagcagatgcatccggctcgaggggccatcagctttgaataaatgcttgttccagagcccatgaatgccagcaggcacccctcctttcctggggtaaaggttttcagatgctgcatcttctaaattgagcctccggtcatactagttttgtgcttggaaccttgcttcaagaagatccctaagctgtagaacattttaacgttgatgccacaacgcagattgatgccttgtagatggagcttgcagatggagccccgtgacctctcacctacccacctgtttgcctgccttcttgtgcgtttctcggagaagttcttagcctgatgaaataacttggggcgttgaagagctgtttaattttaaatgccttagactggggatatattagaggaagcagattgtcaaattaagggtgtcattgtgttgtgctaaacgctgggagggtacaagttggtcattcctaaatctgtgtgtgagaaatggcaggtctagtttgggcattgtgattgcattgcagattactaggagaagggaatggtgggtacaccggtagtgctcttttgttcttgcttcgtttttttaaacttgaactttacttcgttagatttcataatactttcttggcattctagtaagaggaccctgaggtgggagttgtgggggacggggagaaggggacagcttggcaccggtcccgtgggcgttgcagtgtgggggatgggggtatgcagcttggcactggtactgggagggatgagggtgaagaaggggagagggttggttagagatacagtgtgggtggtgggggtggtaggaaatgcaggttgaagggaattctctggggctttggggaatttagtgcgtgggtgagccaagaaaatactaattaataatagtaagttgttagtgttggttaagttgttgcttggaagtgagaagttgcttagaaactttccaaagtgcttagaactttaagtgcaaacagacaaactaacaaacaaaaattgttttgctttgctacaaggtggggaagactgaagaagtgttaactgaaaacaggtgacacagagtcaccagttttccgagaaccaaagggaggggtgtgtgatgccatctcacaggcaggggaaatgtctttaccagcttcctcctggtggccaagacagcctgtttcagagggttgttttgtttggggtgtgggtgttatcaagtgaattagtcacttgaaagatgggcgtcagacttgcatacgcagcagatcagcatccttcgctgccccttagcaacttaggtggttgatttgaaactgtgaaggtgtgattttttcaggagctggaagtcttagaaaagccttgtaaatgcctatattgtgggcttttaacgtatttaagggaccacttaagacgagattagatgggctcttctggatttgttcctcatttgtcacaggtgtcttgtgattgaaaatcatgagcgaagtgaaattgcattgaatttcaagggaatttagtatgtaaatcgtgccttagaaacacatctgttgtcttttctgtgtttggtcgatattaataatggcaaaatttttgcctatctagtatcttcaaattgtagtctttgtaacaaccaaataaccttttgtggtcactgtaaaattaatatttggtagacagaatccatgtacctttgctaaggttagaatgaataatttattgtatttttaatttgaatgtttgtgctttttaaatgagccaagactagaggggaaactatcacctaaaatcagtttggaaaacaagacctaaaaagggaaggggatggggattgtggggagagagtgggcgaggtgcctttactacatgtgtgatctgaaaaccctgcttggttctgagctgcgtctattgaattggtaaagtaataccaatggctttttatcatttccttcttccctttaagtttcacttgaaattttaaaaatcatggtttaaatgtttaaaaatatgttgacatggtagttcagttcttaaccaatgacttggggatgatgcaaacaattactgtcgttgggatttagagtgtattagtcacgcatgtatggggaagtagtctcgggtatgctgttgtgaaattgaaactgtaaaagtagatggttgaaagtactggtatgttgctctgtatggtaagaactaattctgttacgtcatgtacataattactaatcacttttcttcccctttacagcacaaataaagtttgagttctaaaactcattagaattgttgtattgctatgttacatttctcgacccctatcacattgccttcataacgactttggatgtatcttcatattgtagatttaggtctagatttgctagctccaagtaattaaggccatgtaggagagcatggtaaccacagatagaactggtattatcccaagtggtctgcagactgctgagtggggatgggatctgctctctgttgagagttggtaatcattggtttgaaatgtgatgaaaccactcaagccaatgaaggtgggtgtgtaggtggggagtactttgccataatattttaaaacattacctggttagagttctaagtggtacttatttttgtttggttaggggaaagcctgaataaaaacagaaatggacacataatatgcatattccatagtctttgggaggctggaatgtgcctgggatttgggtctaagtgtatgcgtaattcttacctcactaaagaatttgccttgtttttttccttttggtgagtgactaaaacgtctgggcttccctgtgtgcgtgctacagtaagcaagcagaggctgtgcaaaggtgtgagcaggatcacgtggaatctggaggatacatcttggcttgcaaactgcctctgtctcctgggtgggactgttctgtccttgcactgctgttctgtgttacctcttggggtgtaaggttttgcttacaggagacaaactttgggcgtagaatggaagccactgccagcctctgtgctgagaaggaaggtgcttgtttcaaagggagcagcaagggaggcttgttctactcacctgggcctgtttgcctgagaaggggagataagggctgaactgggactagccagggggaccaacacaaatggtgggggatcatgacctgaaggattctttccttcccatgagctgcagggctggttgccgtccttgcaactgtgtcttatttgcctgtgccgttatatcttggtgacccctccacgtgtacactactgacaaacgggtggagtgctggggagaagtcactgtgccgcccacctagtaaaccttctgtctgtgctcatggcatctccaagatggggcactgctgtgtgcagaatccagggtcctctttctgcttgcaactcctttccctggatgccccagaaacaatccaggcctcctttcctatcttacccctttgctttgctttttaccccagcacctctataaccgccttctcttcttttcagaactccttgtttctcatcctgttttttatgattacaaaactcttgcttccaccctggaagataactgctatagatgcctgtatgtaaatggtgctgtctccagcaactggcatgctgaagaagaattgattcacggggtataaatgttggggattggaagtggggatgaaatggcacttgttgatacaggagcagagaggtgaggccgactgctgaagacagctcgccaccctccttgcctccactccaatccaggggctggggccacattctttgccttcatttatcctcagatcaggtgagatcgacaggaggtgttgatggcagtgccagcaattattgctaatccgtttgcatccttatgcatagatctgaattcagactttgtgaatttccagaggtgtgggtaatataatagaattcagtgagtgggcatggctgatcttgtgcaaattaaaagttatggggcataagaatagcaaaagttgaacttcttttaaaaaggaaagtaccctgagagccagtattggttgaggctcttcagtatgcccaggttggcagcactgagaaccgcaggaacggcctgttgttacaaaaaggagattgactcagctgcccttggtgcatctgactgactatgactgctgagagattccaaggacccttaatgccagggctaacctctccatgtgcagtgagacctctggaggaagtgtcatcctctggctttgtgtggtactcattatggtgcagtgcgggcatgaaatgaagacacccaaataggcttacagatacgatatgttttaaatgttcgtatttaacaaaaacatactgacactgtttggaaatggcaacaggaagatagcaaaatgaatactaacattacgaaaagatgaacaggtacatgttccaaggcaggtggctgtgaacttcctctgagtgaaggcatcccctccagcacctttcagcctgctagttaggacgacccgccgccaccctccaggacctccagccctgcactgcctttcctctcttttaaataattcttcattgagttctaatatgtaaaaaaaaaaagtttactgtaaagtttgcaaataaggaaattttttttaaaagtcctcagtaatcttaccagtaacaattgttatgggcacatttgcttttggaagatttcttttgtatgcatgggataagtacatttttaaacaaaaatgggattatgccataaattctattttgtgactttaatatatagtgaacaccttttttaatgatgacaggatgttcccttgcatggctgtatcaatttaaacaatcttgtttcaatgggcatacagggtattttctagtttttttttcctcttagaaaataatacttgcgatgactttccttgtagctcagactttttcacgtctgttgttatctctttgggaatgctgaatacatacatttcgagaaggaaatgactgttaaactcttaagacttcaggttcatattgctaaactgcccagcagggagggattttttcaattagtgttctcactggtgaggcaaacctgatgccttcccctcttcctcagaaccggctttatcacattgaaaacctttgctcctccgacggatcgagtctgctttccctgtggatgtgagcattgctttgtctgctggtgactgaacatctctaccatgtgtcaattggccatttgtggtgtgtgtgtgtgtgcgtgtgtgtgtgtgtgtgtgtgtgtatgattttctaattcctagtcatttttctattgattgttttgcaaaagccatttacatcttaaggatattgataatcttttgttatatttgatgcaaatatttttttccagtttataggttgccttttaattttgtgtttcaggtagataaaagttaaacgattttcttaggttagtttatcactgtggtttctgaacttgttatgtgtagatcttttccaccccaagagtacataaatattaatccatactttcttatggaacttgtatggtttcgttttttacatttaaaccttcttccccgtggtgtgtgttgtggaatctgtgtttgtgtgaggaggggcatggtgctctcagaacccacctcctgtggccagagagccctgtcctgtgagggtggttatcacagtggcagggttcaattcagaagaccttgagggcaggctgatgtttcctgaatgggcccctggttgttgcttgtccctgactctccatttccccatctgagtggatttggacctaatagggcactggagctggttcgaatcctgactggactacttggcaactttatgtctgggagcaagttacttaacctccccaagcctgtgtctgtgaaatgcgggtaaatgaatgtagatgtttggcagcagctactccttgttgagctctcacagtgaactctcctgcctctgccctccttccccgcctcccctggtgcctagcgtcaggtctagccacttcctcctgggcccctctcccttttctgtggctggctgcctgcccgcctggcgctggacctttcatgtaacgggaatcagcatgtatattctggtctggtctgtttctacacttaattttgtttccagtagtatttccctgtaccggcagagttcacaaacacatttgaagaggctttttctcaggattcttaaccttcccaaaggaagtcccatggatgggtttctagaagtctataaatgctctgaaattgtatttttctgtggaaagcataactttcatctgcttgttcgtgctcaaaaaagatcatgaatgaatgattgcatgattttatgccattgtgcttatactaaaggatatgtagcccatctcttgagctgttaaactgttttgactactttaaatcgtgcagctgtgagcatctctgtaaatttagtgtacacatgtatcccctggagtggcattgcctcggcagtgagcacttatggttttataactctcttcacagactcaaatgactccagaaagctacacttcctgttgtgagtatatgatatccatttccctacatagccactaacatcaggtttttacaattttatttatttcttgctactttaagaaatttttgtggtgaaatacatataatagaagttgactatctgaatcatttttaagtatacattcagtagtgttaagtatgtcgccattgttgtacaaccaatctccagaactttttcatcttgcaaaacaaactctgtacccattaaataacattaaacattccattccctccagcctcagcaaccccattctactttctgtttctgtgagtttgactattccaagcacttcatatcagttaaatcatgaagtatttgtctgtctgtgactggcttatttctctgagcacagtgtcctcgagatgcgtctatgttgtagcatatgtcagaatttccttcctttttaaaagatccaaataatattcttattttatatcttttttttatccattcatccattagtggacacttgggttgcttttggctattgtaaataatggtgctatgtacaaatatctatattattgtatttacaagtataatgctgtaatgtacacacatctttttgagatcctaccttcagttcttttgagtatatagccagaagtggtattactaaatcttacgatatttctatttttaatttattgaggaaccactgtagtttttcatagcaactgcaccattttacgttctcaccaagagtgcacaagggttccgaggttcccacatcctccccaacacttgttattttctgctttttttagattgcagccatcatagtgggtgtgaggtgacatttcattgtggttttgatttgcatttccctaatgaggagtgatgctgagcatcttttcatatgcttactggtcatttgtatgttgtctttggaaaaatgtctattcaagtcctttgactattttaaaaattgggttattagagttatcgttgttgttgacttgtaggagtttctttctatattctggatattaatcccctatcagatatatgatttgcaaatatcttctcttattccataaggttactttttcactttgttgattgtgttctttgatgtatagaagtttttagttttgaaatagtctaatttatctgtttttacttttgtggtctgtgcttttggtgtcatatccaagaaatccttgccaaatccaacgttataaggtacttttaaggtattttagttgtcttagtctatatttctgtactcacctttctttatccactcatcagttgatgggcatgtaggttggttccatatctttgcaattctgaattgtgctgtgatcaggtgtctttttagtataatgatttactctcctttgggtagatacccagtagtgggattgctggatcgaatggtttttataattttctattttaccacagtttctctctgcatttttcctctttgaccactaaccatgtgaaattctcatattgacctttataatgatcatgaactcttagtatcattgggaaggccacatttgccacttatgattgtaaaccttatcctccatttttcctgttattgttggtgcaaaaagcacctattataccaggactttaaaaatcagtctgataagtctttgataagtctaataataataactgataagtccattgaatttgcttctgattactttttctttagtagctaaacatgtatgtactcctatgattacaatgaacactcctctccatttaaattaattatttacattgatgaaatagcaaaatgttaatgactaaatactgtcttggttttttcgttccaggtcagtcaatattaacttcttataattttcttttttttctttatgtgtgtgtgtgtgtgtatttttttttttttaatttcaatggcttttggggtacaaatggcttttggtcatatagatgaattctacagtagtgaagtctgagattttactgcaccggtcacctgagtagtgtacattgtacccaatatgtggttttttataccttgcccccctcttaccctccccactttgagtctctagtgtccattatgtcactctgtatacctttttgtacccataagttagctctcacttataagtgagaacacacagtatttggttttccattcctgagttgcttcacttagaataatatcctccagctccatccaaaattgctgcaaaaaaaaaaaaaaccacaaacattattttgttcttttttattgctaagtcatattccatggtgtagagataccacattttatttatccactcactggttgatgggttggttccacatctttgcaattgtgacttgtactgccatcaagtgtctttctggtataatgacttcttttcctttgggtagatacccaggagtgggattgctagatcaaatggttcttaacattttctctctggatctatttctggaaattttaggctccagtttttgttgttgttgttaataaaatgcaatggaatgtaatgatcatcacttttcattatgctttaaaatctggtaaatggaggctagaacactcctgtaaggcaagaatattctctctgttggaactcaaatacacagaactgggtaaatctcaatcttaatctttgattcaggacacaacatggctctcttttacttgctttctttaattgttttttaataatgtggtaagcatttctgaatctcctatccaatacaaaaactaggacaatacagacagtaactcctatggttacaatgaacactcctctccacttaaattaattatttacactgatgaaattgaaatagcaaaattttaatgactaaatactgtctttgattttttgttccaggtctgtcaatattaacttcttataattttctttttttttctttatgtgtgtgtgtgtgtgtatatatatatatatttaatttcaatggcttttggggtacaaatggcttttggtcatatatatgagttctacagtagtgaagtctgagattttactacaccttccacttatgtggtcccacaccacccgcctcccctgccgcct

SEQ ID NO: 467101 - DNA, 3941 bp, Homo sapiens
  misc_feature (90)..(90): n is a, c, g, or t
  misc_feature (152)..(152): n is a, c, g, or t
cagtgagcaacgtgggcttgtgagagtgggggggcctctcacaagaagtgtaggcatgcattgtgtcagataaggttgggaggagactgngacaagatcaagggcagggggcaggggcaggaggctggtagtgctgtggcccagatattggncagaagtacagggaggatctcctcagggcttcaggggacagacagggagagatgactgagttagatgagactagggggcgggctgggggtgcgagaaggaagcttggcaaggagactaggtctagggggaccacagtggggcaggctgcatggaaaatatccgcagggtcccccaggcagaacagccacgctccaggccaggctgtccctactgcctggtggagggggaacttgacctctgggagggcgccgctcttgcatagctgagcgagcccgggtgcgctggtctgtgtggaaggaggaaggcagggagaggtagaaggggtggaggagtcaggaggaataggccgcagcagccctggaaatgatcaggaaggcaggcagtgggtgcagggctgcaggagggccgggagggctaatcttcaacttgtccatgccagcagcccctttttttccagaccaagggctgtgaacccgcctggggatgaggcctggtcttgtggaactgaacttagctcgacggggctgaccgctctggcccagggtggtatgtaattttcgctcggcctgggacggggcccaggccgggcccagcctggtggagcgtccaggtctgggtgcgaagccaggcccctgggcggaggtgaggggtggtctgaggagtgatgtggagttaaggcgccatcctcaccggtgactggtgcggcacctagcatgtttgacaggcggggactgcgaggcacgctgctcgggtgttggggacaacattgaccaacgctttattttccaggtggcagtgctccttttggacttttctctaggtttggcgctaaactcttcttgtgagctcactccaccccttcttcctccctttaacttatccattcacttaaaacattagctggtcatctggtaagcccgggacagtaagccgagtggctgttggagtcggtattgttggtaatggtggaggaagagaggccttcccgctgaggctggggtggggcggatcggtgttgcttgcctgcagagagggtggggagtgaatgtgcacccttgggtgggcctgcagccatccagctgaaagttacaaaaatgcttcatggaccgtggtttgttactatagtgttcctcatggcgagcagatggaaccgggagacatggagtccctggccagtgtgagtcctagcattgcaggaggggagaccctggaggagagagcccgcctcaattgatgcctgcagattgaatttccagaggcttaggaggaggaagttctccaatgttctgtttccaggccttgctcaggaagccctgtattcaggaggctaccatttaaagtttgcagatgagcttatggggggcaatcttaaaaagtccacagcagatgcatccggctcgaggggccatcagctttgaataaatgcttgttccagagcccatgaatgccagcaggcacccctcctttcctggggtaaaggttttcagatgctgcatcttctaaattgagcctccggtcatactagttttgtgcttggaaccttgcttcaagaagatccctaagctgtagaacattttaacgttgatgccacaacgcagattgatgccttgtagatggagcttgcagatggagccccgtgacctctcacctacccacctgtttgcctgccttcttgtgcgtttctcggagaagttcttagcctgatgaaataacttggggcgttgaagagctgtttaattttaaatgccttagactggggatatattagaggaagcagattgtcaaattaagggtgtcattgtgttgtgctaaacgctgggagggtacaagttggtcattcctaaatctgtgtgtgagaaatggcaggtctagtttgggcattgtgattgcattgcagattactaggagaagggaatggtgggtacaccggtagtgctcttttgttcttgcttcgtttttttaaacttgaactttacttcgttagatttcataatactttcttggcattctagtaagaggaccctgaggtgggagttgtgggggacggggagaaggggacagcttggcaccggtcccgtgggcgttgcagtgtgggggatgggggtatgcagcttggcactggtactgggagggatgagggtgaagaaggggagagggttggttagagatacagtgtgggtggtgggggtggtaggaaatgcaggttgaagggaattctctggggctttggggaatttagtgcgtgggtgagccaagaaaatactaattaataatagtaagttgttagtgttggttaagttgttgcttggaagtgagaagttgcttagaaactttccaaagtgcttagaactttaagtgcaaacagacaaactaacaaacaaaaattgttttgctttgctacaaggtggggaagactgaagaagtgttaactgaaaacaggtgacacagagtcaccagttttccgagaaccaaagggaggggtgtgtgatgccatctcacaggcaggggaaatgtctttaccagcttcctcctggtggccaagacagcctgtttcagagggttgttttgtttggggtgtgggtgttatcaagtgaattagtcacttgaaagatgggcgtcagacttgcatacgcagcagatcagcatccttcgctgccccttagcaacttaggtggttgatttgaaactgtgaaggtgtgattttttcaggagctggaagtcttagaaaagccttgtaaatgcctatattgtgggcttttaacgtatttaagggaccacttaagacgagattagatgggctcttctggatttgttcctcatttgtcacaggtgtcttgtgattgaaaatcatgagcgaagtgaaattgcattgaatttcaagggaatttagtatgtaaatcgtgccttagaaacacatctgttgtcttttctgtgtttggtcgatattaataatggcaaaatttttgcctatctagtatcttcaaattgtagtctttgtaacaaccaaataaccttttgtggtcactgtaaaattaatatttggtagacagaatccatgtacctttgctaaggttagaatgaataatttattgtatttttaatttgaatgtttgtgctttttaaatgagccaagactagaggggaaactatcacctaaaatcagtttggaaaacaagacctaaaaagggaaggggatggggattgtggggagagagtgggcgaggtgcctttactacatgtgtgatctgaaaaccctgcttggttctgagctgcgtctattgaattggtaaagtaataccaatggctttttatcatttccttcttccctttaagtttcacttgaaattttaaaaatcatggttatttttatcgttgggatctttctgtcttctgggttccattttttaaatgtttaaaaatatgttgacatggtagttcagttcttaaccaatgacttggggatgatgcaaacaattactgtcgttgggatttagagtgtattagtcacgcatgtatggggaagtagtctcgggtatgctgttgtgaaattgaaactgtaaaagtagatggttgaaagtactggtatgttgctctgtatggtaagaactaattctgttacgtcatgtacataattactaatcacttttcttcccctttacagcacaaataaagtttgagttctaaaactcaaaaaaaaaaccacaaccacatccagctctcctttccgcctgcccggcgtctcgtcccctctctctacagctcttatttcgtttcatatcccccacctt

SEQ ID NO: 467102 - DNA, 4285 bp, Homo sapiens
  misc_feature (90)..(90): n is a, c, g, or t
  misc_feature (152)..(152): n is a, c, g, or t
cagtgagcaacgtgggcttgtgagagtgggggggcctctcacaagaagtgtaggcatgcattgtgtcagataaggttgggaggagactgngacaagatcaagggcagggggcaggggcaggaggctggtagtgctgtggcccagatattggncagaagtacagggaggatctcctcagggcttcaggggacagacagggagagatgactgagttagatgagactagggggcgggctgggggtgcgagaaggaagcttggcaaggagactaggtctagggggaccacagtggggcaggctgcatggaaaatatccgcagggtcccccaggcagaacagccacgctccaggccaggctgtccctactgcctggtggagggggaacttgacctctgggagggcgccgctcttgcatagctgagcgagcccgggtgcgctggtctgtgtggaaggaggaaggcagggagaggtagaaggggtggaggagtcaggaggaataggccgcagcagccctggaaatgatcaggaaggcaggcagtgggtgcagggctgcaggagggccgggagggctaatcttcaacttgtccatgccagcagcccctttttttccagaccaagggctgtgaacccgcctggggatgaggcctggtcttgtggaactgaacttagctcgacggggctgaccgctctggcccagggtggtatgtaattttcgctcggcctgggacggggcccaggccgggcccagcctggtggagcgtccaggtctgggtgcgaagccaggcccctgggcggaggtgaggggtggtctgaggagtgatgtggagttaaggcgccatcctcaccggtgactggtgcggcacctagcatgtttgacaggcggggactgcgaggcacgctgctcgggtgttggggacaacattgaccaacgctttattttccaggtggcagtgctccttttggacttttctctaggtttggcgctaaactcttcttgtgagctcactccaccccttcttcctccctttaacttatccattcacttaaaacattagctggtcatctggtaagcccgggacagtaagccgagtggctgttggagtcggtattgttggtaatggtggaggaagagaggccttcccgctgaggctggggtggggcggatcggtgttgcttgcctgcagagagggtggggagtgaatgtgcacccttgggtgggcctgcagccatccagctgaaagttacaaaaatgcttcatggaccgtggtttgttactatagtgttcctcatggcgagcagatggaaccgggagacatggagtccctggccagtgtgagtcctagcattgcaggaggggagaccctggaggagagagcccgcctcaattgatgcctgcagattgaatttccagaggcttaggaggaggaagttctccaatgttctgtttccaggccttgctcaggaagccctgtattcaggaggctaccatttaaagtttgcagatgagcttatggggggcaatcttaaaaagtccacagcagatgcatccggctcgaggggccatcagctttgaataaatgcttgttccagagcccatgaatgccagcaggcacccctcctttcctggggtaaaggttttcagatgctgcatcttctaaattgagcctccggtcatactagttttgtgcttggaaccttgcttcaagaagatccctaagctgtagaacattttaacgttgatgccacaacgcagattgatgccttgtagatggagcttgcagatggagccccgtgacctctcacctacccacctgtttgcctgccttcttgtgcgtttctcggagaagttcttagcctgatgaaataacttggggcgttgaagagctgtttaattttaaatgccttagactggggatatattagaggaagcagattgtcaaattaagggtgtcattgtgttgtgctaaacgctgggagggtacaagttggtcattcctaaatctgtgtgtgagaaatggcaggtctagtttgggcattgtgattgcattgcagattactaggagaagggaatggtgggtacaccggtagtgctcttttgttcttgcttcgtttttttaaacttgaactttacttcgttagatttcataatactttcttggcattctagtaagaggaccctgaggtgggagttgtgggggacggggagaaggggacagcttggcaccggtcccgtgggcgttgcagtgtgggggatgggggtatgcagcttggcactggtactgggagggatgagggtgaagaaggggagagggttggttagagatacagtgtgggtggtgggggtggtaggaaatgcaggttgaagggaattctctggggctttggggaatttagtgcgtgggtgagccaagaaaatactaattaataatagtaagttgttagtgttggttaagttgttgcttggaagtgagaagttgcttagaaactttccaaagtgcttagaactttaagtgcaaacagacaaactaacaaacaaaaattgttttgctttgctacaaggtggggaagactgaagaagtgttaactgaaaacaggtgacacagagtcaccagttttccgagaaccaaagggaggggtgtgtgatgccatctcacaggcaggggaaatgtctttaccagcttcctcctggtggccaagacagcctgtttcagagggttgttttgtttggggtgtgggtgttatcaagtgaattagtcacttgaaagatgggcgtcagacttgcatacgcagcagatcagcatccttcgctgccccttagcaacttaggtggttgatttgaaactgtgaaggtgtgattttttcaggagctggaagtcttagaaaagccttgtaaatgcctatattgtgggcttttaacgtatttaagggaccacttaagacgagattagatgggctcttctggatttgttcctcatttgtcacaggtgtcttgtgattgaaaatcatgagcgaagtgaaattgcattgaatttcaagggaatttagtatgtaaatcgtgccttagaaacacatctgttgtcttttctgtgtttggtcgatattaataatggcaaaatttttgcctatctagtatcttcaaattgtagtctttgtaacaaccaaataaccttttgtggtcactgtaaaattaatatttggtagacagaatccatgtacctttgctaaggttagaatgaataatttattgtatttttaatttgaatgtttgtgctttttaaatgagccaagactagaggggaaactatcacctaaaatcagtttggaaaacaagacctaaaaagggaaggggatggggattgtggggagagagtgggcgaggtgcctttactacatgtgtgatctgaaaaccctgcttggttctgagctgcgtctattgaattggtaaagtaataccaatggctttttatcatttccttcttccctttaagtttcacttgaaattttaaaaatcatggttatttttatcgttgggatctttctgtcttctgggttccattttttaaatgtttaaaaatatgttgacatggtagttcagttcttaaccaatgacttggggatgatgcaaacaattactgtcgttgggatttagagtgtattagtcacgcatgtatggggaagtagtctcgggtatgctgttgtgaaattgaaactgtaaaagtagatggttgaaagtactggtatgttgctctgtatggtaagaactaattctgttacgtcatgtacataattactaatcacttttcttcccctttacagcacaaataaagtttgagttctaaaactcaaaaaaaaaaaaaaaaaaaaaaaaaaaaaaaaaaaaaaaaaaaaaaaaaaaacaaaaaaaacaaaaaaaaaaaaaaaaaaaaaaaaaaaaaaaaaaaaacaaaaaaaaaaaaggtgggggggggggggggcccagaaaaaacgcttcaaaacaccattgcgggaggggccggggggcccaaggaagggaaagagaaaacgcggcgcaaaggggtggcccacaggaaagacactgcgggggaaaaagaaatgagggggggaggatatcctcacacaatataaaacagaagccgcgcgggggggaggaacaaagcacgagagccggcttagagaaaacactccgcaaagaggggagcttcagaggagcggacaacaggggggagactacaaccaaaggaggggacgacacaaggacagacgaccagagaattaagaaatgaccgg

SEQ ID NO: 467103 - DNA, 4238 bp, Homo sapiens
  misc_feature (90)..(90): n is a, c, g, or t
  misc_feature (152)..(152): n is a, c, g, or t
cagtgagcaacgtgggcttgtgagagtgggggggcctctcacaagaagtgtaggcatgcattgtgtcagataaggttgggaggagactgngacaagatcaagggcagggggcaggggcaggaggctggtagtgctgtggcccagatattggncagaagtacagggaggatctcctcagggcttcaggggacagacagggagagatgactgagttagatgagactagggggcgggctgggggtgcgagaaggaagcttggcaaggagactaggtctagggggaccacagtggggcaggctgcatggaaaatatccgcagggtcccccaggcagaacagccacgctccaggccaggctgtccctactgcctggtggagggggaacttgacctctgggagggcgccgctcttgcatagctgagcgagcccgggtgcgctggtctgtgtggaaggaggaaggcagggagaggtagaaggggtggaggagtcaggaggaataggccgcagcagccctggaaatgatcaggaaggcaggcagtgggtgcagggctgcaggagggccgggagggctaatcttcaacttgtccatgccagcagcccctttttttccagaccaagggctgtgaacccgcctggggatgaggcctggtcttgtggaactgaacttagctcgacggggctgaccgctctggcccagggtggtatgtaattttcgctcggcctgggacggggcccaggccgggcccagcctggtggagcgtccaggtctgggtgcgaagccaggcccctgggcggaggtgaggggtggtctgaggagtgatgtggagttaaggcgccatcctcaccggtgactggtgcggcacctagcatgtttgacaggcggggactgcgaggcacgctgctcgggtgttggggacaacattgaccaacgctttattttccaggtggcagtgctccttttggacttttctctaggtttggcgctaaactcttcttgtgagctcactccaccccttcttcctccctttaacttatccattcacttaaaacattagctggtcatctggtaagcccgggacagtaagccgagtggctgttggagtcggtattgttggtaatggtggaggaagagaggccttcccgctgaggctggggtggggcggatcggtgttgcttgcctgcagagagggtggggagtgaatgtgcacccttgggtgggcctgcagccatccagctgaaagttacaaaaatgcttcatggaccgtggtttgttactatagtgttcctcatggcgagcagatggaaccgggagacatggagtccctggccagtgtgagtcctagcattgcaggaggggagaccctggaggagagagcccgcctcaattgatgcctgcagattgaatttccagaggcttaggaggaggaagttctccaatgttctgtttccaggccttgctcaggaagccctgtattcaggaggctaccatttaaagtttgcagatgagcttatggggggcaatcttaaaaagtccacagcagatgcatccggctcgaggggccatcagctttgaataaatgcttgttccagagcccatgaatgccagcaggcacccctcctttcctggggtaaaggttttcagatgctgcatcttctaaattgagcctccggtcatactagttttgtgcttggaaccttgcttcaagaagatccctaagctgtagaacattttaacgttgatgccacaacgcagattgatgccttgtagatggagcttgcagatggagccccgtgacctctcacctacccacctgtttgcctgccttcttgtgcgtttctcggagaagttcttagcctgatgaaataacttggggcgttgaagagctgtttaattttaaatgccttagactggggatatattagaggaagcagattgtcaaattaagggtgtcattgtgttgtgctaaacgctgggagggtacaagttggtcattcctaaatctgtgtgtgagaaatggcaggtctagtttgggcattgtgattgcattgcagattactaggagaagggaatggtgggtacaccggtagtgctcttttgttcttgcttcgtttttttaaacttgaactttacttcgttagatttcataatactttcttggcattctagtaagaggaccctgaggtgggagttgtgggggacggggagaaggggacagcttggcaccggtcccgtgggcgttgcagtgtgggggatgggggtatgcagcttggcactggtactgggagggatgagggtgaagaaggggagagggttggttagagatacagtgtgggtggtgggggtggtaggaaatgcaggttgaagggaattctctggggctttggggaatttagtgcgtgggtgagccaagaaaatactaattaataatagtaagttgttagtgttggttaagttgttgcttggaagtgagaagttgcttagaaactttccaaagtgcttagaactttaagtgcaaacagacaaactaacaaacaaaaattgttttgctttgctacaaggtggggaagactgaagaagtgttaactgaaaacaggtgacacagagtcaccagttttccgagaaccaaagggaggggtgtgtgatgccatctcacaggcaggggaaatgtctttaccagcttcctcctggtggccaagacagcctgtttcagagggttgttttgtttggggtgtgggtgttatcaagtgaattagtcacttgaaagatgggcgtcagacttgcatacgcagcagatcagcatccttcgctgccccttagcaacttaggtggttgatttgaaactgtgaaggtgtgattttttcaggagctggaagtcttagaaaagccttgtaaatgcctatattgtgggcttttaacgtatttaagggaccacttaagacgagattagatgggctcttctggatttgttcctcatttgtcacaggtgtcttgtgattgaaaatcatgagcgaagtgaaattgcattgaatttcaagggaatttagtatgtaaatcgtgccttagaaacacatctgttgtcttttctgtgtttggtcgatattaataatggcaaaatttttgcctatctagtatcttcaaattgtagtctttgtaacaaccaaataaccttttgtggtcactgtaaaattaatatttggtagacagaatccatgtacctttgctaaggttagaatgaataatttattgtatttttaatttgaatgtttgtgctttttaaatgagccaagactagaggggaaactatcacctaaaatcagtttggaaaacaagacctaaaaagggaaggggatggggattgtggggagagagtgggcgaggtgcctttactacatgtgtgatctgaaaaccctgcttggttctgagctgcgtctattgaattggtaaagtaataccaatggctttttatcatttccttcttccctttaagtttcacttgaaattttaaaaatcatggttatttttatcgttgggatctttctgtcttctgggttccattttttaaatgtttaaaaatatgttgacatggtagttcagttcttaaccaatgacttggggatgatgcaaacaattactgtcgttgggatttagagtgtattagtcacgcatgtatggggaagtagtctcgggtatgctgttgtgaaattgaaactgtaaaagtagatggttgaaagtactggtatgttgctctgtatggtaagaactaattctgttacgtcatgtacataattactaatcacttttcttcccctttacagcacaaataaagtttgagttctaaaactcaaaaaaaaaaaaaaaaaaaaaaaaaaaaaaaaaaaaaaaaaaaaaaaaaaaacaaaaaaaaaaaaggtgggggggggggggggcccagaaaaaacgcttcaaaacaccattgcgggaggggccggggggcccaaggaagggaaagagaaaacgcggcgcaaaggggtggcccacaggaaagacactgcgggggaaaaagaaatgagggggggaggatatcctcacacaatataaaacagaagccgcgcgggggggaggaacaaagcacgagagccggcttagagaaaacactccgcaaagaggggagcttcagaggagcggacaacaggggggagactacaaccaaaggaggggacgacacaaggacagacgaccagagaattaagaaatgaccgg

SEQ ID NO: 467104 - DNA, 11137 bp, Homo sapiens
  misc_feature (90)..(90): n is a, c, g, or t
  misc_feature (152)..(152): n is a, c, g, or t
cagtgagcaacgtgggcttgtgagagtgggggggcctctcacaagaagtgtaggcatgcattgtgtcagataaggttgggaggagactgngacaagatcaagggcagggggcaggggcaggaggctggtagtgctgtggcccagatattggncagaagtacagggaggatctcctcagggcttcaggggacagacagggagagatgactgagttagatgagactagggggcgggctgggggtgcgagaaggaagcttggcaaggagactaggtctagggggaccacagtggggcaggctgcatggaaaatatccgcagggtcccccaggcagaacagccacgctccaggccaggctgtccctactgcctggtggagggggaacttgacctctgggagggcgccgctcttgcatagctgagcgagcccgggtgcgctggtctgtgtggaaggaggaaggcagggagaggtagaaggggtggaggagtcaggaggaataggccgcagcagccctggaaatgatcaggaaggcaggcagtgggtgcagggctgcaggagggccgggagggctaatcttcaacttgtccatgccagcagcccctttttttccagaccaagggctgtgaacccgcctggggatgaggcctggtcttgtggaactgaacttagctcgacggggctgaccgctctggcccagggtggtatgtaattttcgctcggcctgggacggggcccaggccgggcccagcctggtggagcgtccaggtctgggtgcgaagccaggcccctgggcggaggtgaggggtggtctgaggagtgatgtggagttaaggcgccatcctcaccggtgactggtgcggcacctagcatgtttgacaggcggggactgcgaggcacgctgctcgggtgttggggacaacattgaccaacgctttattttccaggtggcagtgctccttttggacttttctctaggtttggcgctaaactcttcttgtgagctcactccaccccttcttcctccctttaacttatccattcacttaaaacattagctggtcatctggtaagcccgggacagtaagccgagtggctgttggagtcggtattgttggtaatggtggaggaagagaggccttcccgctgaggctggggtggggcggatcggtgttgcttgcctgcagagagggtggggagtgaatgtgcacccttgggtgggcctgcagccatccagctgaaagttacaaaaatgcttcatggaccgtggtttgttactatagtgttcctcatggcgagcagatggaaccgggagacatggagtccctggccagtgtgagtcctagcattgcaggaggggagaccctggaggagagagcccgcctcaattgatgcctgcagattgaatttccagaggcttaggaggaggaagttctccaatgttctgtttccaggccttgctcaggaagccctgtattcaggaggctaccatttaaagtttgcagatgagcttatggggggcaatcttaaaaagtccacagcagatgcatccggctcgaggggccatcagctttgaataaatgcttgttccagagcccatgaatgccagcaggcacccctcctttcctggggtaaaggttttcagatgctgcatcttctaaattgagcctccggtcatactagttttgtgcttggaaccttgcttcaagaagatccctaagctgtagaacattttaacgttgatgccacaacgcagattgatgccttgtagatggagcttgcagatggagccccgtgacctctcacctacccacctgtttgcctgccttcttgtgcgtttctcggagaagttcttagcctgatgaaataacttggggcgttgaagagctgtttaattttaaatgccttagactggggatatattagaggaagcagattgtcaaattaagggtgtcattgtgttgtgctaaacgctgggagggtacaagttggtcattcctaaatctgtgtgtgagaaatggcaggtctagtttgggcattgtgattgcattgcagattactaggagaagggaatggtgggtacaccggtagtgctcttttgttcttgcttcgtttttttaaacttgaactttacttcgttagatttcataatactttcttggcattctagtaagaggaccctgaggtgggagttgtgggggacggggagaaggggacagcttggcaccggtcccgtgggcgttgcagtgtgggggatgggggtatgcagcttggcactggtactgggagggatgagggtgaagaaggggagagggttggttagagatacagtgtgggtggtgggggtggtaggaaatgcaggttgaagggaattctctggggctttggggaatttagtgcgtgggtgagccaagaaaatactaattaataatagtaagttgttagtgttggttaagttgttgcttggaagtgagaagttgcttagaaactttccaaagtgcttagaactttaagtgcaaacagacaaactaacaaacaaaaattgttttgctttgctacaaggtggggaagactgaagaagtgttaactgaaaacaggtgacacagagtcaccagttttccgagaaccaaagggaggggtgtgtgatgccatctcacaggcaggggaaatgtctttaccagcttcctcctggtggccaagacagcctgtttcagagggttgttttgtttggggtgtgggtgttatcaagtgaattagtcacttgaaagatgggcgtcagacttgcatacgcagcagatcagcatccttcgctgccccttagcaacttaggtggttgatttgaaactgtgaaggtgtgattttttcaggagctggaagtcttagaaaagccttgtaaatgcctatattgtgggcttttaacgtatttaagggaccacgtgattgaaaatcatgagcgaagtgaaattgcattgaatttcaagggaatttagtatgtaaatcgtgccttagaaacacatctgttgtcttttctgtgtttggtcgatattaataatggcaaaatttttgcctatctagtatcttcaaattgtagtctttgtaacaaccaaataaccttttgtggtcactgtaaaattaatatttggtagacagaatccatgtacctttgctaaggttagaatgaataatttattgtatttttaatttgaatgtttgtgctttttaaatgagccaagactagaggggaaactatcacctaaaatcagtttggaaaacaagacctaaaaagggaaggggatggggattgtggggagagagtgggcgaggtgcctttactacatgtgtgatctgaaaaccctgcttggttctgagctgcgtctattgaattggtaaagtaataccaatggctttttatcatttccttcttccctttaagtttcacttgaaattttaaaaatcatggttatttttatcgttgggatctttctgtcttctgggttccattttttaaatgtttaaaaatatgttgacatggtagttcagttcttaaccaatgacttggggatgatgcaaacaattactgtcgttgggatttagagtgtattagtcacgcatgtatggggaagtagtctcgggtatgctgttgtgaaattgaaactgtaaaagtagatggttgaaagtactggtatgttgctctgtatggtaagaactaattctgttacgtcatgtacataattactaatcacttttcttcccctttacagcacaaataaagtttgagttctaaaactcattagaattgttgtattgctatgttacatttctcgacccctatcacattgccttcataacgactttggatgtatcttcatattgtagatttaggtctagatttgctagctccaagtaattaaggccatgtaggagagcatggtaaccacagatagaactggtattatcccaagtggtctgcagactgctgagtggggatgggatctgctctctgttgagagttggtaatcattggtttgaaatgtgatgaaaccactcaagccaatgaaggtgggtgtgtaggtggggagtactttgccataatattttaaaacattacctggttagagttctaagtggtacttatttttgtttggttaggggaaagcctgaataaaaacagaaatggacacataatatgcatattccatagtctttgggaggctggaatgtgcctgggatttgggtctaagtgtatgcgtaattcttacctcactaaagaatttgccttgtttttttccttttggtgagtgactaaaacgtctgggcttccctgtgtgcgtgctacagtaagcaagcagaggctgtgcaaaggtgtgagcaggatcacgtggaatctggaggatacatcttggcttgcaaactgcctctgtctcctgggtgggactgttctgtccttgcactgctgttctgtgttacctcttggggtgtaaggttttgcttacaggagacaaactttgggcgtagaatggaagccactgccagcctctgtgctgagaaggaaggtgcttgtttcaaagggagcagcaagggaggcttgttctactcacctgggcctgtttgcctgagaaggggagataagggctgaactgggactagccagggggaccaacacaaatggtgggggatcatgacctgaaggattctttccttcccatgagctgcagggctggttgccgtccttgcaactgtgtcttatttgcctgtgccgttatatcttggtgacccctccacgtgtacactactgacaaacgggtggagtgctggggagaagtcactgtgccgcccacctagtaaaccttctgtctgtgctcatggcatctccaagatggggcactgctgtgtgcagaatccagggtcctctttctgcttgcaactcctttccctggatgccccagaaacaatccaggcctcctttcctatcttacccctttgctttgctttttaccccagcacctctataaccgccttctcttcttttcagaactccttgtttctcatcctgttttttatgattacaaaactcttgcttccaccctggaagataactgctatagatgcctgtatgtaaatggtgctgtctccagcaactggcatgctgaagaagaattgattcacggggtataaatgttggggattggaagtggggatgaaatggcacttgttgatacaggagcagagaggtgaggccgactgctgaagacagctcgccaccctccttgcctccactccaatccaggggctggggccacattctttgccttcatttatcctcagatcaggtgagatcgacaggaggtgttgatggcagtgccagcaattattgctaatccgtttgcatccttatgcatagatctgaattcagactttgtgaatttccagaggtgtgggtaatataatagaattcagtgagtgggcatggctgatcttgtgcaaattaaaagttatggggcataagaatagcaaaagttgaacttcttttaaaaaggaaagtaccctgagagccagtattggttgaggctcttcagtatgcccaggttggcagcactgagaaccgcaggaacggcctgttgttacaaaaaggagattgactcagctgcccttggtgcatctgactgactatgactgctgagagattccaaggacccttaatgccagggctaacctctccatgtgcagtgagacctctggaggaagtgtcatcctctggctttgtgtggtactcattatggtgcagtgcgggcatgaaatgaagacacccaaataggcttacagatacgatatgttttaaatgttcgtatttaacaaaaacatactgacactgtttggaaatggcaacaggaagatagcaaaatgaatactaacattacgaaaagatgaacaggtacatgttccaaggcaggtggctgtgaacttcctctgagtgaaggcatcccctccagcacctttcagcctgctagttaggacgacccgccgccaccctccaggacctccagccctgcactgcctttcctctcttttaaataattcttcattgagttctaatatgtaaaaaaaaaaagtttactgtaaagtttgcaaataaggaaattttttttaaaagtcctcagtaatcttaccagtaacaattgttatgggcacatttgcttttggaagatttcttttgtatgcatgggataagtacatttttaaacaaaaatgggattatgccataaattctattttgtgactttaatatatagtgaacaccttttttaatgatgacaggatgttcccttgcatggctgtatcaatttaaacaatcttgtttcaatgggcatacagggtattttctagtttttttttcctcttagaaaataatacttgcgatgactttccttgtagctcagactttttcacgtctgttgttatctctttgggaatgctgaatacatacatttcgagaaggaaatgactgttaaactcttaagacttcaggttcatattgctaaactgcccagcagggagggattttttcaattagtgttctcactggtgaggcaaacctgatgccttcccctcttcctcagaaccggctttatcacattgaaaacctttgctcctccgacggatcgagtctgctttccctgtggatgtgagcattgctttgtctgctggtgactgaacatctctaccatgtgtcaattggccatttgtggtgtgtgtgtgtgtgcgtgtgtgtgtgtgtgtgtgtgtgtatgattttctaattcctagtcatttttctattgattgttttgcaaaagccatttacatcttaaggatattgataatcttttgttatatttgatgcaaatatttttttccagtttataggttgccttttaattttgtgtttcaggtagataaaagttaaacgattttcttaggttagtttatcactgtggtttctgaacttgttatgtgtagatcttttccaccccaagagtacataaatattaatccatactttcttatggaacttgtatggtttcgttttttacatttaaaccttcttccccgtggtgtgtgttgtggaatctgtgtttgtgtgaggaggggcatggtgctctcagaacccacctcctgtggccagagagccctgtcctgtgagggtggttatcacagtggcagggttcaattcagaagaccttgagggcaggctgatgtttcctgaatgggcccctggttgttgcttgtccctgactctccatttccccatctgagtggatttggacctaatagggcactggagctggttcgaatcctgactggactacttggcaactttatgtctgggagcaagttacttaacctccccaagcctgtgtctgtgaaatgcgggtaaatgaatgtagatgtttggcagcagctactccttgttgagctctcacagtgaactctcctgcctctgccctccttccccgcctcccctggtgcctagcgtcaggtctagccacttcctcctgggcccctctcccttttctgtggctggctgcctgcccgcctggcgctggacctttcatgtaacgggaatcagcatgtatattctggtctggtctgtttctacacttaattttgtttccagtagtatttccctgtaccggcagagttcacaaacacatttgaagaggctttttctcaggattcttaaccttcccaaaggaagtcccatggatgggtttctagaagtctataaatgctctgaaattgtatttttctgtggaaagcataactttcatctgcttgttcgtgctcaaaaaagatcatgaatgaatgattgcatgattttatgccattgtgcttatactaaaggatatgtagcccatctcttgagctgttaaactgttttgactactttaaatcgtgcagctgtgagcatctctgtaaatttagtgtacacatgtatcccctggagtggcattgcctcggcagtgagcacttatggttttataactctcttcacagactcaaatgactccagaaagctacacttcctgttgtgagtatatgatatccatttccctacatagccactaacatcaggtttttacaattttatttatttcttgctactttaagaaatttttgtggtgaaatacatataatagaagttgactatctgaatcatttttaagtatacattcagtagtgttaagtatgtcgccattgttgtacaaccaatctccagaactttttcatcttgcaaaacaaactctgtacccattaaataacattaaacattccattccctccagcctcagcaaccccattctactttctgtttctgtgagtttgactattccaagcacttcatatcagttaaatcatgaagtatttgtctgtctgtgactggcttatttctctgagcacagtgtcctcgagatgcgtctatgttgtagcatatgtcagaatttccttcctttttaaaagatccaaataatattcttattttatatcttttttttatccattcatccattagtggacacttgggttgcttttggctattgtaaataatggtgctatgtacaaatatctatattattgtatttacaagtataatgctgtaatgtacacacatctttttgagatcctaccttcagttcttttgagtatatagccagaagtggtattactaaatcttacgatatttctatttttaatttattgaggaaccactgtagtttttcatagcaactgcaccattttacgttctcaccaagagtgcacaagggttccgaggttcccacatcctccccaacacttgttattttctgctttttttagattgcagccatcatagtgggtgtgaggtgacatttcattgtggttttgatttgcatttccctaatgaggagtgatgctgagcatcttttcatatgcttactggtcatttgtatgttgtctttggaaaaatgtctattcaagtcctttgactattttaaaaattgggttattagagttatcgttgttgttgacttgtaggagtttctttctatattctggatattaatcccctatcagatatatgatttgcaaatatcttctcttattccataaggttactttttcactttgttgattgtgttctttgatgtatagaagtttttagttttgaaatagtctaatttatctgtttttacttttgtggtctgtgcttttggtgtcatatccaagaaatccttgccaaatccaacgttataaggtacttttaaggtattttagttgtcttagtctatatttctgtactcacctttctttatccactcatcagttgatgggcatgtaggttggttccatatctttgcaattctgaattgtgctgtgatcaggtgtctttttagtataatgatttactctcctttgggtagatacccagtagtgggattgctggatcgaatggtttttataattttctattttaccacagtttctctctgcatttttcctctttgaccactaaccatgtgaaattctcatattgacctttataatgatcatgaactcttagtatcattgggaaggccacatttgccacttatgattgtaaaccttatcctccatttttcctgttattgttggtgcaaaaagcacctattataccaggactttaaaaatcagtctgataagtctttgataagtctaataataataactgataagtccattgaatttgcttctgattactttttctttagtagctaaacatgtatgtactcctatgattacaatgaacactcctctccatttaaattaattatttacattgatgaaatagcaaaatgttaatgactaaatactgtcttggttttttcgttccaggtcagtcaatattaacttcttataattttcttttttttctttatgtgtgtgtgtgtgtgtatttttttttttttaatttcaatggcttttggggtacaaatggcttttggtcatatagatgaattctacagtagtgaagtctgagattttactgcaccggtcacctgagtagtgtacattgtacccaatatgtggttttttataccttgcccccctcttaccctccccactttgagtctctagtgtccattatgtcactctgtatacctttttgtacccataagttagctctcacttataagtgagaacacacagtatttggttttccattcctgagttgcttcacttagaataatatcctccagctccatccaaaattgctgcaaaaaaaaaaaaaaccacaaacattattttgttcttttttattgctaagtcatattccatggtgtagagataccacattttatttatccactcactggttgatgggttggttccacatctttgcaattgtgacttgtactgccatcaagtgtctttctggtataatgacttcttttcctttgggtagatacccaggagtgggattgctagatcaaatggttcttaacattttctctctggatctatttctggaaattttaggctccagtttttgttgttgttgttaataaaatgcaatggaatgtaatgatcatcacttttcattatgctttaaaatctggtaaatggaggctagaacactcctgtaaggcaagaatattctctctgttggaactcaaatacacagaactgggtaaatctcaatcttaatctttgattcaggacacaacatggctctcttttacttgctttctttaattgttttttaataatgtggtaagcatttctgaatctcctatccaatacaaaaactaggacaatacagacagtaactcctatggttacaatgaacactcctctccacttaaattaattatttacactgatgaaattgaaatagcaaaattttaatgactaaatactgtctttgattttttgttccaggtctgtcaatattaacttcttataattttctttttttttctttatgtgtgtgtgtgtgtgtatatatatatatatttaatttcaatggcttttggggtacaaatggcttttggtcatatatatgagttctacagtagtgaagtctgagattttactacaccttccacttatgtggtcccacaccacccgcctcccctgccgcct

SEQ ID NO: 467105 - DNA, 11125 bp, Homo sapiens
  misc_feature (90)..(90): n is a, c, g, or t
  misc_feature (152)..(152): n is a, c, g, or t
cagtgagcaacgtgggcttgtgagagtgggggggcctctcacaagaagtgtaggcatgcattgtgtcagataaggttgggaggagactgngacaagatcaagggcagggggcaggggcaggaggctggtagtgctgtggcccagatattggncagaagtacagggaggatctcctcagggcttcaggggacagacagggagagatgactgagttagatgagactagggggcgggctgggggtgcgagaaggaagcttggcaaggagactaggtctagggggaccacagtggggcaggctgcatggaaaatatccgcagggtcccccaggcagaacagccacgctccaggccaggctgtccctactgcctggtggagggggaacttgacctctgggagggcgccgctcttgcatagctgagcgagcccgggtgcgctggtctgtgtggaaggaggaaggcagggagaggtagaaggggtggaggagtcaggaggaataggccgcagcagccctggaaatgatcaggaaggcaggcagtgggtgcagggctgcaggagggccgggagggctaatcttcaacttgtccatgccagcagcccctttttttccagaccaagggctgtgaacccgcctggggatgaggcctggtcttgtggaactgaacttagctcgacggggctgaccgctctggcccagggtggtatgtaattttcgctcggcctgggacggggcccaggccgggcccagcctggtggagcgtccaggtctgggtgcgaagccaggcccctgggcggaggtgaggggtggtctgaggagtgatgtggagttaaggcgccatcctcaccggtgactggtgcggcacctagcatgtttgacaggcggggactgcgaggcacgctgctcgggtgttggggacaacattgaccaacgctttattttccaggtggcagtgctccttttggacttttctctaggtttggcgctaaactcttcttgtgagctcactccaccccttcttcctccctttaacttatccattcacttaaaacattagctggtcatctggtaagcccgggacagtaagccgagtggctgttggagtcggtattgttggtaatggtggaggaagagaggccttcccgctgaggctggggtggggcggatcggtgttgcttgcctgcagagagggtggggagtgaatgtgcacccttgggtgggcctgcagccatccagctgaaagttacaaaaatgcttcatggaccgtggtttgttactatagtgttcctcatggcgagcagatggaaccgggagacatggagtccctggccagtgtgagtcctagcattgcaggaggggagaccctggaggagagagcccgcctcaattgatgcctgcagattgaatttccagaggcttaggaggaggaagttctccaatgttctgtttccaggccttgctcaggaagccctgtattcaggaggctaccatttaaagtttgcagatgagcttatggggggcaatcttaaaaagtccacagcagatgcatccggctcgaggggccatcagctttgaataaatgcttgttccagagcccatgaatgccagcaggcacccctcctttcctggggtaaaggttttcagatgctgcatcttctaaattgagcctccggtcatactagttttgtgcttggaaccttgcttcaagaagatccctaagctgtagaacattttaacgttgatgccacaacgcagattgatgccttgtagatggagcttgcagatggagccccgtgacctctcacctacccacctgtttgcctgccttcttgtgcgtttctcggagaagttcttagcctgatgaaataacttggggcgttgaagagctgtttaattttaaatgccttagactggggatatattagaggaagcagattgtcaaattaagggtgtcattgtgttgtgctaaacgctgggagggtacaagttggtcattcctaaatctgtgtgtgagaaatggcaggtctagtttgggcattgtgattgcattgcagattactaggagaagggaatggtgggtacaccggtagtgctcttttgttcttgcttcgtttttttaaacttgaactttacttcgttagatttcataatactttcttggcattctagtaagaggaccctgaggtgggagttgtgggggacggggagaaggggacagcttggcaccggtcccgtgggcgttgcagtgtgggggatgggggtatgcagcttggcactggtactgggagggatgagggtgaagaaggggagagggttggttagagatacagtgtgggtggtgggggtggtaggaaatgcaggttgaagggaattctctggggctttggggaatttagtgcgtgggtgagccaagaaaatactaattaataatagtaagttgttagtgttggttaagttgttgcttggaagtgagaagttgcttagaaactttccaaagtgcttagaactttaagtgcaaacagacaaactaacaaacaaaaattgttttgctttgctacaaggtggggaagactgaagaagtgttaactgaaaacaggtgacacagagtcaccagttttccgagaaccaaagggaggggtgtgtgatgccatctcacaggcaggggaaatgtctttaccagcttcctcctggtggccaagacagcctgtttcagagggttgttttgtttggggtgtgggtgttatcaagtgaattagtcacttgaaagatgggcgtcagacttgcatacgcagcagatcagcatccttcgctgccccttagcaacttaggtggttgatttgaaactgtgaaggtgtgattttttcaggagctggaagtcttagaaaagccttgtaaatgcctatattgtgggcttttaacgtatttaagggaccacttaagacgagattagatgggctcttctggatttgttcctcatttgtcacaggtgtcttgtgattgaaaatcatgagcgaagtgaaattgcattgaatttcaagggaatttagtatgtaaatcgtgccttagaaacacatctgttgtcttttctgtgtttggtcgatattaataatggcaaaatttttgcctatctagtatcttcaaattgtagtctttgtaacaaccaaataaccttttgtggttatttttaatttgaatgtttgtgctttttaaatgagccaagactagaggggaaactatcacctaaaatcagtttggaaaacaagacctaaaaagggaaggggatggggattgtggggagagagtgggcgaggtgcctttactacatgtgtgatctgaaaaccctgcttggttctgagctgcgtctattgaattggtaaagtaataccaatggctttttatcatttccttcttccctttaagtttcacttgaaattttaaaaatcatggttatttttatcgttgggatctttctgtcttctgggttccattttttaaatgtttaaaaatatgttgacatggtagttcagttcttaaccaatgacttggggatgatgcaaacaattactgtcgttgggatttagagtgtattagtcacgcatgtatggggaagtagtctcgggtatgctgttgtgaaattgaaactgtaaaagtagatggttgaaagtactggtatgttgctctgtatggtaagaactaattctgttacgtcatgtacataattactaatcacttttcttcccctttacagcacaaataaagtttgagttctaaaactcattagaattgttgtattgctatgttacatttctcgacccctatcacattgccttcataacgactttggatgtatcttcatattgtagatttaggtctagatttgctagctccaagtaattaaggccatgtaggagagcatggtaaccacagatagaactggtattatcccaagtggtctgcagactgctgagtggggatgggatctgctctctgttgagagttggtaatcattggtttgaaatgtgatgaaaccactcaagccaatgaaggtgggtgtgtaggtggggagtactttgccataatattttaaaacattacctggttagagttctaagtggtacttatttttgtttggttaggggaaagcctgaataaaaacagaaatggacacataatatgcatattccatagtctttgggaggctggaatgtgcctgggatttgggtctaagtgtatgcgtaattcttacctcactaaagaatttgccttgtttttttccttttggtgagtgactaaaacgtctgggcttccctgtgtgcgtgctacagtaagcaagcagaggctgtgcaaaggtgtgagcaggatcacgtggaatctggaggatacatcttggcttgcaaactgcctctgtctcctgggtgggactgttctgtccttgcactgctgttctgtgttacctcttggggtgtaaggttttgcttacaggagacaaactttgggcgtagaatggaagccactgccagcctctgtgctgagaaggaaggtgcttgtttcaaagggagcagcaagggaggcttgttctactcacctgggcctgtttgcctgagaaggggagataagggctgaactgggactagccagggggaccaacacaaatggtgggggatcatgacctgaaggattctttccttcccatgagctgcagggctggttgccgtccttgcaactgtgtcttatttgcctgtgccgttatatcttggtgacccctccacgtgtacactactgacaaacgggtggagtgctggggagaagtcactgtgccgcccacctagtaaaccttctgtctgtgctcatggcatctccaagatggggcactgctgtgtgcagaatccagggtcctctttctgcttgcaactcctttccctggatgccccagaaacaatccaggcctcctttcctatcttacccctttgctttgctttttaccccagcacctctataaccgccttctcttcttttcagaactccttgtttctcatcctgttttttatgattacaaaactcttgcttccaccctggaagataactgctatagatgcctgtatgtaaatggtgctgtctccagcaactggcatgctgaagaagaattgattcacggggtataaatgttggggattggaagtggggatgaaatggcacttgttgatacaggagcagagaggtgaggccgactgctgaagacagctcgccaccctccttgcctccactccaatccaggggctggggccacattctttgccttcatttatcctcagatcaggtgagatcgacaggaggtgttgatggcagtgccagcaattattgctaatccgtttgcatccttatgcatagatctgaattcagactttgtgaatttccagaggtgtgggtaatataatagaattcagtgagtgggcatggctgatcttgtgcaaattaaaagttatggggcataagaatagcaaaagttgaacttcttttaaaaaggaaagtaccctgagagccagtattggttgaggctcttcagtatgcccaggttggcagcactgagaaccgcaggaacggcctgttgttacaaaaaggagattgactcagctgcccttggtgcatctgactgactatgactgctgagagattccaaggacccttaatgccagggctaacctctccatgtgcagtgagacctctggaggaagtgtcatcctctggctttgtgtggtactcattatggtgcagtgcgggcatgaaatgaagacacccaaataggcttacagatacgatatgttttaaatgttcgtatttaacaaaaacatactgacactgtttggaaatggcaacaggaagatagcaaaatgaatactaacattacgaaaagatgaacaggtacatgttccaaggcaggtggctgtgaacttcctctgagtgaaggcatcccctccagcacctttcagcctgctagttaggacgacccgccgccaccctccaggacctccagccctgcactgcctttcctctcttttaaataattcttcattgagttctaatatgtaaaaaaaaaaagtttactgtaaagtttgcaaataaggaaattttttttaaaagtcctcagtaatcttaccagtaacaattgttatgggcacatttgcttttggaagatttcttttgtatgcatgggataagtacatttttaaacaaaaatgggattatgccataaattctattttgtgactttaatatatagtgaacaccttttttaatgatgacaggatgttcccttgcatggctgtatcaatttaaacaatcttgtttcaatgggcatacagggtattttctagtttttttttcctcttagaaaataatacttgcgatgactttccttgtagctcagactttttcacgtctgttgttatctctttgggaatgctgaatacatacatttcgagaaggaaatgactgttaaactcttaagacttcaggttcatattgctaaactgcccagcagggagggattttttcaattagtgttctcactggtgaggcaaacctgatgccttcccctcttcctcagaaccggctttatcacattgaaaacctttgctcctccgacggatcgagtctgctttccctgtggatgtgagcattgctttgtctgctggtgactgaacatctctaccatgtgtcaattggccatttgtggtgtgtgtgtgtgtgcgtgtgtgtgtgtgtgtgtgtgtgtatgattttctaattcctagtcatttttctattgattgttttgcaaaagccatttacatcttaaggatattgataatcttttgttatatttgatgcaaatatttttttccagtttataggttgccttttaattttgtgtttcaggtagataaaagttaaacgattttcttaggttagtttatcactgtggtttctgaacttgttatgtgtagatcttttccaccccaagagtacataaatattaatccatactttcttatggaacttgtatggtttcgttttttacatttaaaccttcttccccgtggtgtgtgttgtggaatctgtgtttgtgtgaggaggggcatggtgctctcagaacccacctcctgtggccagagagccctgtcctgtgagggtggttatcacagtggcagggttcaattcagaagaccttgagggcaggctgatgtttcctgaatgggcccctggttgttgcttgtccctgactctccatttccccatctgagtggatttggacctaatagggcactggagctggttcgaatcctgactggactacttggcaactttatgtctgggagcaagttacttaacctccccaagcctgtgtctgtgaaatgcgggtaaatgaatgtagatgtttggcagcagctactccttgttgagctctcacagtgaactctcctgcctctgccctccttccccgcctcccctggtgcctagcgtcaggtctagccacttcctcctgggcccctctcccttttctgtggctggctgcctgcccgcctggcgctggacctttcatgtaacgggaatcagcatgtatattctggtctggtctgtttctacacttaattttgtttccagtagtatttccctgtaccggcagagttcacaaacacatttgaagaggctttttctcaggattcttaaccttcccaaaggaagtcccatggatgggtttctagaagtctataaatgctctgaaattgtatttttctgtggaaagcataactttcatctgcttgttcgtgctcaaaaaagatcatgaatgaatgattgcatgattttatgccattgtgcttatactaaaggatatgtagcccatctcttgagctgttaaactgttttgactactttaaatcgtgcagctgtgagcatctctgtaaatttagtgtacacatgtatcccctggagtggcattgcctcggcagtgagcacttatggttttataactctcttcacagactcaaatgactccagaaagctacacttcctgttgtgagtatatgatatccatttccctacatagccactaacatcaggtttttacaattttatttatttcttgctactttaagaaatttttgtggtgaaatacatataatagaagttgactatctgaatcatttttaagtatacattcagtagtgttaagtatgtcgccattgttgtacaaccaatctccagaactttttcatcttgcaaaacaaactctgtacccattaaataacattaaacattccattccctccagcctcagcaaccccattctactttctgtttctgtgagtttgactattccaagcacttcatatcagttaaatcatgaagtatttgtctgtctgtgactggcttatttctctgagcacagtgtcctcgagatgcgtctatgttgtagcatatgtcagaatttccttcctttttaaaagatccaaataatattcttattttatatcttttttttatccattcatccattagtggacacttgggttgcttttggctattgtaaataatggtgctatgtacaaatatctatattattgtatttacaagtataatgctgtaatgtacacacatctttttgagatcctaccttcagttcttttgagtatatagccagaagtggtattactaaatcttacgatatttctatttttaatttattgaggaaccactgtagtttttcatagcaactgcaccattttacgttctcaccaagagtgcacaagggttccgaggttcccacatcctccccaacacttgttattttctgctttttttagattgcagccatcatagtgggtgtgaggtgacatttcattgtggttttgatttgcatttccctaatgaggagtgatgctgagcatcttttcatatgcttactggtcatttgtatgttgtctttggaaaaatgtctattcaagtcctttgactattttaaaaattgggttattagagttatcgttgttgttgacttgtaggagtttctttctatattctggatattaatcccctatcagatatatgatttgcaaatatcttctcttattccataaggttactttttcactttgttgattgtgttctttgatgtatagaagtttttagttttgaaatagtctaatttatctgtttttacttttgtggtctgtgcttttggtgtcatatccaagaaatccttgccaaatccaacgttataaggtacttttaaggtattttagttgtcttagtctatatttctgtactcacctttctttatccactcatcagttgatgggcatgtaggttggttccatatctttgcaattctgaattgtgctgtgatcaggtgtctttttagtataatgatttactctcctttgggtagatacccagtagtgggattgctggatcgaatggtttttataattttctattttaccacagtttctctctgcatttttcctctttgaccactaaccatgtgaaattctcatattgacctttataatgatcatgaactcttagtatcattgggaaggccacatttgccacttatgattgtaaaccttatcctccatttttcctgttattgttggtgcaaaaagcacctattataccaggactttaaaaatcagtctgataagtctttgataagtctaataataataactgataagtccattgaatttgcttctgattactttttctttagtagctaaacatgtatgtactcctatgattacaatgaacactcctctccatttaaattaattatttacattgatgaaatagcaaaatgttaatgactaaatactgtcttggttttttcgttccaggtcagtcaatattaacttcttataattttcttttttttctttatgtgtgtgtgtgtgtgtatttttttttttttaatttcaatggcttttggggtacaaatggcttttggtcatatagatgaattctacagtagtgaagtctgagattttactgcaccggtcacctgagtagtgtacattgtacccaatatgtggttttttataccttgcccccctcttaccctccccactttgagtctctagtgtccattatgtcactctgtatacctttttgtacccataagttagctctcacttataagtgagaacacacagtatttggttttccattcctgagttgcttcacttagaataatatcctccagctccatccaaaattgctgcaaaaaaaaaaaaaaccacaaacattattttgttcttttttattgctaagtcatattccatggtgtagagataccacattttatttatccactcactggttgatgggttggttccacatctttgcaattgtgacttgtactgccatcaagtgtctttctggtataatgacttcttttcctttgggtagatacccaggagtgggattgctagatcaaatggttcttaacattttctctctggatctatttctggaaattttaggctccagtttttgttgttgttgttaataaaatgcaatggaatgtaatgatcatcacttttcattatgctttaaaatctggtaaatggaggctagaacactcctgtaaggcaagaatattctctctgttggaactcaaatacacagaactgggtaaatctcaatcttaatctttgattcaggacacaacatggctctcttttacttgctttctttaattgttttttaataatgtggtaagcatttctgaatctcctatccaatacaaaaactaggacaatacagacagtaactcctatggttacaatgaacactcctctccacttaaattaattatttacactgatgaaattgaaatagcaaaattttaatgactaaatactgtctttgattttttgttccaggtctgtcaatattaacttcttataattttctttttttttctttatgtgtgtgtgtgtgtgtatatatatatatatttaatttcaatggcttttggggtacaaatggcttttggtcatatatatgagttctacagtagtgaagtctgagattttactacaccttccacttatgtggtcccacaccacccgcctcccctgccgcct

SEQ ID NO: 467106 - DNA, 11137 bp, Homo sapiens
  misc_feature (90)..(90): n is a, c, g, or t
  misc_feature (152)..(152): n is a, c, g, or t
cagtgagcaacgtgggcttgtgagagtgggggggcctctcacaagaagtgtaggcatgcattgtgtcagataaggttgggaggagactgngacaagatcaagggcagggggcaggggcaggaggctggtagtgctgtggcccagatattggncagaagtacagggaggatctcctcagggcttcaggggacagacagggagagatgactgagttagatgagactagggggcgggctgggggtgcgagaaggaagcttggcaaggagactaggtctagggggaccacagtggggcaggctgcatggaaaatatccgcagggtcccccaggcagaacagccacgctccaggccaggctgtccctactgcctggtggagggggaacttgacctctgggagggcgccgctcttgcatagctgagcgagcccgggtgcgctggtctgtgtggaaggaggaaggcagggagaggtagaaggggtggaggagtcaggaggaataggccgcagcagccctggaaatgatcaggaaggcaggcagtgggtgcagggctgcaggagggccgggagggctaatcttcaacttgtccatgccagcagcccctttttttccagaccaagggctgtgaacccgcctggggatgaggcctggtcttgtggaactgaacttagctcgacggggctgaccgctctggcccagggtggtatgtaattttcgctcggcctgggacggggcccaggccgggcccagcctggtggagcgtccaggtctgggtgcgaagccaggcccctgggcggaggtgaggggtggtctgaggagtgatgtggagttaaggcgccatcctcaccggtgactggtgcggcacctagcatgtttgacaggcggggactgcgaggcacgctgctcgggtgttggggacaacattgaccaacgctttattttccaggtggcagtgctccttttggacttttctctaggtttggcgctaaactcttcttgtgagctcactccaccccttcttcctccctttaacttatccattcacttaaaacattagctggtcatctggtaagcccgggacagtaagccgagtggctgttggagtcggtattgttggtaatggtggaggaagagaggccttcccgctgaggctggggtggggcggatcggtgttgcttgcctgcagagagggtggggagtgaatgtgcacccttgggtgggcctgcagccatccagctgaaagttacaaaaatgcttcatggaccgtggtttgttactatagtgttcctcatggcgagcagatggaaccgggagacatggagtccctggccagtgtgagtcctagcattgcaggaggggagaccctggaggagagagcccgcctcaattgatgcctgcagattgaatttccagaggcttaggaggaggaagttctccaatgttctgtttccaggccttgctcaggaagccctgtattcaggaggctaccatttaaagtttgcagatgagcttatggggggcaatcttaaaaagtccacagcagatgcatccggctcgaggggccatcagctttgaataaatgcttgttccagagcccatgaatgccagcaggcacccctcctttcctggggtaaaggttttcagatgctgcatcttctaaattgagcctccggtcatactagttttgtgcttggaaccttgcttcaagaagatccctaagctgtagaacattttaacgttgatgccacaacgcagattgatgccttgtagatggagcttgcagatggagccccgtgacctctcacctacccacctgtttgcctgccttcttgtgcgtttctcggagaagttcttagcctgatgaaataacttggggcgttgaagagctgtttaattttaaatgccttagactggggatatattagaggaagcagattgtcaaattaagggtgtcattgtgttgtgctaaacgctgggagggtacaagttggtcattcctaaatctgtgtgtgagaaatggcaggtctagtttgggcattgtgattgcattgcagattactaggagaagggaatggtgggtacaccggtagtgctcttttgttcttgcttcgtttttttaaacttgaactttacttcgttagatttcataatactttcttggcattctagtaagaggaccctgaggtgggagttgtgggggacggggagaaggggacagcttggcaccggtcccgtgggcgttgcagtgtgggggatgggggtatgcagcttggcactggtactgggagggatgagggtgaagaaggggagagggttggttagagatacagtgtgggtggtgggggtggtaggaaatgcaggttgaagggaattctctggggctttggggaatttagtgcgtgggtgagccaagaaaatactaattaataatagtaagttgttagtgttggttaagttgttgcttggaagtgagaagttgcttagaaactttccaaagtgcttagaactttaagtgcaaacagacaaactaacaaacaaaaattgttttgctttgctacaaggtggggaagactgaagaagtgttaactgaaaacaggtgacacagagtcaccagttttccgagaaccaaagggaggggtgtgtgatgccatctcacaggcaggggaaatgtctttaccagcttcctcctggtggccaagacagcctgtttcagagggttgttttgtttggggtgtgggtgttatcaagtgaattagtcacttgaaagatgggcgtcagacttgcatacgcagcagatcagcatccttcgctgccccttagcaacttaggtggttgatttgaaactgtgaaggtgtgattttttcaggagctggaagtcttagaaaagccttgtaaatgcctatattgtgggcttttaacgtatttaagggaccacttaagacgagattagatgggctcttctggatttgttcctcatttgtcacaggtgtctttaaatcgtgccttagaaacacatctgttgtcttttctgtgtttggtcgatattaataatggcaaaatttttgcctatctagtatcttcaaattgtagtctttgtaacaaccaaataaccttttgtggtcactgtaaaattaatatttggtagacagaatccatgtacctttgctaaggttagaatgaataatttattgtatttttaatttgaatgtttgtgctttttaaatgagccaagactagaggggaaactatcacctaaaatcagtttggaaaacaagacctaaaaagggaaggggatggggattgtggggagagagtgggcgaggtgcctttactacatgtgtgatctgaaaaccctgcttggttctgagctgcgtctattgaattggtaaagtaataccaatggctttttatcatttccttcttccctttaagtttcacttgaaattttaaaaatcatggttatttttatcgttgggatctttctgtcttctgggttccattttttaaatgtttaaaaatatgttgacatggtagttcagttcttaaccaatgacttggggatgatgcaaacaattactgtcgttgggatttagagtgtattagtcacgcatgtatggggaagtagtctcgggtatgctgttgtgaaattgaaactgtaaaagtagatggttgaaagtactggtatgttgctctgtatggtaagaactaattctgttacgtcatgtacataattactaatcacttttcttcccctttacagcacaaataaagtttgagttctaaaactcattagaattgttgtattgctatgttacatttctcgacccctatcacattgccttcataacgactttggatgtatcttcatattgtagatttaggtctagatttgctagctccaagtaattaaggccatgtaggagagcatggtaaccacagatagaactggtattatcccaagtggtctgcagactgctgagtggggatgggatctgctctctgttgagagttggtaatcattggtttgaaatgtgatgaaaccactcaagccaatgaaggtgggtgtgtaggtggggagtactttgccataatattttaaaacattacctggttagagttctaagtggtacttatttttgtttggttaggggaaagcctgaataaaaacagaaatggacacataatatgcatattccatagtctttgggaggctggaatgtgcctgggatttgggtctaagtgtatgcgtaattcttacctcactaaagaatttgccttgtttttttccttttggtgagtgactaaaacgtctgggcttccctgtgtgcgtgctacagtaagcaagcagaggctgtgcaaaggtgtgagcaggatcacgtggaatctggaggatacatcttggcttgcaaactgcctctgtctcctgggtgggactgttctgtccttgcactgctgttctgtgttacctcttggggtgtaaggttttgcttacaggagacaaactttgggcgtagaatggaagccactgccagcctctgtgctgagaaggaaggtgcttgtttcaaagggagcagcaagggaggcttgttctactcacctgggcctgtttgcctgagaaggggagataagggctgaactgggactagccagggggaccaacacaaatggtgggggatcatgacctgaaggattctttccttcccatgagctgcagggctggttgccgtccttgcaactgtgtcttatttgcctgtgccgttatatcttggtgacccctccacgtgtacactactgacaaacgggtggagtgctggggagaagtcactgtgccgcccacctagtaaaccttctgtctgtgctcatggcatctccaagatggggcactgctgtgtgcagaatccagggtcctctttctgcttgcaactcctttccctggatgccccagaaacaatccaggcctcctttcctatcttacccctttgctttgctttttaccccagcacctctataaccgccttctcttcttttcagaactccttgtttctcatcctgttttttatgattacaaaactcttgcttccaccctggaagataactgctatagatgcctgtatgtaaatggtgctgtctccagcaactggcatgctgaagaagaattgattcacggggtataaatgttggggattggaagtggggatgaaatggcacttgttgatacaggagcagagaggtgaggccgactgctgaagacagctcgccaccctccttgcctccactccaatccaggggctggggccacattctttgccttcatttatcctcagatcaggtgagatcgacaggaggtgttgatggcagtgccagcaattattgctaatccgtttgcatccttatgcatagatctgaattcagactttgtgaatttccagaggtgtgggtaatataatagaattcagtgagtgggcatggctgatcttgtgcaaattaaaagttatggggcataagaatagcaaaagttgaacttcttttaaaaaggaaagtaccctgagagccagtattggttgaggctcttcagtatgcccaggttggcagcactgagaaccgcaggaacggcctgttgttacaaaaaggagattgactcagctgcccttggtgcatctgactgactatgactgctgagagattccaaggacccttaatgccagggctaacctctccatgtgcagtgagacctctggaggaagtgtcatcctctggctttgtgtggtactcattatggtgcagtgcgggcatgaaatgaagacacccaaataggcttacagatacgatatgttttaaatgttcgtatttaacaaaaacatactgacactgtttggaaatggcaacaggaagatagcaaaatgaatactaacattacgaaaagatgaacaggtacatgttccaaggcaggtggctgtgaacttcctctgagtgaaggcatcccctccagcacctttcagcctgctagttaggacgacccgccgccaccctccaggacctccagccctgcactgcctttcctctcttttaaataattcttcattgagttctaatatgtaaaaaaaaaaagtttactgtaaagtttgcaaataaggaaattttttttaaaagtcctcagtaatcttaccagtaacaattgttatgggcacatttgcttttggaagatttcttttgtatgcatgggataagtacatttttaaacaaaaatgggattatgccataaattctattttgtgactttaatatatagtgaacaccttttttaatgatgacaggatgttcccttgcatggctgtatcaatttaaacaatcttgtttcaatgggcatacagggtattttctagtttttttttcctcttagaaaataatacttgcgatgactttccttgtagctcagactttttcacgtctgttgttatctctttgggaatgctgaatacatacatttcgagaaggaaatgactgttaaactcttaagacttcaggttcatattgctaaactgcccagcagggagggattttttcaattagtgttctcactggtgaggcaaacctgatgccttcccctcttcctcagaaccggctttatcacattgaaaacctttgctcctccgacggatcgagtctgctttccctgtggatgtgagcattgctttgtctgctggtgactgaacatctctaccatgtgtcaattggccatttgtggtgtgtgtgtgtgtgcgtgtgtgtgtgtgtgtgtgtgtgtatgattttctaattcctagtcatttttctattgattgttttgcaaaagccatttacatcttaaggatattgataatcttttgttatatttgatgcaaatatttttttccagtttataggttgccttttaattttgtgtttcaggtagataaaagttaaacgattttcttaggttagtttatcactgtggtttctgaacttgttatgtgtagatcttttccaccccaagagtacataaatattaatccatactttcttatggaacttgtatggtttcgttttttacatttaaaccttcttccccgtggtgtgtgttgtggaatctgtgtttgtgtgaggaggggcatggtgctctcagaacccacctcctgtggccagagagccctgtcctgtgagggtggttatcacagtggcagggttcaattcagaagaccttgagggcaggctgatgtttcctgaatgggcccctggttgttgcttgtccctgactctccatttccccatctgagtggatttggacctaatagggcactggagctggttcgaatcctgactggactacttggcaactttatgtctgggagcaagttacttaacctccccaagcctgtgtctgtgaaatgcgggtaaatgaatgtagatgtttggcagcagctactccttgttgagctctcacagtgaactctcctgcctctgccctccttccccgcctcccctggtgcctagcgtcaggtctagccacttcctcctgggcccctctcccttttctgtggctggctgcctgcccgcctggcgctggacctttcatgtaacgggaatcagcatgtatattctggtctggtctgtttctacacttaattttgtttccagtagtatttccctgtaccggcagagttcacaaacacatttgaagaggctttttctcaggattcttaaccttcccaaaggaagtcccatggatgggtttctagaagtctataaatgctctgaaattgtatttttctgtggaaagcataactttcatctgcttgttcgtgctcaaaaaagatcatgaatgaatgattgcatgattttatgccattgtgcttatactaaaggatatgtagcccatctcttgagctgttaaactgttttgactactttaaatcgtgcagctgtgagcatctctgtaaatttagtgtacacatgtatcccctggagtggcattgcctcggcagtgagcacttatggttttataactctcttcacagactcaaatgactccagaaagctacacttcctgttgtgagtatatgatatccatttccctacatagccactaacatcaggtttttacaattttatttatttcttgctactttaagaaatttttgtggtgaaatacatataatagaagttgactatctgaatcatttttaagtatacattcagtagtgttaagtatgtcgccattgttgtacaaccaatctccagaactttttcatcttgcaaaacaaactctgtacccattaaataacattaaacattccattccctccagcctcagcaaccccattctactttctgtttctgtgagtttgactattccaagcacttcatatcagttaaatcatgaagtatttgtctgtctgtgactggcttatttctctgagcacagtgtcctcgagatgcgtctatgttgtagcatatgtcagaatttccttcctttttaaaagatccaaataatattcttattttatatcttttttttatccattcatccattagtggacacttgggttgcttttggctattgtaaataatggtgctatgtacaaatatctatattattgtatttacaagtataatgctgtaatgtacacacatctttttgagatcctaccttcagttcttttgagtatatagccagaagtggtattactaaatcttacgatatttctatttttaatttattgaggaaccactgtagtttttcatagcaactgcaccattttacgttctcaccaagagtgcacaagggttccgaggttcccacatcctccccaacacttgttattttctgctttttttagattgcagccatcatagtgggtgtgaggtgacatttcattgtggttttgatttgcatttccctaatgaggagtgatgctgagcatcttttcatatgcttactggtcatttgtatgttgtctttggaaaaatgtctattcaagtcctttgactattttaaaaattgggttattagagttatcgttgttgttgacttgtaggagtttctttctatattctggatattaatcccctatcagatatatgatttgcaaatatcttctcttattccataaggttactttttcactttgttgattgtgttctttgatgtatagaagtttttagttttgaaatagtctaatttatctgtttttacttttgtggtctgtgcttttggtgtcatatccaagaaatccttgccaaatccaacgttataaggtacttttaaggtattttagttgtcttagtctatatttctgtactcacctttctttatccactcatcagttgatgggcatgtaggttggttccatatctttgcaattctgaattgtgctgtgatcaggtgtctttttagtataatgatttactctcctttgggtagatacccagtagtgggattgctggatcgaatggtttttataattttctattttaccacagtttctctctgcatttttcctctttgaccactaaccatgtgaaattctcatattgacctttataatgatcatgaactcttagtatcattgggaaggccacatttgccacttatgattgtaaaccttatcctccatttttcctgttattgttggtgcaaaaagcacctattataccaggactttaaaaatcagtctgataagtctttgataagtctaataataataactgataagtccattgaatttgcttctgattactttttctttagtagctaaacatgtatgtactcctatgattacaatgaacactcctctccatttaaattaattatttacattgatgaaatagcaaaatgttaatgactaaatactgtcttggttttttcgttccaggtcagtcaatattaacttcttataattttcttttttttctttatgtgtgtgtgtgtgtgtatttttttttttttaatttcaatggcttttggggtacaaatggcttttggtcatatagatgaattctacagtagtgaagtctgagattttactgcaccggtcacctgagtagtgtacattgtacccaatatgtggttttttataccttgcccccctcttaccctccccactttgagtctctagtgtccattatgtcactctgtatacctttttgtacccataagttagctctcacttataagtgagaacacacagtatttggttttccattcctgagttgcttcacttagaataatatcctccagctccatccaaaattgctgcaaaaaaaaaaaaaaccacaaacattattttgttcttttttattgctaagtcatattccatggtgtagagataccacattttatttatccactcactggttgatgggttggttccacatctttgcaattgtgacttgtactgccatcaagtgtctttctggtataatgacttcttttcctttgggtagatacccaggagtgggattgctagatcaaatggttcttaacattttctctctggatctatttctggaaattttaggctccagtttttgttgttgttgttaataaaatgcaatggaatgtaatgatcatcacttttcattatgctttaaaatctggtaaatggaggctagaacactcctgtaaggcaagaatattctctctgttggaactcaaatacacagaactgggtaaatctcaatcttaatctttgattcaggacacaacatggctctcttttacttgctttctttaattgttttttaataatgtggtaagcatttctgaatctcctatccaatacaaaaactaggacaatacagacagtaactcctatggttacaatgaacactcctctccacttaaattaattatttacactgatgaaattgaaatagcaaaattttaatgactaaatactgtctttgattttttgttccaggtctgtcaatattaacttcttataattttctttttttttctttatgtgtgtgtgtgtgtgtatatatatatatatttaatttcaatggcttttggggtacaaatggcttttggtcatatatatgagttctacagtagtgaagtctgagattttactacaccttccacttatgtggtcccacaccacccgcctcccctgccgcct

SEQ ID NO: 467107 - DNA, 11127 bp, Homo sapiens
  misc_feature (90)..(90): n is a, c, g, or t
  misc_feature (152)..(152): n is a, c, g, or t
cagtgagcaacgtgggcttgtgagagtgggggggcctctcacaagaagtgtaggcatgcattgtgtcagataaggttgggaggagactgngacaagatcaagggcagggggcaggggcaggaggctggtagtgctgtggcccagatattggncagaagtacagggaggatctcctcagggcttcaggggacagacagggagagatgactgagttagatgagactagggggcgggctgggggtgcgagaaggaagcttggcaaggagactaggtctagggggaccacagtggggcaggctgcatggaaaatatccgcagggtcccccaggcagaacagccacgctccaggccaggctgtccctactgcctggtggagggggaacttgacctctgggagggcgccgctcttgcatagctgagcgagcccgggtgcgctggtctgtgtggaaggaggaaggcagggagaggtagaaggggtggaggagtcaggaggaataggccgcagcagccctggaaatgatcaggaaggcaggcagtgggtgcagggctgcaggagggccgggagggctaatcttcaacttgtccatgccagcagcccctttttttccagaccaagggctgtgaacccgcctggggatgaggcctggtcttgtggaactgaacttagctcgacggggctgaccgctctggcccagggtggtatgtaattttcgctcggcctgggacggggcccaggccgggcccagcctggtggagcgtccaggtctgggtgcgaagccaggcccctgggcggaggtgaggggtggtctgaggagtgatgtggagttaaggcgccatcctcaccggtgactggtgcggcacctagcatgtttgacaggcggggactgcgaggcacgctgctcgggtgttggggacaacattgaccaacgctttattttccaggtggcagtgctccttttggacttttctctaggtttggcgctaaactcttcttgtgagctcactccaccccttcttcctccctttaacttatccattcacttaaaacattagctggtcatctggtaagcccgggacagtaagccgagtggctgttggagtcggtattgttggtaatggtggaggaagagaggccttcccgctgaggctggggtggggcggatcggtgttgcttgcctgcagagagggtggggagtgaatgtgcacccttgggtgggcctgcagccatccagctgaaagttacaaaaatgcttcatggaccgtggtttgttactatagtgttcctcatggcgagcagatggaaccgggagacatggagtccctggccagtgtgagtcctagcattgcaggaggggagaccctggaggagagagcccgcctcaattgatgcctgcagattgaatttccagaggcttaggaggaggaagttctccaatgttctgtttccaggccttgctcaggaagccctgtattcaggaggctaccatttaaagtttgcagatgagcttatggggggcaatcttaaaaagtccacagcagatgcatccggctcgaggggccatcagctttgaataaatgcttgttccagagcccatgaatgccagcaggcacccctcctttcctggggtaaaggttttcagatgctgcatcttctaaattgagcctccggtcatactagttttgtgcttggaaccttgcttcaagaagatccctaagctgtagaacattttaacgttgatgccacaacgcagattgatgccttgtagatggagcttgcagatggagccccgtgacctctcacctacccacctgtttgcctgccttcttgtgcgtttctcggagaagttcttagcctgatgaaataacttggggcgttgaagagctgtttaattttaaatgccttagactggggatatattagaggaagcagattgtcaaattaagggtgtcattgtgttgtgctaaacgctgggagggtacaagttggtcattcctaaatctgtgtgtgagaaatggcaggtctagtttgggcattgtgattgcattgcagattactaggagaagggaatggtgggtacaccggtagtgctcttttgttcttgcttcgtttttttaaacttgaactttacttcgttagatttcataatactttcttggcattctagtaagaggaccctgaggtgggagttgtgggggacggggagaaggggacagcttggcaccggtcccgtgggcgttgcagtgtgggggatgggggtatgcagcttggcactggtactgggagggatgagggtgaagaaggggagagggttggttagagatacagtgtgggtggtgggggtggtaggaaatgcaggttgaagggaattctctggggctttggggaatttagtgcgtgggtgagccaagaaaatactaattaataatagtaagttgttagtgttggttaagttgttgcttggaagtgagaagttgcttagaaactttccaaagtgcttagaactttaagtgcaaacagacaaactaacaaacaaaaattgttttgctttgctacaaggtggggaagactgaagaagtgttaactgaaaacaggtgacacagagtcaccagttttccgagaaccaaagggaggggtgtgtgatgccatctcacaggcaggggaaatgtctttaccagcttcctcctggtggccaagacagcctgtttcagagggttgttttgtttggggtgtgggtgttatcaagtgaattagtcacttgaaagatgggcgtcagacttgcatacgcagcagatcagcatccttcgctgccccttagcaacttaggtggttgatttgaaactgtgaaggtgtgattttttcaggagctggaagtcttagaaaagccttgtaaatgcctatattgtgggcttttaacgtatttaagggaccacttaagacgagattagatgggctcttctggatttgttcctcatttgtcacaggtgtcttgtgattgaaaatcatgagcgaagtgaaattgcattgaatttcaagggaatttagtatgtaaatcgtgccttagaaacacatctgttgtcttttctgtgtttggtcgatattaataatggcaaaatttttgcctatctagtatcttcaaattgtagtctttgtaacaaccaaataaccttttgtggtcactgtaaaattaatatttggtagacagaatccatgtacctttgctaaggttagaatgaataatttattgtatttttaatttgaatgtttgtgctttttaaatgagccaagactagaggggaaactatcacctaaaatcagtttggaaaacaagacctaaaaagggaaggggatggggattgtggggagagagtgggcgaggtgcctttactggctttttatcatttccttcttccctttaagtttcacttgaaattttaaaaatcatggttatttttatcgttgggatctttctgtcttctgggttccattttttaaatgtttaaaaatatgttgacatggtagttcagttcttaaccaatgacttggggatgatgcaaacaattactgtcgttgggatttagagtgtattagtcacgcatgtatggggaagtagtctcgggtatgctgttgtgaaattgaaactgtaaaagtagatggttgaaagtactggtatgttgctctgtatggtaagaactaattctgttacgtcatgtacataattactaatcacttttcttcccctttacagcacaaataaagtttgagttctaaaactcattagaattgttgtattgctatgttacatttctcgacccctatcacattgccttcataacgactttggatgtatcttcatattgtagatttaggtctagatttgctagctccaagtaattaaggccatgtaggagagcatggtaaccacagatagaactggtattatcccaagtggtctgcagactgctgagtggggatgggatctgctctctgttgagagttggtaatcattggtttgaaatgtgatgaaaccactcaagccaatgaaggtgggtgtgtaggtggggagtactttgccataatattttaaaacattacctggttagagttctaagtggtacttatttttgtttggttaggggaaagcctgaataaaaacagaaatggacacataatatgcatattccatagtctttgggaggctggaatgtgcctgggatttgggtctaagtgtatgcgtaattcttacctcactaaagaatttgccttgtttttttccttttggtgagtgactaaaacgtctgggcttccctgtgtgcgtgctacagtaagcaagcagaggctgtgcaaaggtgtgagcaggatcacgtggaatctggaggatacatcttggcttgcaaactgcctctgtctcctgggtgggactgttctgtccttgcactgctgttctgtgttacctcttggggtgtaaggttttgcttacaggagacaaactttgggcgtagaatggaagccactgccagcctctgtgctgagaaggaaggtgcttgtttcaaagggagcagcaagggaggcttgttctactcacctgggcctgtttgcctgagaaggggagataagggctgaactgggactagccagggggaccaacacaaatggtgggggatcatgacctgaaggattctttccttcccatgagctgcagggctggttgccgtccttgcaactgtgtcttatttgcctgtgccgttatatcttggtgacccctccacgtgtacactactgacaaacgggtggagtgctggggagaagtcactgtgccgcccacctagtaaaccttctgtctgtgctcatggcatctccaagatggggcactgctgtgtgcagaatccagggtcctctttctgcttgcaactcctttccctggatgccccagaaacaatccaggcctcctttcctatcttacccctttgctttgctttttaccccagcacctctataaccgccttctcttcttttcagaactccttgtttctcatcctgttttttatgattacaaaactcttgcttccaccctggaagataactgctatagatgcctgtatgtaaatggtgctgtctccagcaactggcatgctgaagaagaattgattcacggggtataaatgttggggattggaagtggggatgaaatggcacttgttgatacaggagcagagaggtgaggccgactgctgaagacagctcgccaccctccttgcctccactccaatccaggggctggggccacattctttgccttcatttatcctcagatcaggtgagatcgacaggaggtgttgatggcagtgccagcaattattgctaatccgtttgcatccttatgcatagatctgaattcagactttgtgaatttccagaggtgtgggtaatataatagaattcagtgagtgggcatggctgatcttgtgcaaattaaaagttatggggcataagaatagcaaaagttgaacttcttttaaaaaggaaagtaccctgagagccagtattggttgaggctcttcagtatgcccaggttggcagcactgagaaccgcaggaacggcctgttgttacaaaaaggagattgactcagctgcccttggtgcatctgactgactatgactgctgagagattccaaggacccttaatgccagggctaacctctccatgtgcagtgagacctctggaggaagtgtcatcctctggctttgtgtggtactcattatggtgcagtgcgggcatgaaatgaagacacccaaataggcttacagatacgatatgttttaaatgttcgtatttaacaaaaacatactgacactgtttggaaatggcaacaggaagatagcaaaatgaatactaacattacgaaaagatgaacaggtacatgttccaaggcaggtggctgtgaacttcctctgagtgaaggcatcccctccagcacctttcagcctgctagttaggacgacccgccgccaccctccaggacctccagccctgcactgcctttcctctcttttaaataattcttcattgagttctaatatgtaaaaaaaaaaagtttactgtaaagtttgcaaataaggaaattttttttaaaagtcctcagtaatcttaccagtaacaattgttatgggcacatttgcttttggaagatttcttttgtatgcatgggataagtacatttttaaacaaaaatgggattatgccataaattctattttgtgactttaatatatagtgaacaccttttttaatgatgacaggatgttcccttgcatggctgtatcaatttaaacaatcttgtttcaatgggcatacagggtattttctagtttttttttcctcttagaaaataatacttgcgatgactttccttgtagctcagactttttcacgtctgttgttatctctttgggaatgctgaatacatacatttcgagaaggaaatgactgttaaactcttaagacttcaggttcatattgctaaactgcccagcagggagggattttttcaattagtgttctcactggtgaggcaaacctgatgccttcccctcttcctcagaaccggctttatcacattgaaaacctttgctcctccgacggatcgagtctgctttccctgtggatgtgagcattgctttgtctgctggtgactgaacatctctaccatgtgtcaattggccatttgtggtgtgtgtgtgtgtgcgtgtgtgtgtgtgtgtgtgtgtgtatgattttctaattcctagtcatttttctattgattgttttgcaaaagccatttacatcttaaggatattgataatcttttgttatatttgatgcaaatatttttttccagtttataggttgccttttaattttgtgtttcaggtagataaaagttaaacgattttcttaggttagtttatcactgtggtttctgaacttgttatgtgtagatcttttccaccccaagagtacataaatattaatccatactttcttatggaacttgtatggtttcgttttttacatttaaaccttcttccccgtggtgtgtgttgtggaatctgtgtttgtgtgaggaggggcatggtgctctcagaacccacctcctgtggccagagagccctgtcctgtgagggtggttatcacagtggcagggttcaattcagaagaccttgagggcaggctgatgtttcctgaatgggcccctggttgttgcttgtccctgactctccatttccccatctgagtggatttggacctaatagggcactggagctggttcgaatcctgactggactacttggcaactttatgtctgggagcaagttacttaacctccccaagcctgtgtctgtgaaatgcgggtaaatgaatgtagatgtttggcagcagctactccttgttgagctctcacagtgaactctcctgcctctgccctccttccccgcctcccctggtgcctagcgtcaggtctagccacttcctcctgggcccctctcccttttctgtggctggctgcctgcccgcctggcgctggacctttcatgtaacgggaatcagcatgtatattctggtctggtctgtttctacacttaattttgtttccagtagtatttccctgtaccggcagagttcacaaacacatttgaagaggctttttctcaggattcttaaccttcccaaaggaagtcccatggatgggtttctagaagtctataaatgctctgaaattgtatttttctgtggaaagcataactttcatctgcttgttcgtgctcaaaaaagatcatgaatgaatgattgcatgattttatgccattgtgcttatactaaaggatatgtagcccatctcttgagctgttaaactgttttgactactttaaatcgtgcagctgtgagcatctctgtaaatttagtgtacacatgtatcccctggagtggcattgcctcggcagtgagcacttatggttttataactctcttcacagactcaaatgactccagaaagctacacttcctgttgtgagtatatgatatccatttccctacatagccactaacatcaggtttttacaattttatttatttcttgctactttaagaaatttttgtggtgaaatacatataatagaagttgactatctgaatcatttttaagtatacattcagtagtgttaagtatgtcgccattgttgtacaaccaatctccagaactttttcatcttgcaaaacaaactctgtacccattaaataacattaaacattccattccctccagcctcagcaaccccattctactttctgtttctgtgagtttgactattccaagcacttcatatcagttaaatcatgaagtatttgtctgtctgtgactggcttatttctctgagcacagtgtcctcgagatgcgtctatgttgtagcatatgtcagaatttccttcctttttaaaagatccaaataatattcttattttatatcttttttttatccattcatccattagtggacacttgggttgcttttggctattgtaaataatggtgctatgtacaaatatctatattattgtatttacaagtataatgctgtaatgtacacacatctttttgagatcctaccttcagttcttttgagtatatagccagaagtggtattactaaatcttacgatatttctatttttaatttattgaggaaccactgtagtttttcatagcaactgcaccattttacgttctcaccaagagtgcacaagggttccgaggttcccacatcctccccaacacttgttattttctgctttttttagattgcagccatcatagtgggtgtgaggtgacatttcattgtggttttgatttgcatttccctaatgaggagtgatgctgagcatcttttcatatgcttactggtcatttgtatgttgtctttggaaaaatgtctattcaagtcctttgactattttaaaaattgggttattagagttatcgttgttgttgacttgtaggagtttctttctatattctggatattaatcccctatcagatatatgatttgcaaatatcttctcttattccataaggttactttttcactttgttgattgtgttctttgatgtatagaagtttttagttttgaaatagtctaatttatctgtttttacttttgtggtctgtgcttttggtgtcatatccaagaaatccttgccaaatccaacgttataaggtacttttaaggtattttagttgtcttagtctatatttctgtactcacctttctttatccactcatcagttgatgggcatgtaggttggttccatatctttgcaattctgaattgtgctgtgatcaggtgtctttttagtataatgatttactctcctttgggtagatacccagtagtgggattgctggatcgaatggtttttataattttctattttaccacagtttctctctgcatttttcctctttgaccactaaccatgtgaaattctcatattgacctttataatgatcatgaactcttagtatcattgggaaggccacatttgccacttatgattgtaaaccttatcctccatttttcctgttattgttggtgcaaaaagcacctattataccaggactttaaaaatcagtctgataagtctttgataagtctaataataataactgataagtccattgaatttgcttctgattactttttctttagtagctaaacatgtatgtactcctatgattacaatgaacactcctctccatttaaattaattatttacattgatgaaatagcaaaatgttaatgactaaatactgtcttggttttttcgttccaggtcagtcaatattaacttcttataattttcttttttttctttatgtgtgtgtgtgtgtgtatttttttttttttaatttcaatggcttttggggtacaaatggcttttggtcatatagatgaattctacagtagtgaagtctgagattttactgcaccggtcacctgagtagtgtacattgtacccaatatgtggttttttataccttgcccccctcttaccctccccactttgagtctctagtgtccattatgtcactctgtatacctttttgtacccataagttagctctcacttataagtgagaacacacagtatttggttttccattcctgagttgcttcacttagaataatatcctccagctccatccaaaattgctgcaaaaaaaaaaaaaaccacaaacattattttgttcttttttattgctaagtcatattccatggtgtagagataccacattttatttatccactcactggttgatgggttggttccacatctttgcaattgtgacttgtactgccatcaagtgtctttctggtataatgacttcttttcctttgggtagatacccaggagtgggattgctagatcaaatggttcttaacattttctctctggatctatttctggaaattttaggctccagtttttgttgttgttgttaataaaatgcaatggaatgtaatgatcatcacttttcattatgctttaaaatctggtaaatggaggctagaacactcctgtaaggcaagaatattctctctgttggaactcaaatacacagaactgggtaaatctcaatcttaatctttgattcaggacacaacatggctctcttttacttgctttctttaattgttttttaataatgtggtaagcatttctgaatctcctatccaatacaaaaactaggacaatacagacagtaactcctatggttacaatgaacactcctctccacttaaattaattatttacactgatgaaattgaaatagcaaaattttaatgactaaatactgtctttgattttttgttccaggtctgtcaatattaacttcttataattttctttttttttctttatgtgtgtgtgtgtgtgtatatatatatatatttaatttcaatggcttttggggtacaaatggcttttggtcatatatatgagttctacagtagtgaagtctgagattttactacaccttccacttatgtggtcccacaccacccgcctcccctgccgcct

SEQ ID NO: 467108 - DNA, 11127 bp, Homo sapiens
  misc_feature (90)..(90): n is a, c, g, or t
  misc_feature (152)..(152): n is a, c, g, or t
cagtgagcaacgtgggcttgtgagagtgggggggcctctcacaagaagtgtaggcatgcattgtgtcagataaggttgggaggagactgngacaagatcaagggcagggggcaggggcaggaggctggtagtgctgtggcccagatattggncagaagtacagggaggatctcctcagggcttcaggggacagacagggagagatgactgagttagatgagactagggggcgggctgggggtgcgagaaggaagcttggcaaggagactaggtctagggggaccacagtggggcaggctgcatggaaaatatccgcagggtcccccaggcagaacagccacgctccaggccaggctgtccctactgcctggtggagggggaacttgacctctgggagggcgccgctcttgcatagctgagcgagcccgggtgcgctggtctgtgtggaaggaggaaggcagggagaggtagaaggggtggaggagtcaggaggaataggccgcagcagccctggaaatgatcaggaaggcaggcagtgggtgcagggctgcaggagggccgggagggctaatcttcaacttgtccatgccagcagcccctttttttccagaccaagggctgtgaacccgcctggggatgaggcctggtcttgtggaactgaacttagctcgacggggctgaccgctctggcccagggtggtatgtaattttcgctcggcctgggacggggcccaggccgggcccagcctggtggagcgtccaggtctgggtgcgaagccaggcccctgggcggaggtgaggggtggtctgaggagtgatgtggagttaaggcgccatcctcaccggtgactggtgcggcacctagcatgtttgacaggcggggactgcgaggcacgctgctcgggtgttggggacaacattgaccaacgctttattttccaggtggcagtgctccttttggacttttctctaggtttggcgctaaactcttcttgtgagctcactccaccccttcttcctccctttaacttatccattcacttaaaacattagctggtcatctggtaagcccgggacagtaagccgagtggctgttggagtcggtattgttggtaatggtggaggaagagaggccttcccgctgaggctggggtggggcggatcggtgttgcttgcctgcagagagggtggggagtgaatgtgcacccttgggtgggcctgcagccatccagctgaaagttacaaaaatgcttcatggaccgtggtttgttactatagtgttcctcatggcgagcagatggaaccgggagacatggagtccctggccagtgtgagtcctagcattgcaggaggggagaccctggaggagagagcccgcctcaattgatgcctgcagattgaatttccagaggcttaggaggaggaagttctccaatgttctgtttccaggccttgctcaggaagccctgtattcaggaggctaccatttaaagtttgcagatgagcttatggggggcaatcttaaaaagtccacagcagatgcatccggctcgaggggccatcagctttgaataaatgcttgttccagagcccatgaatgccagcaggcacccctcctttcctggggtaaaggttttcagatgctgcatcttctaaattgagcctccggtcatactagttttgtgcttggaaccttgcttcaagaagatccctaagctgtagaacattttaacgttgatgccacaacgcagattgatgccttgtagatggagcttgcagatggagccccgtgacctctcacctacccacctgtttgcctgccttcttgtgcgtttctcggagaagttcttagcctgatgaaataacttggggcgttgaagagctgtttaattttaaatgccttagactggggatatattagaggaagcagattgtcaaattaagggtgtcattgtgttgtgctaaacgctgggagggtacaagttggtcattcctaaatctgtgtgtgagaaatggcaggtctagtttgggcattgtgattgcattgcagattactaggagaagggaatggtgggtacaccggtagtgctcttttgttcttgcttcgtttttttaaacttgaactttacttcgttagatttcataatactttcttggcattctagtaagaggaccctgaggtgggagttgtgggggacggggagaaggggacagcttggcaccggtcccgtgggcgttgcagtgtgggggatgggggtatgcagcttggcactggtactgggagggatgagggtgaagaaggggagagggttggttagagatacagtgtgggtggtgggggtggtaggaaatgcaggttgaagggaattctctggggctttggggaatttagtgcgtgggtgagccaagaaaatactaattaataatagtaagttgttagtgttggttaagttgttgcttggaagtgagaagttgcttagaaactttccaaagtgcttagaactttaagtgcaaacagacaaactaacaaacaaaaattgttttgctttgctacaaggtggggaagactgaagaagtgttaactgaaaacaggtgacacagagtcaccagttttccgagaaccaaagggaggggtgtgtgatgccatctcacaggcaggggaaatgtctttaccagcttcctcctggtggccaagacagcctgtttcagagggttgttttgtttggggtgtgggtgttatcaagtgaattagtcacttgaaagatgggcgtcagacttgcatacgcagcagatcagcatccttcgctgccccttagcaacttaggtggttgatttgaaactgtgaaggtgtgattttttcaggagctggaagtcttagaaaagccttgtaaatgcctatattgtgggcttttaacgtatttaagggaccacttaagacgagattagatgggctcttctggatttgttcctcatttgtcacaggtgtcttgtgattgaaaatcatgagcgaagtgaaattgcattgaatttcaagggaatttagtatgtaaatcgtgccttagaaacacatctgttgtcttttctgtgtttggtcgatattaataatggcaaaatttttgcctatctagtatcttcaaattgtagtctttgtaacaaccaaataaccttttgtggtcactgtaaaattaatatttggtagacagaatccatgtacctttgctaaggttagaatgaataatttattgtatttttaatttgaatgtttgtgctttttaaatgagccaagactagaggggaaactatcacctaaaatcagtttacatgtgtgatctgaaaaccctgcttggttctgagctgcgtctattgaattggtaaagtaataccaatggctttttatcatttccttcttccctttaagtttcacttgaaattttaaaaatcatggttatttttatcgttgggatctttctgtcttctgggttccattttttaaatgtttaaaaatatgttgacatggtagttcagttcttaaccaatgacttggggatgatgcaaacaattactgtcgttgggatttagagtgtattagtcacgcatgtatggggaagtagtctcgggtatgctgttgtgaaattgaaactgtaaaagtagatggttgaaagtactggtatgttgctctgtatggtaagaactaattctgttacgtcatgtacataattactaatcacttttcttcccctttacagcacaaataaagtttgagttctaaaactcattagaattgttgtattgctatgttacatttctcgacccctatcacattgccttcataacgactttggatgtatcttcatattgtagatttaggtctagatttgctagctccaagtaattaaggccatgtaggagagcatggtaaccacagatagaactggtattatcccaagtggtctgcagactgctgagtggggatgggatctgctctctgttgagagttggtaatcattggtttgaaatgtgatgaaaccactcaagccaatgaaggtgggtgtgtaggtggggagtactttgccataatattttaaaacattacctggttagagttctaagtggtacttatttttgtttggttaggggaaagcctgaataaaaacagaaatggacacataatatgcatattccatagtctttgggaggctggaatgtgcctgggatttgggtctaagtgtatgcgtaattcttacctcactaaagaatttgccttgtttttttccttttggtgagtgactaaaacgtctgggcttccctgtgtgcgtgctacagtaagcaagcagaggctgtgcaaaggtgtgagcaggatcacgtggaatctggaggatacatcttggcttgcaaactgcctctgtctcctgggtgggactgttctgtccttgcactgctgttctgtgttacctcttggggtgtaaggttttgcttacaggagacaaactttgggcgtagaatggaagccactgccagcctctgtgctgagaaggaaggtgcttgtttcaaagggagcagcaagggaggcttgttctactcacctgggcctgtttgcctgagaaggggagataagggctgaactgggactagccagggggaccaacacaaatggtgggggatcatgacctgaaggattctttccttcccatgagctgcagggctggttgccgtccttgcaactgtgtcttatttgcctgtgccgttatatcttggtgacccctccacgtgtacactactgacaaacgggtggagtgctggggagaagtcactgtgccgcccacctagtaaaccttctgtctgtgctcatggcatctccaagatggggcactgctgtgtgcagaatccagggtcctctttctgcttgcaactcctttccctggatgccccagaaacaatccaggcctcctttcctatcttacccctttgctttgctttttaccccagcacctctataaccgccttctcttcttttcagaactccttgtttctcatcctgttttttatgattacaaaactcttgcttccaccctggaagataactgctatagatgcctgtatgtaaatggtgctgtctccagcaactggcatgctgaagaagaattgattcacggggtataaatgttggggattggaagtggggatgaaatggcacttgttgatacaggagcagagaggtgaggccgactgctgaagacagctcgccaccctccttgcctccactccaatccaggggctggggccacattctttgccttcatttatcctcagatcaggtgagatcgacaggaggtgttgatggcagtgccagcaattattgctaatccgtttgcatccttatgcatagatctgaattcagactttgtgaatttccagaggtgtgggtaatataatagaattcagtgagtgggcatggctgatcttgtgcaaattaaaagttatggggcataagaatagcaaaagttgaacttcttttaaaaaggaaagtaccctgagagccagtattggttgaggctcttcagtatgcccaggttggcagcactgagaaccgcaggaacggcctgttgttacaaaaaggagattgactcagctgcccttggtgcatctgactgactatgactgctgagagattccaaggacccttaatgccagggctaacctctccatgtgcagtgagacctctggaggaagtgtcatcctctggctttgtgtggtactcattatggtgcagtgcgggcatgaaatgaagacacccaaataggcttacagatacgatatgttttaaatgttcgtatttaacaaaaacatactgacactgtttggaaatggcaacaggaagatagcaaaatgaatactaacattacgaaaagatgaacaggtacatgttccaaggcaggtggctgtgaacttcctctgagtgaaggcatcccctccagcacctttcagcctgctagttaggacgacccgccgccaccctccaggacctccagccctgcactgcctttcctctcttttaaataattcttcattgagttctaatatgtaaaaaaaaaaagtttactgtaaagtttgcaaataaggaaattttttttaaaagtcctcagtaatcttaccagtaacaattgttatgggcacatttgcttttggaagatttcttttgtatgcatgggataagtacatttttaaacaaaaatgggattatgccataaattctattttgtgactttaatatatagtgaacaccttttttaatgatgacaggatgttcccttgcatggctgtatcaatttaaacaatcttgtttcaatgggcatacagggtattttctagtttttttttcctcttagaaaataatacttgcgatgactttccttgtagctcagactttttcacgtctgttgttatctctttgggaatgctgaatacatacatttcgagaaggaaatgactgttaaactcttaagacttcaggttcatattgctaaactgcccagcagggagggattttttcaattagtgttctcactggtgaggcaaacctgatgccttcccctcttcctcagaaccggctttatcacattgaaaacctttgctcctccgacggatcgagtctgctttccctgtggatgtgagcattgctttgtctgctggtgactgaacatctctaccatgtgtcaattggccatttgtggtgtgtgtgtgtgtgcgtgtgtgtgtgtgtgtgtgtgtgtatgattttctaattcctagtcatttttctattgattgttttgcaaaagccatttacatcttaaggatattgataatcttttgttatatttgatgcaaatatttttttccagtttataggttgccttttaattttgtgtttcaggtagataaaagttaaacgattttcttaggttagtttatcactgtggtttctgaacttgttatgtgtagatcttttccaccccaagagtacataaatattaatccatactttcttatggaacttgtatggtttcgttttttacatttaaaccttcttccccgtggtgtgtgttgtggaatctgtgtttgtgtgaggaggggcatggtgctctcagaacccacctcctgtggccagagagccctgtcctgtgagggtggttatcacagtggcagggttcaattcagaagaccttgagggcaggctgatgtttcctgaatgggcccctggttgttgcttgtccctgactctccatttccccatctgagtggatttggacctaatagggcactggagctggttcgaatcctgactggactacttggcaactttatgtctgggagcaagttacttaacctccccaagcctgtgtctgtgaaatgcgggtaaatgaatgtagatgtttggcagcagctactccttgttgagctctcacagtgaactctcctgcctctgccctccttccccgcctcccctggtgcctagcgtcaggtctagccacttcctcctgggcccctctcccttttctgtggctggctgcctgcccgcctggcgctggacctttcatgtaacgggaatcagcatgtatattctggtctggtctgtttctacacttaattttgtttccagtagtatttccctgtaccggcagagttcacaaacacatttgaagaggctttttctcaggattcttaaccttcccaaaggaagtcccatggatgggtttctagaagtctataaatgctctgaaattgtatttttctgtggaaagcataactttcatctgcttgttcgtgctcaaaaaagatcatgaatgaatgattgcatgattttatgccattgtgcttatactaaaggatatgtagcccatctcttgagctgttaaactgttttgactactttaaatcgtgcagctgtgagcatctctgtaaatttagtgtacacatgtatcccctggagtggcattgcctcggcagtgagcacttatggttttataactctcttcacagactcaaatgactccagaaagctacacttcctgttgtgagtatatgatatccatttccctacatagccactaacatcaggtttttacaattttatttatttcttgctactttaagaaatttttgtggtgaaatacatataatagaagttgactatctgaatcatttttaagtatacattcagtagtgttaagtatgtcgccattgttgtacaaccaatctccagaactttttcatcttgcaaaacaaactctgtacccattaaataacattaaacattccattccctccagcctcagcaaccccattctactttctgtttctgtgagtttgactattccaagcacttcatatcagttaaatcatgaagtatttgtctgtctgtgactggcttatttctctgagcacagtgtcctcgagatgcgtctatgttgtagcatatgtcagaatttccttcctttttaaaagatccaaataatattcttattttatatcttttttttatccattcatccattagtggacacttgggttgcttttggctattgtaaataatggtgctatgtacaaatatctatattattgtatttacaagtataatgctgtaatgtacacacatctttttgagatcctaccttcagttcttttgagtatatagccagaagtggtattactaaatcttacgatatttctatttttaatttattgaggaaccactgtagtttttcatagcaactgcaccattttacgttctcaccaagagtgcacaagggttccgaggttcccacatcctccccaacacttgttattttctgctttttttagattgcagccatcatagtgggtgtgaggtgacatttcattgtggttttgatttgcatttccctaatgaggagtgatgctgagcatcttttcatatgcttactggtcatttgtatgttgtctttggaaaaatgtctattcaagtcctttgactattttaaaaattgggttattagagttatcgttgttgttgacttgtaggagtttctttctatattctggatattaatcccctatcagatatatgatttgcaaatatcttctcttattccataaggttactttttcactttgttgattgtgttctttgatgtatagaagtttttagttttgaaatagtctaatttatctgtttttacttttgtggtctgtgcttttggtgtcatatccaagaaatccttgccaaatccaacgttataaggtacttttaaggtattttagttgtcttagtctatatttctgtactcacctttctttatccactcatcagttgatgggcatgtaggttggttccatatctttgcaattctgaattgtgctgtgatcaggtgtctttttagtataatgatttactctcctttgggtagatacccagtagtgggattgctggatcgaatggtttttataattttctattttaccacagtttctctctgcatttttcctctttgaccactaaccatgtgaaattctcatattgacctttataatgatcatgaactcttagtatcattgggaaggccacatttgccacttatgattgtaaaccttatcctccatttttcctgttattgttggtgcaaaaagcacctattataccaggactttaaaaatcagtctgataagtctttgataagtctaataataataactgataagtccattgaatttgcttctgattactttttctttagtagctaaacatgtatgtactcctatgattacaatgaacactcctctccatttaaattaattatttacattgatgaaatagcaaaatgttaatgactaaatactgtcttggttttttcgttccaggtcagtcaatattaacttcttataattttcttttttttctttatgtgtgtgtgtgtgtgtatttttttttttttaatttcaatggcttttggggtacaaatggcttttggtcatatagatgaattctacagtagtgaagtctgagattttactgcaccggtcacctgagtagtgtacattgtacccaatatgtggttttttataccttgcccccctcttaccctccccactttgagtctctagtgtccattatgtcactctgtatacctttttgtacccataagttagctctcacttataagtgagaacacacagtatttggttttccattcctgagttgcttcacttagaataatatcctccagctccatccaaaattgctgcaaaaaaaaaaaaaaccacaaacattattttgttcttttttattgctaagtcatattccatggtgtagagataccacattttatttatccactcactggttgatgggttggttccacatctttgcaattgtgacttgtactgccatcaagtgtctttctggtataatgacttcttttcctttgggtagatacccaggagtgggattgctagatcaaatggttcttaacattttctctctggatctatttctggaaattttaggctccagtttttgttgttgttgttaataaaatgcaatggaatgtaatgatcatcacttttcattatgctttaaaatctggtaaatggaggctagaacactcctgtaaggcaagaatattctctctgttggaactcaaatacacagaactgggtaaatctcaatcttaatctttgattcaggacacaacatggctctcttttacttgctttctttaattgttttttaataatgtggtaagcatttctgaatctcctatccaatacaaaaactaggacaatacagacagtaactcctatggttacaatgaacactcctctccacttaaattaattatttacactgatgaaattgaaatagcaaaattttaatgactaaatactgtctttgattttttgttccaggtctgtcaatattaacttcttataattttctttttttttctttatgtgtgtgtgtgtgtgtatatatatatatatttaatttcaatggcttttggggtacaaatggcttttggtcatatatatgagttctacagtagtgaagtctgagattttactacaccttccacttatgtggtcccacaccacccgcctcccctgccgcct

SEQ ID NO: 467109 - DNA, 3788 bp, Homo sapiens
  misc_feature (90)..(90): n is a, c, g, or t
  misc_feature (152)..(152): n is a, c, g, or t
cagtgagcaacgtgggcttgtgagagtgggggggcctctcacaagaagtgtaggcatgcattgtgtcagataaggttgggaggagactgngacaagatcaagggcagggggcaggggcaggaggctggtagtgctgtggcccagatattggncagaagtacagggaggatctcctcagggcttcaggggacagacagggagagatgactgagttagatgagactagggggcgggctgggggtgcgagaaggaagcttggcaaggagactaggtctagggggaccacagtggggcaggctgcatggaaaatatccgcagggtcccccaggcagaacagccacgctccaggccaggctgtccctactgcctggtggagggggaacttgacctctgggagggcgccgctcttgcatagctgagcgagcccgggtgcgctggtctgtgtggaaggaggaaggcagggagaggtagaaggggtggaggagtcaggaggaataggccgcagcagccctggaaatgatcaggaaggcaggcagtgggtgcagggctgcaggagggccgggagggctaatcttcaacttgtccatgccagcagcccctttttttccagaccaagggctgtgaacccgcctggggatgaggcctggtcttgtggaactgaacttagctcgacggggctgaccgctctggcccagggtggtatgtaattttcgctcggcctgggacggggcccaggccgggcccagcctggtggagcgtccaggtctgggtgcgaagccaggcccctgggcggaggtgaggggtggtctgaggagtgatgtggagttaaggcgccatcctcaccggtgactggtgcggcacctagcatgtttgacaggcggggactgcgaggcacgctgctcgggtgttggggacaacattgaccaacgctttattttccaggtggcagtgctccttttggacttttctctaggtttggcgctaaactcttcttgtgagctcactccaccccttcttcctccctttaacttatccattcacttaaaacattagctggtcatctggtaagcccgggacagtaagccgagtggctgttggagtcggtattgttggtaatggtggaggaagagaggccttcccgctgaggctggggtggggcggatcggtgttgcttgcctgcagagagggtggggagtgaatgtgcacccttgggtgggcctgcagccatccagctgaaagttacaaaaatgcttcatggaccgtggtttgttactatagtgttcctcatggcgagcagatggaaccgggagacatggagtccctggccagtgtgagtcctagcattgcaggaggggagaccctggaggagagagcccgcctcaattgatgcctgcagattgaatttccagaggcttaggaggaggaagttctccaatgttctgtttccaggccttgctcaggaagccctgtattcaggaggctaccatttaaagtttgcagatgagcttatggggggcaatcttaaaaagtccacagcagatgcatccggctcgaggggccatcagctttgaataaatgcttgttccagagcccatgaatgccagcaggcacccctcctttcctggggtaaaggttttcagatgctgcatcttctaaattgagcctccggtcatactagttttgtgcttggaaccttgcttcaagaagatccctaagctgtagaacattttaacgttgatgccacaacgcagattgatgccttgtagatggagcttgcagatggagccccgtgacctctcacctacccacctgtttgcctgccttcttgtgcgtttctcggagaagttcttagcctgatgaaataacttggggcgttgaagagctgtttaattttaaatgccttagactggggatatattagaggaagcagattgtcaaattaagggtgtcattgtgttgtgctaaacgctgggagggtacaagttggtcattcctaaatctgtgtgtgagaaatggcaggtctagtttgggcattgtgattgcattgcagattactaggagaagggaatggtgggtacaccggtagtgctcttttgttcttgcttcgtttttttaaacttgaactttacttcgttagatttcataatactttcttggcattctagtaagaggaccctgaggtgggagttgtgggggacggggagaaggggacagcttggcaccggtcccgtgggcgttgcagtgtgggggatgggggtatgcagcttggcactggtactgggagggatgagggtgaagaaggggagagggttggttagagatacagtgtgggtggtgggggtggtaggaaatgcaggttgaagggaattctctggggctttggggaatttagtgcgtgggtgagccaagaaaatactaattaataatagtaagttgttagtgttggttaagttgttgcttggaagtgagaagttgcttagaaactttccaaagtgcttagaactttaagtgcaaacagacaaactaacaaacaaaaattgttttgctttgctacaaggtggggaagactgaagaagtgttaactgaaaacaggtgacacagagtcaccagttttccgagaaccaaagggaggggtgtgtgatgccatctcacaggcaggggaaatgtctttaccagcttcctcctggtggccaagacagcctgtttcagagggttgttttgtttggggtgtgggtgttatcaagtgaattagtcacttgaaagatgggcgtcagacttgcatacgcagcagatcagcatccttcgctgccccttagcaacttaggtggttgatttgaaactgtgaaggtgtgattttttcaggagctggaagtcttagaaaagccttgtaaatgcctatattgtgggcttttaacgtatttaagggaccacttaagacgagattagatgggctcttctggatttgttcctcatttgtcacaggtgtcttgtgattgaaaatcatgagcgaagtgaaattgcattgaatttcaagggaatttagtatgtaaatcgtgccttagaaacacatctgttgtcttttctgtgtttggtcgatattaataatggcaaaatttttgcctatctagtatcttcaaattgtagtctttgtaacaaccaaataaccttttgtggtcactgtaaaattaatatttggtagacagaatccatgtacctttgctaaggttagaatgaataatttattgtatttttaatttgaatgtttgtgctttttaaatgagccaagactagaggggaaactatcacctaaaatcagtttggaaaacaagacctaaaaagggaaggggatggggattgtggggagagagtgggcgaggtgcctttactacatgtgtgatctgaaaaccctgcttggttctgagctgcgtctattgaattggtaaagtaataccaatggctttttatcatttccttcttccctttaagtttcacttgaaattttaaaaatcatggttatttttatcgttgggatctttctgtcttctgggttccattttttaaatgtttaaaaatatgttgacatggtagttcagttcttaaccaatgacttggggatgatgcaaacaattactgtcgttgggatttagagtgtattagtcacgcatgtatggggaagtagtctcgggtatgctgttgggtaagaactaattctgttacgtcatgtacataattactaatcacttttcttcccctttacagcacaaataaagtttgagttctaaaactca

SEQ ID NO: 467110 - DNA, 3844 bp, Homo sapiens
  misc_feature (90)..(90): n is a, c, g, or t
  misc_feature (152)..(152): n is a, c, g, or t
cagtgagcaacgtgggcttgtgagagtgggggggcctctcacaagaagtgtaggcatgcattgtgtcagataaggttgggaggagactgngacaagatcaagggcagggggcaggggcaggaggctggtagtgctgtggcccagatattggncagaagtacagggaggatctcctcagggcttcaggggacagacagggagagatgactgagttagatgagactagggggcgggctgggggtgcgagaaggaagcttggcaaggagactaggtctagggggaccacagtggggcaggctgcatggaaaatatccgcagggtcccccaggcagaacagccacgctccaggccaggctgtccctactgcctggtggagggggaacttgacctctgggagggcgccgctcttgcatagctgagcgagcccgggtgcgctggtctgtgtggaaggaggaaggcagggagaggtagaaggggtggaggagtcaggaggaataggccgcagcagccctggaaatgatcaggaaggcaggcagtgggtgcagggctgcaggagggccgggagggctaatcttcaacttgtccatgccagcagcccctttttttccagaccaagggctgtgaacccgcctggggatgaggcctggtcttgtggaactgaacttagctcgacggggctgaccgctctggcccagggtggtatgtaattttcgctcggcctgggacggggcccaggccgggcccagcctggtggagcgtccaggtctgggtgcgaagccaggcccctgggcggaggtgaggggtggtctgaggagtgatgtggagttaaggcgccatcctcaccggtgactggtgcggcacctagcatgtttgacaggcggggactgcgaggcacgctgctcgggtgttggggacaacattgaccaacgctttattttccaggtggcagtgctccttttggacttttctctaggtttggcgctaaactcttcttgtgagctcactccaccccttcttcctccctttaacttatccattcacttaaaacattagctggtcatctggtaagcccgggacagtaagccgagtggctgttggagtcggtattgttggtaatggtggaggaagagaggccttcccgctgaggctggggtggggcggatcggtgttgcttgcctgcagagagggtggggagtgaatgtgcacccttgggtgggcctgcagccatccagctgaaagttacaaaaatgcttcatggaccgtggtttgttactatagtgttcctcatggcgagcagatggaaccgggagacatggagtccctggccagtgtgagtcctagcattgcaggaggggagaccctggaggagagagcccgcctcaattgatgcctgcagattgaatttccagaggcttaggaggaggaagttctccaatgttctgtttccaggccttgctcaggaagccctgtattcaggaggctaccatttaaagtttgcagatgagcttatggggggcaatcttaaaaagtccacagcagatgcatccggctcgaggggccatcagctttgaataaatgcttgttccagagcccatgaatgccagcaggcacccctcctttcctggggtaaaggttttcagatgctgcatcttctaaattgagcctccggtcatactagttttgtgcttggaaccttgcttcaagaagatccctaagctgtagaacattttaacgttgatgccacaacgcagattgatgccttgtagatggagcttgcagatggagccccgtgacctctcacctacccacctgtttgcctgccttcttgtgcgtttctcggagaagttcttagcctgatgaaataacttggggcgttgaagagctgtttaattttaaatgccttagactggggatatattagaggaagcagattgtcaaattaagggtgtcattgtgttgtgctaaacgctgggagggtacaagttggtcattcctaaatctgtgtgtgagaaatggcaggtctagtttgggcattgtgattgcattgcagattactaggagaagggaatggtgggtacaccggtagtgctcttttgttcttgcttcgtttttttaaacttgaactttacttcgttagatttcataatactttcttggcattctagtaagaggaccctgaggtgggagttgtgggggacggggagaaggggacagcttggcaccggtcccgtgggcgttgcagtgtgggggatgggggtatgcagcttggcactggtactgggagggatgagggtgaagaaggggagagggttggttagagatacagtgtgggtggtgggggtggtaggaaatgcaggttgaagggaattctctggggctttggggaatttagtgcgtgggtgagccaagaaaatactaattaataatagtaagttgttagtgttggttaagttgttgcttggaagtgagaagttgcttagaaactttccaaagtgcttagaactttaagtgcaaacagacaaactaacaaacaaaaattgttttgctttgctacaaggtggggaagactgaagaagtgttaactgaaaacaggtgacacagagtcaccagttttccgagaaccaaagggaggggtgtgtgatgccatctcacaggcaggggaaatgtctttaccagcttcctcctggtggccaagacagcctgtttcagagggttgttttgtttggggtgtgggtgttatcaagtgaattagtcacttgaaagatgggcgtcagacttgcatacgcagcagatcagcatccttcgctgccccttagcaacttaggtggttgatttgaaactgtgaaggtgtgattttttcaggagctggaagtcttagaaaagccttgtaaatgcctatattgtgggcttttaacgtatttaagggaccacttaagacgagattagatgggctcttctggatttgttcctcatttgtcacaggtgtcttgtgattgaaaatcatgagcgaagtgaaattgcattgaatttcaagggaatttagtatgtaaatcgtgccttagaaacacatctgttgtcttttctgtgtttggtcgatattaataatggcaaaatttttgcctatctagtatcttcaaattgtagtctttgtaacaaccaaataaccttttgtggtcactgtaaaattaatatttggtagacagaatccatgtacctttgctaaggttagaatgaataatttattgtatttttaatttgaatgtttgtgctttttaaatgagccaagactagaggggaaactatcacctaaaatcagtttggaaaacaagacctaaaaagggaaggggatggggattgtggggagagagtgggcgaggtgcctttactacatgtgtgatctgaaaaccctgcttggttctgagctgcgtctattgaattggtaaagtaataccaatggctttttatcatttccttcttccctttaagtttcacttgaaattttaaaaatcatggttatttttatcgttgggatctttctgtcttctgggttccattttttaaatgtttaaaaatatgttgacatggtagttcagttcttaaccaatgacttggggatgatgcaaacaattactgtcgttgggatttagagtgtattagtcacgcatgtatggggaagtagtctcgggtatgctgttgttcatcagtttacacgaaaaaagaaacaacacattccctctccaaacagagatgatcccttaaaaaaacaaacaaacaaaaacgatactggtggttaataaaattcatccacatacattagacaacattcataaaactaaacaaagtc

SEQ ID NO: 467111 - DNA, 4143 bp, Homo sapiens
  misc_feature (90)..(90): n is a, c, g, or t
  misc_feature (152)..(152): n is a, c, g, or t
cagtgagcaacgtgggcttgtgagagtgggggggcctctcacaagaagtgtaggcatgcattgtgtcagataaggttgggaggagactgngacaagatcaagggcagggggcaggggcaggaggctggtagtgctgtggcccagatattggncagaagtacagggaggatctcctcagggcttcaggggacagacagggagagatgactgagttagatgagactagggggcgggctgggggtgcgagaaggaagcttggcaaggagactaggtctagggggaccacagtggggcaggctgcatggaaaatatccgcagggtcccccaggcagaacagccacgctccaggccaggctgtccctactgcctggtggagggggaacttgacctctgggagggcgccgctcttgcatagctgagcgagcccgggtgcgctggtctgtgtggaaggaggaaggcagggagaggtagaaggggtggaggagtcaggaggaataggccgcagcagccctggaaatgatcaggaaggcaggcagtgggtgcagggctgcaggagggccgggagggctaatcttcaacttgtccatgccagcagcccctttttttccagaccaagggctgtgaacccgcctggggatgaggcctggtcttgtggaactgaacttagctcgacggggctgaccgctctggcccagggtggtatgtaattttcgctcggcctgggacggggcccaggccgggcccagcctggtggagcgtccaggtctgggtgcgaagccaggcccctgggcggaggtgaggggtggtctgaggagtgatgtggagttaaggcgccatcctcaccggtgactggtgcggcacctagcatgtttgacaggcggggactgcgaggcacgctgctcgggtgttggggacaacattgaccaacgctttattttccaggtggcagtgctccttttggacttttctctaggtttggcgctaaactcttcttgtgagctcactccaccccttcttcctccctttaacttatccattcacttaaaacattagctggtcatctggtaagcccgggacagtaagccgagtggctgttggagtcggtattgttggtaatggtggaggaagagaggccttcccgctgaggctggggtggggcggatcggtgttgcttgcctgcagagagggtggggagtgaatgtgcacccttgggtgggcctgcagccatccagctgaaagttacaaaaatgcttcatggaccgtggtttgttactatagtgttcctcatggcgagcagatggaaccgggagacatggagtccctggccagtgtgagtcctagcattgcaggaggggagaccctggaggagagagcccgcctcaattgatgcctgcagattgaatttccagaggcttaggaggaggaagttctccaatgttctgtttccaggccttgctcaggaagccctgtattcaggaggctaccatttaaagtttgcagatgagcttatggggggcaatcttaaaaagtccacagcagatgcatccggctcgaggggccatcagctttgaataaatgcttgttccagagcccatgaatgccagcaggcacccctcctttcctggggtaaaggttttcagatgctgcatcttctaaattgagcctccggtcatactagttttgtgcttggaaccttgcttcaagaagatccctaagctgtagaacattttaacgttgatgccacaacgcagattgatgccttgtagatggagcttgcagatggagccccgtgacctctcacctacccacctgtttgcctgccttcttgtgcgtttctcggagaagttcttagcctgatgaaataacttggggcgttgaagagctgtttaattttaaatgccttagactggggatatattagaggaagcagattgtcaaattaagggtgtcattgtgttgtgctaaacgctgggagggtacaagttggtcattcctaaatctgtgtgtgagaaatggcaggtctagtttgggcattgtgattgcattgcagattactaggagaagggaatggtgggtacaccggtagtgctcttttgttcttgcttcgtttttttaaacttgaactttacttcgttagatttcataatactttcttggcattctagtaagaggaccctgaggtgggagttgtgggggacggggagaaggggacagcttggcaccggtcccgtgggcgttgcagtgtgggggatgggggtatgcagcttggcactggtactgggagggatgagggtgaagaaggggagagggttggttagagatacagtgtgggtggtgggggtggtaggaaatgcaggttgaagggaattctctggggctttggggaatttagtgcgtgggtgagccaagaaaatactaattaataatagtaagttgttagtgttggttaagttgttgcttggaagtgagaagttgcttagaaactttccaaagtgcttagaactttaagtgcaaacagacaaactaacaaacaaaaattgttttgctttgctacaaggtggggaagactgaagaagtgttaactgaaaacaggtgacacagagtcaccagttttccgagaaccaaagggaggggtgtgtgatgccatctcacaggcaggggaaatgtctttaccagcttcctcctggtggccaagacagcctgtttcagagggttgttttgtttggggtgtgggtgttatcaagtgaattagtcacttgaaagatgggcgtcagacttgcatacgcagcagatcagcatccttcgctgccccttagcaacttaggtggttgatttgaaactgtgaaggtgtgattttttcaggagctggaagtcttagaaaagccttgtaaatgcctatattgtgggcttttaacgtatttaagggaccacttaagacgagattagatgggctcttctggatttgttcctcatttgtcacaggtgtcttgtgattgaaaatcatgagcgaagtgaaattgcattgaatttcaagggaatttagtatgtaaatcgtgccttagaaacacatctgttgtcttttctgtgtttggtcgatattaataatggcaaaatttttgcctatctagtatcttcaaattgtagtctttgtaacaaccaaataaccttttgtggtcactgtaaaattaatatttggtagacagaatccatgtacctttgctaaggttagaatgaataatttattgtatttttaatttgaatgtttgtgctttttaaatgagccaagactagaggggaaactatcacctaaaatcagtttggaaaacaagacctaaaaagggaaggggatggggattgtggggagagagtgggcgaggtgcctttactacatgtgtgatctgaaaaccctgcttggttctgagctgcgtctattgaattggtaaagtaataccaatggctttttatcatttccttcttccctttaagtttcacttgaaattttaaaaatcatggttatttttatcgttgggatctttctgtcttctgggttccattttttaaatgtttaaaaatatgttgacatggtagttcagttcttaaccaatgacttggggatgatgcaaacaattactgtcgttgggatttagagtgtattagtcacgcatgtatggggaagtagtctcgggtatgctgttgttaatcagtttacacaatgtatcaatttccacgtatttgtatagtttccaaaattattcttgttattaatttctagttttacttcattgtgggcagagaagatagttggtactatttcagtttttctgaatgttttaagacttgttttgtgacctaacatatgatctgttcttgagaatgatgcatatgctgaggaaaagaatgtatattctatagctgttggatggaatgttctgtaaatgtctattagatccatttggtctgcagtgcagattaggtctgatgtttctttgctggttttctgtcaacaaagtatagctactcctgctcttttttggtttccattggcatggaatatctttttgcacccctttattttcagtctgtgtgtctttataggggaggtgtgtttcctgtagtcagcagatcagtgaggtaccgacctat

SEQ ID NO: 467112 - DNA, 10855 bp, Homo sapiens
  misc_feature (90)..(90): n is a, c, g, or t
  misc_feature (152)..(152): n is a, c, g, or t
cagtgagcaacgtgggcttgtgagagtgggggggcctctcacaagaagtgtaggcatgcattgtgtcagataaggttgggaggagactgngacaagatcaagggcagggggcaggggcaggaggctggtagtgctgtggcccagatattggncagaagtacagggaggatctcctcagggcttcaggggacagacagggagagatgactgagttagatgagactagggggcgggctgggggtgcgagaaggaagcttggcaaggagactaggtctagggggaccacagtggggcaggctgcatggaaaatatccgcagggtcccccaggcagaacagccacgctccaggccaggctgtccctactgcctggtggagggggaacttgacctctgggagggcgccgctcttgcatagctgagcgagcccgggtgcgctggtctgtgtggaaggaggaaggcagggagaggtagaaggggtggaggagtcaggaggaataggccgcagcagccctggaaatgatcaggaaggcaggcagtgggtgcagggctgcaggagggccgggagggctaatcttcaacttgtccatgccagcagcccctttttttccagaccaagggctgtgaacccgcctggggatgaggcctggtcttgtggaactgaacttagctcgacggggctgaccgctctggcccagggtggtatgtaattttcgctcggcctgggacggggcccaggccgggcccagcctggtggagcgtccaggtctgggtgcgaagccaggcccctgggcggaggtgaggggtggtctgaggagtgatgtggagttaaggcgccatcctcaccggtgactggtgcggcacctagcatgtttgacaggcggggactgcgaggcacgctgctcgggtgttggggacaacattgaccaacgctttattttccaggtggcagtgctccttttggacttttctctaggtttggcgctaaactcttcttgtgagctcactccaccccttcttcctccctttaacttatccattcacttaaaacattagctggtcatctggtaagcccgggacagtaagccgagtggctgttggagtcggtattgttggtaatggtggaggaagagaggccttcccgctgaggctggggtggggcggatcggtgttgcttgcctgcagagagggtggggagtgaatgtgcacccttgggtgggcctgcagccatccagctgaaagttacaaaaatgcttcatggaccgtggtttgttactatagtgttcctcatggcgagcagatggaaccgggagacatggagtccctggccagtgtgagtcctagcattgcaggaggggagaccctggaggagagagcccgcctcaattgatgcctgcagattgaatttccagaggcttaggaggaggaagttctccaatgttctgtttccaggccttgctcaggaagccctgtattcaggaggctaccatttaaagtttgcagatgagcttatggggggcaatcttaaaaagtccacagcagatgcatccggctcgaggggccatcagctttgaataaatgcttgttccagagcccatgaatgccagcaggcacccctcctttcctggggtaaaggttttcagatgctgcatcttctaaattgagcctccggtcatactagttttgtgcttggaaccttgcttcaagaagatccctaagctgtagaacattttaacgttgatgccacaacgcagattgatgccttgtagatggagcttgcagatggagccccgtgacctctcacctacccacctgtttgcctgccttcttgtgcgtttctcggagaagttcttagcctgatgaaataacttggggcgttgaagagctgtttaattttaaatgccttagactggggatatattagaggaagcagattgtcaaattaagggtgtcattgtgttgtgctaaacgctgggagggtacaagttggtcattcctaaatctgtgtgtgagaaatggcaggtctagtttgggcattgtgattgcattgcagattactaggagaagggaatggtgggtacaccggtagtgctcttttgttcttgcttcgtttttttaaacttgaactttacttcgttagatttcataatactttcttggcattctagtaagaggaccctgaggtgggagttgtgggggacggggagaaggggacagcttggcaccggtcccgtgggcgttgcagtgtgggggatgggggtatgcagcttggcactggtactgggagggatgagggtgaagaaggggagagggttggttagagatacagtgtgggtggtgggggtggtaggaaatgcaggttgaagggaattctctggggctttggggaatttagtgcgtgggtgagccaagaaaatactaattaataatagtaagttgttagtgttggttaagttgttgcttggaagtgagaagttgcttagaaactttccaaagtgcttagaactttaagtgcaaacagacaaactaacaaacaaaaattgttttgctttgctacaaggtggggaagactgaagaagtgttaactgaaaacaggtgacacagagtcaccagttttccgagaaccaaagggaggggtgtgtgatgccatctcacaggcaggggaaatgtctttaccagcttcctcctggtggccaagacagcctgtttcagagggttgttttgtttggggtgtgggtgttatcaagtgaattagtcacttgaaagatgggcgtcagacttgcatacgcagcagatcagcatccttcgctgccccttagcaacttaggtggttgatttgaaactgtgaaggtgtgattttttcaggagctggaagtcttagaaaagccttgtaaatgcctatattgtgggcttttaacgtatttaagggaccacttaagacgagattagatgggctcttctggatttgttcctcatttgtcacaggtgtcttgtgattgaaaatcatgagcgaagtgaaattgcattgaatttcaagggaatttagtatgacatgtgtgatctgaaaaccctgcttggttctgagctgcgtctattgaattggtaaagtaataccaatggctttttatcatttccttcttccctttaagtttcacttgaaattttaaaaatcatggttatttttatcgttgggatctttctgtcttctgggttccattttttaaatgtttaaaaatatgttgacatggtagttcagttcttaaccaatgacttggggatgatgcaaacaattactgtcgttgggatttagagtgtattagtcacgcatgtatggggaagtagtctcgggtatgctgttgtgaaattgaaactgtaaaagtagatggttgaaagtactggtatgttgctctgtatggtaagaactaattctgttacgtcatgtacataattactaatcacttttcttcccctttacagcacaaataaagtttgagttctaaaactcattagaattgttgtattgctatgttacatttctcgacccctatcacattgccttcataacgactttggatgtatcttcatattgtagatttaggtctagatttgctagctccaagtaattaaggccatgtaggagagcatggtaaccacagatagaactggtattatcccaagtggtctgcagactgctgagtggggatgggatctgctctctgttgagagttggtaatcattggtttgaaatgtgatgaaaccactcaagccaatgaaggtgggtgtgtaggtggggagtactttgccataatattttaaaacattacctggttagagttctaagtggtacttatttttgtttggttaggggaaagcctgaataaaaacagaaatggacacataatatgcatattccatagtctttgggaggctggaatgtgcctgggatttgggtctaagtgtatgcgtaattcttacctcactaaagaatttgccttgtttttttccttttggtgagtgactaaaacgtctgggcttccctgtgtgcgtgctacagtaagcaagcagaggctgtgcaaaggtgtgagcaggatcacgtggaatctggaggatacatcttggcttgcaaactgcctctgtctcctgggtgggactgttctgtccttgcactgctgttctgtgttacctcttggggtgtaaggttttgcttacaggagacaaactttgggcgtagaatggaagccactgccagcctctgtgctgagaaggaaggtgcttgtttcaaagggagcagcaagggaggcttgttctactcacctgggcctgtttgcctgagaaggggagataagggctgaactgggactagccagggggaccaacacaaatggtgggggatcatgacctgaaggattctttccttcccatgagctgcagggctggttgccgtccttgcaactgtgtcttatttgcctgtgccgttatatcttggtgacccctccacgtgtacactactgacaaacgggtggagtgctggggagaagtcactgtgccgcccacctagtaaaccttctgtctgtgctcatggcatctccaagatggggcactgctgtgtgcagaatccagggtcctctttctgcttgcaactcctttccctggatgccccagaaacaatccaggcctcctttcctatcttacccctttgctttgctttttaccccagcacctctataaccgccttctcttcttttcagaactccttgtttctcatcctgttttttatgattacaaaactcttgcttccaccctggaagataactgctatagatgcctgtatgtaaatggtgctgtctccagcaactggcatgctgaagaagaattgattcacggggtataaatgttggggattggaagtggggatgaaatggcacttgttgatacaggagcagagaggtgaggccgactgctgaagacagctcgccaccctccttgcctccactccaatccaggggctggggccacattctttgccttcatttatcctcagatcaggtgagatcgacaggaggtgttgatggcagtgccagcaattattgctaatccgtttgcatccttatgcatagatctgaattcagactttgtgaatttccagaggtgtgggtaatataatagaattcagtgagtgggcatggctgatcttgtgcaaattaaaagttatggggcataagaatagcaaaagttgaacttcttttaaaaaggaaagtaccctgagagccagtattggttgaggctcttcagtatgcccaggttggcagcactgagaaccgcaggaacggcctgttgttacaaaaaggagattgactcagctgcccttggtgcatctgactgactatgactgctgagagattccaaggacccttaatgccagggctaacctctccatgtgcagtgagacctctggaggaagtgtcatcctctggctttgtgtggtactcattatggtgcagtgcgggcatgaaatgaagacacccaaataggcttacagatacgatatgttttaaatgttcgtatttaacaaaaacatactgacactgtttggaaatggcaacaggaagatagcaaaatgaatactaacattacgaaaagatgaacaggtacatgttccaaggcaggtggctgtgaacttcctctgagtgaaggcatcccctccagcacctttcagcctgctagttaggacgacccgccgccaccctccaggacctccagccctgcactgcctttcctctcttttaaataattcttcattgagttctaatatgtaaaaaaaaaaagtttactgtaaagtttgcaaataaggaaattttttttaaaagtcctcagtaatcttaccagtaacaattgttatgggcacatttgcttttggaagatttcttttgtatgcatgggataagtacatttttaaacaaaaatgggattatgccataaattctattttgtgactttaatatatagtgaacaccttttttaatgatgacaggatgttcccttgcatggctgtatcaatttaaacaatcttgtttcaatgggcatacagggtattttctagtttttttttcctcttagaaaataatacttgcgatgactttccttgtagctcagactttttcacgtctgttgttatctctttgggaatgctgaatacatacatttcgagaaggaaatgactgttaaactcttaagacttcaggttcatattgctaaactgcccagcagggagggattttttcaattagtgttctcactggtgaggcaaacctgatgccttcccctcttcctcagaaccggctttatcacattgaaaacctttgctcctccgacggatcgagtctgctttccctgtggatgtgagcattgctttgtctgctggtgactgaacatctctaccatgtgtcaattggccatttgtggtgtgtgtgtgtgtgcgtgtgtgtgtgtgtgtgtgtgtgtatgattttctaattcctagtcatttttctattgattgttttgcaaaagccatttacatcttaaggatattgataatcttttgttatatttgatgcaaatatttttttccagtttataggttgccttttaattttgtgtttcaggtagataaaagttaaacgattttcttaggttagtttatcactgtggtttctgaacttgttatgtgtagatcttttccaccccaagagtacataaatattaatccatactttcttatggaacttgtatggtttcgttttttacatttaaaccttcttccccgtggtgtgtgttgtggaatctgtgtttgtgtgaggaggggcatggtgctctcagaacccacctcctgtggccagagagccctgtcctgtgagggtggttatcacagtggcagggttcaattcagaagaccttgagggcaggctgatgtttcctgaatgggcccctggttgttgcttgtccctgactctccatttccccatctgagtggatttggacctaatagggcactggagctggttcgaatcctgactggactacttggcaactttatgtctgggagcaagttacttaacctccccaagcctgtgtctgtgaaatgcgggtaaatgaatgtagatgtttggcagcagctactccttgttgagctctcacagtgaactctcctgcctctgccctccttccccgcctcccctggtgcctagcgtcaggtctagccacttcctcctgggcccctctcccttttctgtggctggctgcctgcccgcctggcgctggacctttcatgtaacgggaatcagcatgtatattctggtctggtctgtttctacacttaattttgtttccagtagtatttccctgtaccggcagagttcacaaacacatttgaagaggctttttctcaggattcttaaccttcccaaaggaagtcccatggatgggtttctagaagtctataaatgctctgaaattgtatttttctgtggaaagcataactttcatctgcttgttcgtgctcaaaaaagatcatgaatgaatgattgcatgattttatgccattgtgcttatactaaaggatatgtagcccatctcttgagctgttaaactgttttgactactttaaatcgtgcagctgtgagcatctctgtaaatttagtgtacacatgtatcccctggagtggcattgcctcggcagtgagcacttatggttttataactctcttcacagactcaaatgactccagaaagctacacttcctgttgtgagtatatgatatccatttccctacatagccactaacatcaggtttttacaattttatttatttcttgctactttaagaaatttttgtggtgaaatacatataatagaagttgactatctgaatcatttttaagtatacattcagtagtgttaagtatgtcgccattgttgtacaaccaatctccagaactttttcatcttgcaaaacaaactctgtacccattaaataacattaaacattccattccctccagcctcagcaaccccattctactttctgtttctgtgagtttgactattccaagcacttcatatcagttaaatcatgaagtatttgtctgtctgtgactggcttatttctctgagcacagtgtcctcgagatgcgtctatgttgtagcatatgtcagaatttccttcctttttaaaagatccaaataatattcttattttatatcttttttttatccattcatccattagtggacacttgggttgcttttggctattgtaaataatggtgctatgtacaaatatctatattattgtatttacaagtataatgctgtaatgtacacacatctttttgagatcctaccttcagttcttttgagtatatagccagaagtggtattactaaatcttacgatatttctatttttaatttattgaggaaccactgtagtttttcatagcaactgcaccattttacgttctcaccaagagtgcacaagggttccgaggttcccacatcctccccaacacttgttattttctgctttttttagattgcagccatcatagtgggtgtgaggtgacatttcattgtggttttgatttgcatttccctaatgaggagtgatgctgagcatcttttcatatgcttactggtcatttgtatgttgtctttggaaaaatgtctattcaagtcctttgactattttaaaaattgggttattagagttatcgttgttgttgacttgtaggagtttctttctatattctggatattaatcccctatcagatatatgatttgcaaatatcttctcttattccataaggttactttttcactttgttgattgtgttctttgatgtatagaagtttttagttttgaaatagtctaatttatctgtttttacttttgtggtctgtgcttttggtgtcatatccaagaaatccttgccaaatccaacgttataaggtacttttaaggtattttagttgtcttagtctatatttctgtactcacctttctttatccactcatcagttgatgggcatgtaggttggttccatatctttgcaattctgaattgtgctgtgatcaggtgtctttttagtataatgatttactctcctttgggtagatacccagtagtgggattgctggatcgaatggtttttataattttctattttaccacagtttctctctgcatttttcctctttgaccactaaccatgtgaaattctcatattgacctttataatgatcatgaactcttagtatcattgggaaggccacatttgccacttatgattgtaaaccttatcctccatttttcctgttattgttggtgcaaaaagcacctattataccaggactttaaaaatcagtctgataagtctttgataagtctaataataataactgataagtccattgaatttgcttctgattactttttctttagtagctaaacatgtatgtactcctatgattacaatgaacactcctctccatttaaattaattatttacattgatgaaatagcaaaatgttaatgactaaatactgtcttggttttttcgttccaggtcagtcaatattaacttcttataattttcttttttttctttatgtgtgtgtgtgtgtgtatttttttttttttaatttcaatggcttttggggtacaaatggcttttggtcatatagatgaattctacagtagtgaagtctgagattttactgcaccggtcacctgagtagtgtacattgtacccaatatgtggttttttataccttgcccccctcttaccctccccactttgagtctctagtgtccattatgtcactctgtatacctttttgtacccataagttagctctcacttataagtgagaacacacagtatttggttttccattcctgagttgcttcacttagaataatatcctccagctccatccaaaattgctgcaaaaaaaaaaaaaaccacaaacattattttgttcttttttattgctaagtcatattccatggtgtagagataccacattttatttatccactcactggttgatgggttggttccacatctttgcaattgtgacttgtactgccatcaagtgtctttctggtataatgacttcttttcctttgggtagatacccaggagtgggattgctagatcaaatggttcttaacattttctctctggatctatttctggaaattttaggctccagtttttgttgttgttgttaataaaatgcaatggaatgtaatgatcatcacttttcattatgctttaaaatctggtaaatggaggctagaacactcctgtaaggcaagaatattctctctgttggaactcaaatacacagaactgggtaaatctcaatcttaatctttgattcaggacacaacatggctctcttttacttgctttctttaattgttttttaataatgtggtaagcatttctgaatctcctatccaatacaaaaactaggacaatacagacagtaactcctatggttacaatgaacactcctctccacttaaattaattatttacactgatgaaattgaaatagcaaaattttaatgactaaatactgtctttgattttttgttccaggtctgtcaatattaacttcttataattttctttttttttctttatgtgtgtgtgtgtgtgtatatatatatatatttaatttcaatggcttttggggtacaaatggcttttggtcatatatatgagttctacagtagtgaagtctgagattttactacaccttccacttatgtggtcccacaccacccgcctcccctgccgcct

SEQ ID NO: 467113 - DNA, 3586 bp, Homo sapiens
  misc_feature (90)..(90): n is a, c, g, or t
  misc_feature (152)..(152): n is a, c, g, or t
cagtgagcaacgtgggcttgtgagagtgggggggcctctcacaagaagtgtaggcatgcattgtgtcagataaggttgggaggagactgngacaagatcaagggcagggggcaggggcaggaggctggtagtgctgtggcccagatattggncagaagtacagggaggatctcctcagggcttcaggggacagacagggagagatgactgagttagatgagactagggggcgggctgggggtgcgagaaggaagcttggcaaggagactaggtctagggggaccacagtggggcaggctgcatggaaaatatccgcagggtcccccaggcagaacagccacgctccaggccaggctgtccctactgcctggtggagggggaacttgacctctgggagggcgccgctcttgcatagctgagcgagcccgggtgcgctggtctgtgtggaaggaggaaggcagggagaggtagaaggggtggaggagtcaggaggaataggccgcagcagccctggaaatgatcaggaaggcaggcagtgggtgcagggctgcaggagggccgggagggctaatcttcaacttgtccatgccagcagcccctttttttccagaccaagggctgtgaacccgcctggggatgaggcctggtcttgtggaactgaacttagctcgacggggctgaccgctctggcccagggtggtatgtaattttcgctcggcctgggacggggcccaggccgggcccagcctggtggagcgtccaggtctgggtgcgaagccaggcccctgggcggaggtgaggggtggtctgaggagtgatgtggagttaaggcgccatcctcaccggtgactggtgcggcacctagcatgtttgacaggcggggactgcgaggcacgctgctcgggtgttggggacaacattgaccaacgctttattttccaggtggcagtgctccttttggacttttctctaggtttggcgctaaactcttcttgtgagctcactccaccccttcttcctccctttaacttatccattcacttaaaacattagctggtcatctggtaagcccgggacagtaagccgagtggctgttggagtcggtattgttggtaatggtggaggaagagaggccttcccgctgaggctggggtggggcggatcggtgttgcttgcctgcagagagggtggggagtgaatgtgcacccttgggtgggcctgcagccatccagctgaaagttacaaaaatgcttcatggaccgtggtttgttactatagtgttcctcatggcgagcagatggaaccgggagacatggagtccctggccagtgtgagtcctagcattgcaggaggggagaccctggaggagagagcccgcctcaattgatgcctgcagattgaatttccagaggcttaggaggaggaagttctccaatgttctgtttccaggccttgctcaggaagccctgtattcaggaggctaccatttaaagtttgcagatgagcttatggggggcaatcttaaaaagtccacagcagatgcatccggctcgaggggccatcagctttgaataaatgcttgttccagagcccatgaatgccagcaggcacccctcctttcctggggtaaaggttttcagatgctgcatcttctaaattgagcctccggtcatactagttttgtgcttggaaccttgcttcaagaagatccctaagctgtagaacattttaacgttgatgccacaacgcagattgatgccttgtagatggagcttgcagatggagccccgtgacctctcacctacccacctgtttgcctgccttcttgtgcgtttctcggagaagttcttagcctgatgaaataacttggggcgttgaagagctgtttaattttaaatgccttagactggggatatattagaggaagcagattgtcaaattaagggtgtcattgtgttgtgctaaacgctgggagggtacaagttggtcattcctaaatctgtgtgtgagaaatggcaggtctagtttgggcattgtgattgcattgcagattactaggagaagggaatggtgggtacaccggtagtgctcttttgttcttgcttcgtttttttaaacttgaactttacttcgttagatttcataatactttcttggcattctagtaagaggaccctgaggtgggagttgtgggggacggggagaaggggacagcttggcaccggtcccgtgggcgttgcagtgtgggggatgggggtatgcagcttggcactggtactgggagggatgagggtgaagaaggggagagggttggttagagatacagtgtgggtggtgggggtggtaggaaatgcaggttgaagggaattctctggggctttggggaatttagtgcgtgggtgagccaagaaaatactaattaataatagtaagttgttagtgttggttaagttgttgcttggaagtgagaagttgcttagaaactttccaaagtgcttagaactttaagtgcaaacagacaaactaacaaacaaaaattgttttgctttgctacaaggtggggaagactgaagaagtgttaactgaaaacaggtgacacagagtcaccagttttccgagaaccaaagggaggggtgtgtgatgccatctcacaggcaggggaaatgtctttaccagcttcctcctggtggccaagacagcctgtttcagagggttgttttgtttggggtgtgggtgttatcaagtgaattagtcacttgaaagatgggcgtcagacttgcatacgcagcagatcagcatccttcgctgccccttagcaacttaggtggttgatttgaaactgtgaaggtgtgattttttcaggagctggaagtcttagaaaagccttgtaaatgcctatattgtgggcttttaacgtatttaagggaccacttaagacgagattagatgggctcttctggatttgttcctcatttgtcacaggtgtcttgtgattgaaaatcatgagcgaagtgaaattgcattgaatttcaagggaatttagtatgtaaatcgtgccttagaaacacatctgttgtcttttctgtgtttggtcgatattaataatggcaaaatttttgcctatctagtatcttcaaattgtagtctttgtaacaaccaaataaccttttgtggtcactgtaaaattaatatttggtagacagaatccatgtacctttgctaaggttagaatgaataatttattgtatttttaatttgaatgtttgtgctttttaaatgagccaagactagaggggaaactatcacctaaaatcagtttggaaaacaagacctaaaaagggaaggggatggggattgtggggagagagtgggcgaggtgcctttactacatgtgtgatctgaaaaccctgcttggttctgagctgcgtctattgaattggtaaagtaataccaatggctttttatcatttccttcttccctttaagtttcacttgaaattttaaaaatcatggttatttttatcgttgggatctttctgtcttctgggttccatttttcgtttgggatcctcagatcaccccacag

SEQ ID NO: 467114 - DNA, 3636 bp, Homo sapiens
  misc_feature (90)..(90): n is a, c, g, or t
  misc_feature (152)..(152): n is a, c, g, or t
cagtgagcaacgtgggcttgtgagagtgggggggcctctcacaagaagtgtaggcatgcattgtgtcagataaggttgggaggagactgngacaagatcaagggcagggggcaggggcaggaggctggtagtgctgtggcccagatattggncagaagtacagggaggatctcctcagggcttcaggggacagacagggagagatgactgagttagatgagactagggggcgggctgggggtgcgagaaggaagcttggcaaggagactaggtctagggggaccacagtggggcaggctgcatggaaaatatccgcagggtcccccaggcagaacagccacgctccaggccaggctgtccctactgcctggtggagggggaacttgacctctgggagggcgccgctcttgcatagctgagcgagcccgggtgcgctggtctgtgtggaaggaggaaggcagggagaggtagaaggggtggaggagtcaggaggaataggccgcagcagccctggaaatgatcaggaaggcaggcagtgggtgcagggctgcaggagggccgggagggctaatcttcaacttgtccatgccagcagcccctttttttccagaccaagggctgtgaacccgcctggggatgaggcctggtcttgtggaactgaacttagctcgacggggctgaccgctctggcccagggtggtatgtaattttcgctcggcctgggacggggcccaggccgggcccagcctggtggagcgtccaggtctgggtgcgaagccaggcccctgggcggaggtgaggggtggtctgaggagtgatgtggagttaaggcgccatcctcaccggtgactggtgcggcacctagcatgtttgacaggcggggactgcgaggcacgctgctcgggtgttggggacaacattgaccaacgctttattttccaggtggcagtgctccttttggacttttctctaggtttggcgctaaactcttcttgtgagctcactccaccccttcttcctccctttaacttatccattcacttaaaacattagctggtcatctggtaagcccgggacagtaagccgagtggctgttggagtcggtattgttggtaatggtggaggaagagaggccttcccgctgaggctggggtggggcggatcggtgttgcttgcctgcagagagggtggggagtgaatgtgcacccttgggtgggcctgcagccatccagctgaaagttacaaaaatgcttcatggaccgtggtttgttactatagtgttcctcatggcgagcagatggaaccgggagacatggagtccctggccagtgtgagtcctagcattgcaggaggggagaccctggaggagagagcccgcctcaattgatgcctgcagattgaatttccagaggcttaggaggaggaagttctccaatgttctgtttccaggccttgctcaggaagccctgtattcaggaggctaccatttaaagtttgcagatgagcttatggggggcaatcttaaaaagtccacagcagatgcatccggctcgaggggccatcagctttgaataaatgcttgttccagagcccatgaatgccagcaggcacccctcctttcctggggtaaaggttttcagatgctgcatcttctaaattgagcctccggtcatactagttttgtgcttggaaccttgcttcaagaagatccctaagctgtagaacattttaacgttgatgccacaacgcagattgatgccttgtagatggagcttgcagatggagccccgtgacctctcacctacccacctgtttgcctgccttcttgtgcgtttctcggagaagttcttagcctgatgaaataacttggggcgttgaagagctgtttaattttaaatgccttagactggggatatattagaggaagcagattgtcaaattaagggtgtcattgtgttgtgctaaacgctgggagggtacaagttggtcattcctaaatctgtgtgtgagaaatggcaggtctagtttgggcattgtgattgcattgcagattactaggagaagggaatggtgggtacaccggtagtgctcttttgttcttgcttcgtttttttaaacttgaactttacttcgttagatttcataatactttcttggcattctagtaagaggaccctgaggtgggagttgtgggggacggggagaaggggacagcttggcaccggtcccgtgggcgttgcagtgtgggggatgggggtatgcagcttggcactggtactgggagggatgagggtgaagaaggggagagggttggttagagatacagtgtgggtggtgggggtggtaggaaatgcaggttgaagggaattctctggggctttggggaatttagtgcgtgggtgagccaagaaaatactaattaataatagtaagttgttagtgttggttaagttgttgcttggaagtgagaagttgcttagaaactttccaaagtgcttagaactttaagtgcaaacagacaaactaacaaacaaaaattgttttgctttgctacaaggtggggaagactgaagaagtgttaactgaaaacaggtgacacagagtcaccagttttccgagaaccaaagggaggggtgtgtgatgccatctcacaggcaggggaaatgtctttaccagcttcctcctggtggccaagacagcctgtttcagagggttgttttgtttggggtgtgggtgttatcaagtgaattagtcacttgaaagatgggcgtcagacttgcatacgcagcagatcagcatccttcgctgccccttagcaacttaggtggttgatttgaaactgtgaaggtgtgattttttcaggagctggaagtcttagaaaagccttgtaaatgcctatattgtgggcttttaacgtatttaagggaccacttaagacgagattagatgggctcttctggatttgttcctcatttgtcacaggtgtcttgtgattgaaaatcatgagcgaagtgaaattgcattgaatttcaagggaatttagtatgtaaatcgtgccttagaaacacatctgttgtcttttctgtgtttggtcgatattaataatggcaaaatttttgcctatctagtatcttcaaattgtagtctttgtaacaaccaaataaccttttgtggtcactgtaaaattaatatttggtagacagaatccatgtacctttgctaaggttagaatgaataatttattgtatttttaatttgaatgtttgtgctttttaaatgagccaagactagaggggaaactatcacctaaaatcagtttggaaaacaagacctaaaaagggaaggggatggggattgtggggagagagtgggcgaggtgcctttactacatgtgtgatctgaaaaccctgcttggttctgagctgcgtctattgaattggtaaagtaataccaatggctttttatcatttccttcttccctttaagtttcacttgaaattttaaaaatcatggttatttttatcgttgggatctttctgtcttctgggttccatttttatcaatcactgtcgctggaatcacagtgttttagtccccccgtttggtgaatacactcggacttctgttttaaataga

SEQ ID NO: 467115 - DNA, 3761 bp, Homo sapiens
  misc_feature (90)..(90): n is a, c, g, or t
  misc_feature (152)..(152): n is a, c, g, or t
  misc_feature (3661)..(3661): n is a, c, g, or t
  misc_feature (3747)..(3747): n is a, c, g, or t
cagtgagcaacgtgggcttgtgagagtgggggggcctctcacaagaagtgtaggcatgcattgtgtcagataaggttgggaggagactgngacaagatcaagggcagggggcaggggcaggaggctggtagtgctgtggcccagatattggncagaagtacagggaggatctcctcagggcttcaggggacagacagggagagatgactgagttagatgagactagggggcgggctgggggtgcgagaaggaagcttggcaaggagactaggtctagggggaccacagtggggcaggctgcatggaaaatatccgcagggtcccccaggcagaacagccacgctccaggccaggctgtccctactgcctggtggagggggaacttgacctctgggagggcgccgctcttgcatagctgagcgagcccgggtgcgctggtctgtgtggaaggaggaaggcagggagaggtagaaggggtggaggagtcaggaggaataggccgcagcagccctggaaatgatcaggaaggcaggcagtgggtgcagggctgcaggagggccgggagggctaatcttcaacttgtccatgccagcagcccctttttttccagaccaagggctgtgaacccgcctggggatgaggcctggtcttgtggaactgaacttagctcgacggggctgaccgctctggcccagggtggtatgtaattttcgctcggcctgggacggggcccaggccgggcccagcctggtggagcgtccaggtctgggtgcgaagccaggcccctgggcggaggtgaggggtggtctgaggagtgatgtggagttaaggcgccatcctcaccggtgactggtgcggcacctagcatgtttgacaggcggggactgcgaggcacgctgctcgggtgttggggacaacattgaccaacgctttattttccaggtggcagtgctccttttggacttttctctaggtttggcgctaaactcttcttgtgagctcactccaccccttcttcctccctttaacttatccattcacttaaaacattagctggtcatctggtaagcccgggacagtaagccgagtggctgttggagtcggtattgttggtaatggtggaggaagagaggccttcccgctgaggctggggtggggcggatcggtgttgcttgcctgcagagagggtggggagtgaatgtgcacccttgggtgggcctgcagccatccagctgaaagttacaaaaatgcttcatggaccgtggtttgttactatagtgttcctcatggcgagcagatggaaccgggagacatggagtccctggccagtgtgagtcctagcattgcaggaggggagaccctggaggagagagcccgcctcaattgatgcctgcagattgaatttccagaggcttaggaggaggaagttctccaatgttctgtttccaggccttgctcaggaagccctgtattcaggaggctaccatttaaagtttgcagatgagcttatggggggcaatcttaaaaagtccacagcagatgcatccggctcgaggggccatcagctttgaataaatgcttgttccagagcccatgaatgccagcaggcacccctcctttcctggggtaaaggttttcagatgctgcatcttctaaattgagcctccggtcatactagttttgtgcttggaaccttgcttcaagaagatccctaagctgtagaacattttaacgttgatgccacaacgcagattgatgccttgtagatggagcttgcagatggagccccgtgacctctcacctacccacctgtttgcctgccttcttgtgcgtttctcggagaagttcttagcctgatgaaataacttggggcgttgaagagctgtttaattttaaatgccttagactggggatatattagaggaagcagattgtcaaattaagggtgtcattgtgttgtgctaaacgctgggagggtacaagttggtcattcctaaatctgtgtgtgagaaatggcaggtctagtttgggcattgtgattgcattgcagattactaggagaagggaatggtgggtacaccggtagtgctcttttgttcttgcttcgtttttttaaacttgaactttacttcgttagatttcataatactttcttggcattctagtaagaggaccctgaggtgggagttgtgggggacggggagaaggggacagcttggcaccggtcccgtgggcgttgcagtgtgggggatgggggtatgcagcttggcactggtactgggagggatgagggtgaagaaggggagagggttggttagagatacagtgtgggtggtgggggtggtaggaaatgcaggttgaagggaattctctggggctttggggaatttagtgcgtgggtgagccaagaaaatactaattaataatagtaagttgttagtgttggttaagttgttgcttggaagtgagaagttgcttagaaactttccaaagtgcttagaactttaagtgcaaacagacaaactaacaaacaaaaattgttttgctttgctacaaggtggggaagactgaagaagtgttaactgaaaacaggtgacacagagtcaccagttttccgagaaccaaagggaggggtgtgtgatgccatctcacaggcaggggaaatgtctttaccagcttcctcctggtggccaagacagcctgtttcagagggttgttttgtttggggtgtgggtgttatcaagtgaattagtcacttgaaagatgggcgtcagacttgcatacgcagcagatcagcatccttcgctgccccttagcaacttaggtggttgatttgaaactgtgaaggtgtgattttttcaggagctggaagtcttagaaaagccttgtaaatgcctatattgtgggcttttaacgtatttaagggaccacttaagacgagattagatgggctcttctggatttgttcctcatttgtcacaggtgtcttgtgattgaaaatcatgagcgaagtgaaattgcattgaatttcaagggaatttagtatgtaaatcgtgccttagaaacacatctgttgtcttttctgtgtttggtcgatattaataatggcaaaatttttgcctatctagtatcttcaaattgtagtctttgtaacaaccaaataaccttttgtggtcactgtaaaattaatatttggtagacagaatccatgtacctttgctaaggttagaatgaataatttattgtatttttaatttgaatgtttgtgctttttaaatgagccaagactagaggggaaactatcacctaaaatcagtttggaaaacaagacctaaaaagggaaggggatggggattgtggggagagagtgggcgaggtgcctttactacatgtgtgatctgaaaaccctgcttggttctgagctgcgtctattgaattggtaaagtaataccaatggctttttatcatttccttcttccctttaagtttcacttgaaattttaaaaatcatggttatttttatcgttgggatctttctgtcttctgggttccatttttcaactaattttgccccccactcccactcccacccccagatgacatttggcaatgtttgggagacatctttggttgtcataactgtcgagctctactggcatcnagtgagtagaggccaagggatgctgataaacatcctacaatgcacagaacagccctcccatccccaacaaattatccagcccaaanacgagcactcccct

SEQ ID NO: 467116 - DNA, 3446 bp, Homo sapiens
  misc_feature (90)..(90): n is a, c, g, or t
  misc_feature (152)..(152): n is a, c, g, or t
cagtgagcaacgtgggcttgtgagagtgggggggcctctcacaagaagtgtaggcatgcattgtgtcagataaggttgggaggagactgngacaagatcaagggcagggggcaggggcaggaggctggtagtgctgtggcccagatattggncagaagtacagggaggatctcctcagggcttcaggggacagacagggagagatgactgagttagatgagactagggggcgggctgggggtgcgagaaggaagcttggcaaggagactaggtctagggggaccacagtggggcaggctgcatggaaaatatccgcagggtcccccaggcagaacagccacgctccaggccaggctgtccctactgcctggtggagggggaacttgacctctgggagggcgccgctcttgcatagctgagcgagcccgggtgcgctggtctgtgtggaaggaggaaggcagggagaggtagaaggggtggaggagtcaggaggaataggccgcagcagccctggaaatgatcaggaaggcaggcagtgggtgcagggctgcaggagggccgggagggctaatcttcaacttgtccatgccagcagcccctttttttccagaccaagggctgtgaacccgcctggggatgaggcctggtcttgtggaactgaacttagctcgacggggctgaccgctctggcccagggtggtatgtaattttcgctcggcctgggacggggcccaggccgggcccagcctggtggagcgtccaggtctgggtgcgaagccaggcccctgggcggaggtgaggggtggtctgaggagtgatgtggagttaaggcgccatcctcaccggtgactggtgcggcacctagcatgtttgacaggcggggactgcgaggcacgctgctcgggtgttggggacaacattgaccaacgctttattttccaggtggcagtgctccttttggacttttctctaggtttggcgctaaactcttcttgtgagctcactccaccccttcttcctccctttaacttatccattcacttaaaacattagctggtcatctggtaagcccgggacagtaagccgagtggctgttggagtcggtattgttggtaatggtggaggaagagaggccttcccgctgaggctggggtggggcggatcggtgttgcttgcctgcagagagggtggggagtgaatgtgcacccttgggtgggcctgcagccatccagctgaaagttacaaaaatgcttcatggaccgtggtttgttactatagtgttcctcatggcgagcagatggaaccgggagacatggagtccctggccagtgtgagtcctagcattgcaggaggggagaccctggaggagagagcccgcctcaattgatgcctgcagattgaatttccagaggcttaggaggaggaagttctccaatgttctgtttccaggccttgctcaggaagccctgtattcaggaggctaccatttaaagtttgcagatgagcttatggggggcaatcttaaaaagtccacagcagatgcatccggctcgaggggccatcagctttgaataaatgcttgttccagagcccatgaatgccagcaggcacccctcctttcctggggtaaaggttttcagatgctgcatcttctaaattgagcctccggtcatactagttttgtgcttggaaccttgcttcaagaagatccctaagctgtagaacattttaacgttgatgccacaacgcagattgatgccttgtagatggagcttgcagatggagccccgtgacctctcacctacccacctgtttgcctgccttcttgtgcgtttctcggagaagttcttagcctgatgaaataacttggggcgttgaagagctgtttaattttaaatgccttagactggggatatattagaggaagcagattgtcaaattaagggtgtcattgtgttgtgctaaacgctgggagggtacaagttggtcattcctaaatctgtgtgtgagaaatggcaggtctagtttgggcattgtgattgcattgcagattactaggagaagggaatggtgggtacaccggtagtgctcttttgttcttgcttcgtttttttaaacttgaactttacttcgttagatttcataatactttcttggcattctagtaagaggaccctgaggtgggagttgtgggggacggggagaaggggacagcttggcaccggtcccgtgggcgttgcagtgtgggggatgggggtatgcagcttggcactggtactgggagggatgagggtgaagaaggggagagggttggttagagatacagtgtgggtggtgggggtggtaggaaatgcaggttgaagggaattctctggggctttggggaatttagtgcgtgggtgagccaagaaaatactaattaataatagtaagttgttagtgttggttaagttgttgcttggaagtgagaagttgcttagaaactttccaaagtgcttagaactttaagtgcaaacagacaaactaacaaacaaaaattgttttgctttgctacaaggtggggaagactgaagaagtgttaactgaaaacaggtgacacagagtcaccagttttccgagaaccaaagggaggggtgtgtgatgccatctcacaggcaggggaaatgtctttaccagcttcctcctggtggccaagacagcctgtttcagagggttgttttgtttggggtgtgggtgttatcaagtgaattagtcacttgaaagatgggcgtcagacttgcatacgcagcagatcagcatccttcgctgccccttagcaacttaggtggttgatttgaaactgtgaaggtgtgattttttcaggagctggaagtcttagaaaagccttgtaaatgcctatattgtgggcttttaacgtatttaagggaccacttaagacgagattagatgggctcttctggatttgttcctcatttgtcacaggtgtcttgtgattgaaaatcatgagcgaagtgaaattgcattgaatttcaagggaatttagtatgtaaatcgtgccttagaaacacatctgttgtcttttctgtgtttggtcgatattaataatggcaaaatttttgcctatctagtatcttcaaattgtagtctttgtaacaaccaaataaccttttgtggtcactgtaaaattaatatttggtagacagaatccatgtacctttgctaaggttagaatgaataatttattgtatttttaatttgaatgtttgtgctttttaaatgagccaagactagaggggaaactatcacctaaaatcagtttggaaaacaagacctaaaaagggaaggggatggggattgtggggagagagtgggcgaggtgcctttactttgggatcatctagaatagcacacacacattttcttttttttttttttttgtttgttgt

SEQ ID NO: 467117 - DNA, 3605 bp, Homo sapiens
  misc_feature (90)..(90): n is a, c, g, or t
  misc_feature (152)..(152): n is a, c, g, or t
cagtgagcaacgtgggcttgtgagagtgggggggcctctcacaagaagtgtaggcatgcattgtgtcagataaggttgggaggagactgngacaagatcaagggcagggggcaggggcaggaggctggtagtgctgtggcccagatattggncagaagtacagggaggatctcctcagggcttcaggggacagacagggagagatgactgagttagatgagactagggggcgggctgggggtgcgagaaggaagcttggcaaggagactaggtctagggggaccacagtggggcaggctgcatggaaaatatccgcagggtcccccaggcagaacagccacgctccaggccaggctgtccctactgcctggtggagggggaacttgacctctgggagggcgccgctcttgcatagctgagcgagcccgggtgcgctggtctgtgtggaaggaggaaggcagggagaggtagaaggggtggaggagtcaggaggaataggccgcagcagccctggaaatgatcaggaaggcaggcagtgggtgcagggctgcaggagggccgggagggctaatcttcaacttgtccatgccagcagcccctttttttccagaccaagggctgtgaacccgcctggggatgaggcctggtcttgtggaactgaacttagctcgacggggctgaccgctctggcccagggtggtatgtaattttcgctcggcctgggacggggcccaggccgggcccagcctggtggagcgtccaggtctgggtgcgaagccaggcccctgggcggaggtgaggggtggtctgaggagtgatgtggagttaaggcgccatcctcaccggtgactggtgcggcacctagcatgtttgacaggcggggactgcgaggcacgctgctcgggtgttggggacaacattgaccaacgctttattttccaggtggcagtgctccttttggacttttctctaggtttggcgctaaactcttcttgtgagctcactccaccccttcttcctccctttaacttatccattcacttaaaacattagctggtcatctggtaagcccgggacagtaagccgagtggctgttggagtcggtattgttggtaatggtggaggaagagaggccttcccgctgaggctggggtggggcggatcggtgttgcttgcctgcagagagggtggggagtgaatgtgcacccttgggtgggcctgcagccatccagctgaaagttacaaaaatgcttcatggaccgtggtttgttactatagtgttcctcatggcgagcagatggaaccgggagacatggagtccctggccagtgtgagtcctagcattgcaggaggggagaccctggaggagagagcccgcctcaattgatgcctgcagattgaatttccagaggcttaggaggaggaagttctccaatgttctgtttccaggccttgctcaggaagccctgtattcaggaggctaccatttaaagtttgcagatgagcttatggggggcaatcttaaaaagtccacagcagatgcatccggctcgaggggccatcagctttgaataaatgcttgttccagagcccatgaatgccagcaggcacccctcctttcctggggtaaaggttttcagatgctgcatcttctaaattgagcctccggtcatactagttttgtgcttggaaccttgcttcaagaagatccctaagctgtagaacattttaacgttgatgccacaacgcagattgatgccttgtagatggagcttgcagatggagccccgtgacctctcacctacccacctgtttgcctgccttcttgtgcgtttctcggagaagttcttagcctgatgaaataacttggggcgttgaagagctgtttaattttaaatgccttagactggggatatattagaggaagcagattgtcaaattaagggtgtcattgtgttgtgctaaacgctgggagggtacaagttggtcattcctaaatctgtgtgtgagaaatggcaggtctagtttgggcattgtgattgcattgcagattactaggagaagggaatggtgggtacaccggtagtgctcttttgttcttgcttcgtttttttaaacttgaactttacttcgttagatttcataatactttcttggcattctagtaagaggaccctgaggtgggagttgtgggggacggggagaaggggacagcttggcaccggtcccgtgggcgttgcagtgtgggggatgggggtatgcagcttggcactggtactgggagggatgagggtgaagaaggggagagggttggttagagatacagtgtgggtggtgggggtggtaggaaatgcaggttgaagggaattctctggggctttggggaatttagtgcgtgggtgagccaagaaaatactaattaataatagtaagttgttagtgttggttaagttgttgcttggaagtgagaagttgcttagaaactttccaaagtgcttagaactttaagtgcaaacagacaaactaacaaacaaaaattgttttgctttgctacaaggtggggaagactgaagaagtgttaactgaaaacaggtgacacagagtcaccagttttccgagaaccaaagggaggggtgtgtgatgccatctcacaggcaggggaaatgtctttaccagcttcctcctggtggccaagacagcctgtttcagagggttgttttgtttggggtgtgggtgttatcaagtgaattagtcacttgaaagatgggcgtcagacttgcatacgcagcagatcagcatccttcgctgccccttagcaacttaggtggttgatttgaaactgtgaaggtgtgattttttcaggagctggaagtcttagaaaagccttgtaaatgcctatattgtgggcttttaacgtatttaagggaccacttaagacgagattagatgggctcttctggatttgttcctcatttgtcacaggtgtcttgtgattgaaaatcatgagcgaagtgaaattgcattgaatttcaagggaatttagtatgtaaatcgtgccttagaaacacatctgttgtcttttctgtgtttggtcgatattaataatggcaaaatttttgcctatctagtatcttcaaattgtagtctttgtaacaaccaaataaccttttgtggtcactgtaaaattaatatttggtagacagaatccatgtacctttgctaaggttagaatgaataatttattgaaaaaaaaaaaaaaaacaaaaaaaaaaaaggtgggggggggggggggcccagaaaaaacgcttcaaaacaccattgcgggaggggccggggggcccaaggaagggaaagagaaaacgcggcgcaaaggggtggcccacaggaaagacactgcgggggaaaaagaaatgagggggggaggatatcctcacacaatataaaacagaagccgcgcgggggggaggaacaaagcacgagagccggcttagagaaaacactccgcaaagaggggagcttcagaggagcggacaacaggggggagactacaaccaaaggaggggacgacacaaggacagacgaccagagaattaagaaatgaccgg

SEQ ID NO: 467118 - DNA, 3307 bp, Homo sapiens
  misc_feature (90)..(90): n is a, c, g, or t
  misc_feature (152)..(152): n is a, c, g, or t
cagtgagcaacgtgggcttgtgagagtgggggggcctctcacaagaagtgtaggcatgcattgtgtcagataaggttgggaggagactgngacaagatcaagggcagggggcaggggcaggaggctggtagtgctgtggcccagatattggncagaagtacagggaggatctcctcagggcttcaggggacagacagggagagatgactgagttagatgagactagggggcgggctgggggtgcgagaaggaagcttggcaaggagactaggtctagggggaccacagtggggcaggctgcatggaaaatatccgcagggtcccccaggcagaacagccacgctccaggccaggctgtccctactgcctggtggagggggaacttgacctctgggagggcgccgctcttgcatagctgagcgagcccgggtgcgctggtctgtgtggaaggaggaaggcagggagaggtagaaggggtggaggagtcaggaggaataggccgcagcagccctggaaatgatcaggaaggcaggcagtgggtgcagggctgcaggagggccgggagggctaatcttcaacttgtccatgccagcagcccctttttttccagaccaagggctgtgaacccgcctggggatgaggcctggtcttgtggaactgaacttagctcgacggggctgaccgctctggcccagggtggtatgtaattttcgctcggcctgggacggggcccaggccgggcccagcctggtggagcgtccaggtctgggtgcgaagccaggcccctgggcggaggtgaggggtggtctgaggagtgatgtggagttaaggcgccatcctcaccggtgactggtgcggcacctagcatgtttgacaggcggggactgcgaggcacgctgctcgggtgttggggacaacattgaccaacgctttattttccaggtggcagtgctccttttggacttttctctaggtttggcgctaaactcttcttgtgagctcactccaccccttcttcctccctttaacttatccattcacttaaaacattagctggtcatctggtaagcccgggacagtaagccgagtggctgttggagtcggtattgttggtaatggtggaggaagagaggccttcccgctgaggctggggtggggcggatcggtgttgcttgcctgcagagagggtggggagtgaatgtgcacccttgggtgggcctgcagccatccagctgaaagttacaaaaatgcttcatggaccgtggtttgttactatagtgttcctcatggcgagcagatggaaccgggagacatggagtccctggccagtgtgagtcctagcattgcaggaggggagaccctggaggagagagcccgcctcaattgatgcctgcagattgaatttccagaggcttaggaggaggaagttctccaatgttctgtttccaggccttgctcaggaagccctgtattcaggaggctaccatttaaagtttgcagatgagcttatggggggcaatcttaaaaagtccacagcagatgcatccggctcgaggggccatcagctttgaataaatgcttgttccagagcccatgaatgccagcaggcacccctcctttcctggggtaaaggttttcagatgctgcatcttctaaattgagcctccggtcatactagttttgtgcttggaaccttgcttcaagaagatccctaagctgtagaacattttaacgttgatgccacaacgcagattgatgccttgtagatggagcttgcagatggagccccgtgacctctcacctacccacctgtttgcctgccttcttgtgcgtttctcggagaagttcttagcctgatgaaataacttggggcgttgaagagctgtttaattttaaatgccttagactggggatatattagaggaagcagattgtcaaattaagggtgtcattgtgttgtgctaaacgctgggagggtacaagttggtcattcctaaatctgtgtgtgagaaatggcaggtctagtttgggcattgtgattgcattgcagattactaggagaagggaatggtgggtacaccggtagtgctcttttgttcttgcttcgtttttttaaacttgaactttacttcgttagatttcataatactttcttggcattctagtaagaggaccctgaggtgggagttgtgggggacggggagaaggggacagcttggcaccggtcccgtgggcgttgcagtgtgggggatgggggtatgcagcttggcactggtactgggagggatgagggtgaagaaggggagagggttggttagagatacagtgtgggtggtgggggtggtaggaaatgcaggttgaagggaattctctggggctttggggaatttagtgcgtgggtgagccaagaaaatactaattaataatagtaagttgttagtgttggttaagttgttgcttggaagtgagaagttgcttagaaactttccaaagtgcttagaactttaagtgcaaacagacaaactaacaaacaaaaattgttttgctttgctacaaggtggggaagactgaagaagtgttaactgaaaacaggtgacacagagtcaccagttttccgagaaccaaagggaggggtgtgtgatgccatctcacaggcaggggaaatgtctttaccagcttcctcctggtggccaagacagcctgtttcagagggttgttttgtttggggtgtgggtgttatcaagtgaattagtcacttgaaagatgggcgtcagacttgcatacgcagcagatcagcatccttcgctgccccttagcaacttaggtggttgatttgaaactgtgaaggtgtgattttttcaggagctggaagtcttagaaaagccttgtaaatgcctatattgtgggcttttaacgtatttaagggaccacttaagacgagattagatgggctcttctggatttgttcctcatttgtcacaggtgtcttgtgattgaaaatcatgagcgaagtgaaattgcattgaatttcaagggaatttagtatgtaaatcgtgccttagaaacacatctgttgtcttttctgtgtttggtcgatattaataatggcaaaatttttgcctatctagtatcttcaaattgtagtctttgtaacaaccaaataaccttttgtggtcactgtaaaattaatatttggtagacagaatccatgtacctttgctaaggttagaatgaataatttattggcaggagagctgcccctcagcttctcaaagtactgggattatataggcatgagccactgagc

SEQ ID NO: 467119 - DNA, 3334 bp, Homo sapiens
  misc_feature (90)..(90): n is a, c, g, or t
  misc_feature (152)..(152): n is a, c, g, or t
cagtgagcaacgtgggcttgtgagagtgggggggcctctcacaagaagtgtaggcatgcattgtgtcagataaggttgggaggagactgngacaagatcaagggcagggggcaggggcaggaggctggtagtgctgtggcccagatattggncagaagtacagggaggatctcctcagggcttcaggggacagacagggagagatgactgagttagatgagactagggggcgggctgggggtgcgagaaggaagcttggcaaggagactaggtctagggggaccacagtggggcaggctgcatggaaaatatccgcagggtcccccaggcagaacagccacgctccaggccaggctgtccctactgcctggtggagggggaacttgacctctgggagggcgccgctcttgcatagctgagcgagcccgggtgcgctggtctgtgtggaaggaggaaggcagggagaggtagaaggggtggaggagtcaggaggaataggccgcagcagccctggaaatgatcaggaaggcaggcagtgggtgcagggctgcaggagggccgggagggctaatcttcaacttgtccatgccagcagcccctttttttccagaccaagggctgtgaacccgcctggggatgaggcctggtcttgtggaactgaacttagctcgacggggctgaccgctctggcccagggtggtatgtaattttcgctcggcctgggacggggcccaggccgggcccagcctggtggagcgtccaggtctgggtgcgaagccaggcccctgggcggaggtgaggggtggtctgaggagtgatgtggagttaaggcgccatcctcaccggtgactggtgcggcacctagcatgtttgacaggcggggactgcgaggcacgctgctcgggtgttggggacaacattgaccaacgctttattttccaggtggcagtgctccttttggacttttctctaggtttggcgctaaactcttcttgtgagctcactccaccccttcttcctccctttaacttatccattcacttaaaacattagctggtcatctggtaagcccgggacagtaagccgagtggctgttggagtcggtattgttggtaatggtggaggaagagaggccttcccgctgaggctggggtggggcggatcggtgttgcttgcctgcagagagggtggggagtgaatgtgcacccttgggtgggcctgcagccatccagctgaaagttacaaaaatgcttcatggaccgtggtttgttactatagtgttcctcatggcgagcagatggaaccgggagacatggagtccctggccagtgtgagtcctagcattgcaggaggggagaccctggaggagagagcccgcctcaattgatgcctgcagattgaatttccagaggcttaggaggaggaagttctccaatgttctgtttccaggccttgctcaggaagccctgtattcaggaggctaccatttaaagtttgcagatgagcttatggggggcaatcttaaaaagtccacagcagatgcatccggctcgaggggccatcagctttgaataaatgcttgttccagagcccatgaatgccagcaggcacccctcctttcctggggtaaaggttttcagatgctgcatcttctaaattgagcctccggtcatactagttttgtgcttggaaccttgcttcaagaagatccctaagctgtagaacattttaacgttgatgccacaacgcagattgatgccttgtagatggagcttgcagatggagccccgtgacctctcacctacccacctgtttgcctgccttcttgtgcgtttctcggagaagttcttagcctgatgaaataacttggggcgttgaagagctgtttaattttaaatgccttagactggggatatattagaggaagcagattgtcaaattaagggtgtcattgtgttgtgctaaacgctgggagggtacaagttggtcattcctaaatctgtgtgtgagaaatggcaggtctagtttgggcattgtgattgcattgcagattactaggagaagggaatggtgggtacaccggtagtgctcttttgttcttgcttcgtttttttaaacttgaactttacttcgttagatttcataatactttcttggcattctagtaagaggaccctgaggtgggagttgtgggggacggggagaaggggacagcttggcaccggtcccgtgggcgttgcagtgtgggggatgggggtatgcagcttggcactggtactgggagggatgagggtgaagaaggggagagggttggttagagatacagtgtgggtggtgggggtggtaggaaatgcaggttgaagggaattctctggggctttggggaatttagtgcgtgggtgagccaagaaaatactaattaataatagtaagttgttagtgttggttaagttgttgcttggaagtgagaagttgcttagaaactttccaaagtgcttagaactttaagtgcaaacagacaaactaacaaacaaaaattgttttgctttgctacaaggtggggaagactgaagaagtgttaactgaaaacaggtgacacagagtcaccagttttccgagaaccaaagggaggggtgtgtgatgccatctcacaggcaggggaaatgtctttaccagcttcctcctggtggccaagacagcctgtttcagagggttgttttgtttggggtgtgggtgttatcaagtgaattagtcacttgaaagatgggcgtcagacttgcatacgcagcagatcagcatccttcgctgccccttagcaacttaggtggttgatttgaaactgtgaaggtgtgattttttcaggagctggaagtcttagaaaagccttgtaaatgcctatattgtgggcttttaacgtatttaagggaccacttaagacgagattagatgggctcttctggatttgttcctcatttgtcacaggtgtcttgtgattgaaaatcatgagcgaagtgaaattgcattgaatttcaagggaatttagtatgtaaatcgtgccttagaaacacatctgttgtcttttctgtgtttggtcgatattaataatggcaaaatttttgcctatctagtatcttcaaattgtagtctttgtaacaaccaaataaccttttgtggtcactgtaaaattaatatttggtagacagaatccatgtacctttgctaaggttagaatgaataatttattgggtcttgttttccaaactgatttaggtgatagtttcccctctagtcttggctcatttaaaaagcacaaacattcaaattaaaaatgtcg

SEQ ID NO: 467120 - DNA, 3521 bp, Homo sapiens
  misc_feature (90)..(90): n is a, c, g, or t
  misc_feature (152)..(152): n is a, c, g, or t
cagtgagcaacgtgggcttgtgagagtgggggggcctctcacaagaagtgtaggcatgcattgtgtcagataaggttgggaggagactgngacaagatcaagggcagggggcaggggcaggaggctggtagtgctgtggcccagatattggncagaagtacagggaggatctcctcagggcttcaggggacagacagggagagatgactgagttagatgagactagggggcgggctgggggtgcgagaaggaagcttggcaaggagactaggtctagggggaccacagtggggcaggctgcatggaaaatatccgcagggtcccccaggcagaacagccacgctccaggccaggctgtccctactgcctggtggagggggaacttgacctctgggagggcgccgctcttgcatagctgagcgagcccgggtgcgctggtctgtgtggaaggaggaaggcagggagaggtagaaggggtggaggagtcaggaggaataggccgcagcagccctggaaatgatcaggaaggcaggcagtgggtgcagggctgcaggagggccgggagggctaatcttcaacttgtccatgccagcagcccctttttttccagaccaagggctgtgaacccgcctggggatgaggcctggtcttgtggaactgaacttagctcgacggggctgaccgctctggcccagggtggtatgtaattttcgctcggcctgggacggggcccaggccgggcccagcctggtggagcgtccaggtctgggtgcgaagccaggcccctgggcggaggtgaggggtggtctgaggagtgatgtggagttaaggcgccatcctcaccggtgactggtgcggcacctagcatgtttgacaggcggggactgcgaggcacgctgctcgggtgttggggacaacattgaccaacgctttattttccaggtggcagtgctccttttggacttttctctaggtttggcgctaaactcttcttgtgagctcactccaccccttcttcctccctttaacttatccattcacttaaaacattagctggtcatctggtaagcccgggacagtaagccgagtggctgttggagtcggtattgttggtaatggtggaggaagagaggccttcccgctgaggctggggtggggcggatcggtgttgcttgcctgcagagagggtggggagtgaatgtgcacccttgggtgggcctgcagccatccagctgaaagttacaaaaatgcttcatggaccgtggtttgttactatagtgttcctcatggcgagcagatggaaccgggagacatggagtccctggccagtgtgagtcctagcattgcaggaggggagaccctggaggagagagcccgcctcaattgatgcctgcagattgaatttccagaggcttaggaggaggaagttctccaatgttctgtttccaggccttgctcaggaagccctgtattcaggaggctaccatttaaagtttgcagatgagcttatggggggcaatcttaaaaagtccacagcagatgcatccggctcgaggggccatcagctttgaataaatgcttgttccagagcccatgaatgccagcaggcacccctcctttcctggggtaaaggttttcagatgctgcatcttctaaattgagcctccggtcatactagttttgtgcttggaaccttgcttcaagaagatccctaagctgtagaacattttaacgttgatgccacaacgcagattgatgccttgtagatggagcttgcagatggagccccgtgacctctcacctacccacctgtttgcctgccttcttgtgcgtttctcggagaagttcttagcctgatgaaataacttggggcgttgaagagctgtttaattttaaatgccttagactggggatatattagaggaagcagattgtcaaattaagggtgtcattgtgttgtgctaaacgctgggagggtacaagttggtcattcctaaatctgtgtgtgagaaatggcaggtctagtttgggcattgtgattgcattgcagattactaggagaagggaatggtgggtacaccggtagtgctcttttgttcttgcttcgtttttttaaacttgaactttacttcgttagatttcataatactttcttggcattctagtaagaggaccctgaggtgggagttgtgggggacggggagaaggggacagcttggcaccggtcccgtgggcgttgcagtgtgggggatgggggtatgcagcttggcactggtactgggagggatgagggtgaagaaggggagagggttggttagagatacagtgtgggtggtgggggtggtaggaaatgcaggttgaagggaattctctggggctttggggaatttagtgcgtgggtgagccaagaaaatactaattaataatagtaagttgttagtgttggttaagttgttgcttggaagtgagaagttgcttagaaactttccaaagtgcttagaactttaagtgcaaacagacaaactaacaaacaaaaattgttttgctttgctacaaggtggggaagactgaagaagtgttaactgaaaacaggtgacacagagtcaccagttttccgagaaccaaagggaggggtgtgtgatgccatctcacaggcaggggaaatgtctttaccagcttcctcctggtggccaagacagcctgtttcagagggttgttttgtttggggtgtgggtgttatcaagtgaattagtcacttgaaagatgggcgtcagacttgcatacgcagcagatcagcatccttcgctgccccttagcaacttaggtggttgatttgaaactgtgaaggtgtgattttttcaggagctggaagtcttagaaaagccttgtaaatgcctatattgtgggcttttaacgtatttaagggaccacttaagacgagattagatgggctcttctggatttgttcctcatttgtcacaggtgtcttgtgattgaaaatcatgagcgaagtgaaattgcattgaatttcaagggaatttagtatgtaaatcgtgccttagaaacacatctgttgtcttttctgtgtttggtcgatattaataatggcaaaatttttgcctatctagtatcttcaaattgtagtctttgtaacaaccaaataaccttttgtggtcacactaaccatataccaatgatggcgcgatgtaacacgagaaagcacataccaaggccaccacacaccacctgtccaaaaaggccttcgatacgggataatcctatttattacctcagaagtttttttcttcgcaggatttttctgagccttttaccactccagcctagcccctaccccccatttggagggcactggcccccaacaggcatcaccccgctaaaatccctaaaagtccactcctaaacacatccgtattactcgcattaggagtatcaatcacctgagcttaacatagtctaataaaaaacaacccgaaccaaataattcaagcctgcttaataca

SEQ ID NO: 467121 - DNA, 3109 bp, Homo sapiens
  misc_feature (90)..(90): n is a, c, g, or t
  misc_feature (152)..(152): n is a, c, g, or t
  misc_feature (3087)..(3087): n is a, c, g, or t
cagtgagcaacgtgggcttgtgagagtgggggggcctctcacaagaagtgtaggcatgcattgtgtcagataaggttgggaggagactgngacaagatcaagggcagggggcaggggcaggaggctggtagtgctgtggcccagatattggncagaagtacagggaggatctcctcagggcttcaggggacagacagggagagatgactgagttagatgagactagggggcgggctgggggtgcgagaaggaagcttggcaaggagactaggtctagggggaccacagtggggcaggctgcatggaaaatatccgcagggtcccccaggcagaacagccacgctccaggccaggctgtccctactgcctggtggagggggaacttgacctctgggagggcgccgctcttgcatagctgagcgagcccgggtgcgctggtctgtgtggaaggaggaaggcagggagaggtagaaggggtggaggagtcaggaggaataggccgcagcagccctggaaatgatcaggaaggcaggcagtgggtgcagggctgcaggagggccgggagggctaatcttcaacttgtccatgccagcagcccctttttttccagaccaagggctgtgaacccgcctggggatgaggcctggtcttgtggaactgaacttagctcgacggggctgaccgctctggcccagggtggtatgtaattttcgctcggcctgggacggggcccaggccgggcccagcctggtggagcgtccaggtctgggtgcgaagccaggcccctgggcggaggtgaggggtggtctgaggagtgatgtggagttaaggcgccatcctcaccggtgactggtgcggcacctagcatgtttgacaggcggggactgcgaggcacgctgctcgggtgttggggacaacattgaccaacgctttattttccaggtggcagtgctccttttggacttttctctaggtttggcgctaaactcttcttgtgagctcactccaccccttcttcctccctttaacttatccattcacttaaaacattagctggtcatctggtaagcccgggacagtaagccgagtggctgttggagtcggtattgttggtaatggtggaggaagagaggccttcccgctgaggctggggtggggcggatcggtgttgcttgcctgcagagagggtggggagtgaatgtgcacccttgggtgggcctgcagccatccagctgaaagttacaaaaatgcttcatggaccgtggtttgttactatagtgttcctcatggcgagcagatggaaccgggagacatggagtccctggccagtgtgagtcctagcattgcaggaggggagaccctggaggagagagcccgcctcaattgatgcctgcagattgaatttccagaggcttaggaggaggaagttctccaatgttctgtttccaggccttgctcaggaagccctgtattcaggaggctaccatttaaagtttgcagatgagcttatggggggcaatcttaaaaagtccacagcagatgcatccggctcgaggggccatcagctttgaataaatgcttgttccagagcccatgaatgccagcaggcacccctcctttcctggggtaaaggttttcagatgctgcatcttctaaattgagcctccggtcatactagttttgtgcttggaaccttgcttcaagaagatccctaagctgtagaacattttaacgttgatgccacaacgcagattgatgccttgtagatggagcttgcagatggagccccgtgacctctcacctacccacctgtttgcctgccttcttgtgcgtttctcggagaagttcttagcctgatgaaataacttggggcgttgaagagctgtttaattttaaatgccttagactggggatatattagaggaagcagattgtcaaattaagggtgtcattgtgttgtgctaaacgctgggagggtacaagttggtcattcctaaatctgtgtgtgagaaatggcaggtctagtttgggcattgtgattgcattgcagattactaggagaagggaatggtgggtacaccggtagtgctcttttgttcttgcttcgtttttttaaacttgaactttacttcgttagatttcataatactttcttggcattctagtaagaggaccctgaggtgggagttgtgggggacggggagaaggggacagcttggcaccggtcccgtgggcgttgcagtgtgggggatgggggtatgcagcttggcactggtactgggagggatgagggtgaagaaggggagagggttggttagagatacagtgtgggtggtgggggtggtaggaaatgcaggttgaagggaattctctggggctttggggaatttagtgcgtgggtgagccaagaaaatactaattaataatagtaagttgttagtgttggttaagttgttgcttggaagtgagaagttgcttagaaactttccaaagtgcttagaactttaagtgcaaacagacaaactaacaaacaaaaattgttttgctttgctacaaggtggggaagactgaagaagtgttaactgaaaacaggtgacacagagtcaccagttttccgagaaccaaagggaggggtgtgtgatgccatctcacaggcaggggaaatgtctttaccagcttcctcctggtggccaagacagcctgtttcagagggttgttttgtttggggtgtgggtgttatcaagtgaattagtcacttgaaagatgggcgtcagacttgcatacgcagcagatcagcatccttcgctgccccttagcaacttaggtggttgatttgaaactgtgaaggtgtgattttttcaggagctggaagtcttagaaaagccttgtaaatgcctatattgtgggcttttaacgtatttaagggaccacttaagacgagattagatgggctcttctggatttgttcctcatttgtcacaggtgtcttgtgattgaaaatcatgagcgaagtgaaattgcattgaatttcaagggaatttagtatgtaaatcgtgccttagaaacacatctgttgtcttacggttncaagtggtcgggtaccgagctc

SEQ ID NO: 467122 - DNA, 3085 bp, Homo sapiens
  misc_feature (90)..(90): n is a, c, g, or t
  misc_feature (152)..(152): n is a, c, g, or t
cagtgagcaacgtgggcttgtgagagtgggggggcctctcacaagaagtgtaggcatgcattgtgtcagataaggttgggaggagactgngacaagatcaagggcagggggcaggggcaggaggctggtagtgctgtggcccagatattggncagaagtacagggaggatctcctcagggcttcaggggacagacagggagagatgactgagttagatgagactagggggcgggctgggggtgcgagaaggaagcttggcaaggagactaggtctagggggaccacagtggggcaggctgcatggaaaatatccgcagggtcccccaggcagaacagccacgctccaggccaggctgtccctactgcctggtggagggggaacttgacctctgggagggcgccgctcttgcatagctgagcgagcccgggtgcgctggtctgtgtggaaggaggaaggcagggagaggtagaaggggtggaggagtcaggaggaataggccgcagcagccctggaaatgatcaggaaggcaggcagtgggtgcagggctgcaggagggccgggagggctaatcttcaacttgtccatgccagcagcccctttttttccagaccaagggctgtgaacccgcctggggatgaggcctggtcttgtggaactgaacttagctcgacggggctgaccgctctggcccagggtggtatgtaattttcgctcggcctgggacggggcccaggccgggcccagcctggtggagcgtccaggtctgggtgcgaagccaggcccctgggcggaggtgaggggtggtctgaggagtgatgtggagttaaggcgccatcctcaccggtgactggtgcggcacctagcatgtttgacaggcggggactgcgaggcacgctgctcgggtgttggggacaacattgaccaacgctttattttccaggtggcagtgctccttttggacttttctctaggtttggcgctaaactcttcttgtgagctcactccaccccttcttcctccctttaacttatccattcacttaaaacattagctggtcatctggtaagcccgggacagtaagccgagtggctgttggagtcggtattgttggtaatggtggaggaagagaggccttcccgctgaggctggggtggggcggatcggtgttgcttgcctgcagagagggtggggagtgaatgtgcacccttgggtgggcctgcagccatccagctgaaagttacaaaaatgcttcatggaccgtggtttgttactatagtgttcctcatggcgagcagatggaaccgggagacatggagtccctggccagtgtgagtcctagcattgcaggaggggagaccctggaggagagagcccgcctcaattgatgcctgcagattgaatttccagaggcttaggaggaggaagttctccaatgttctgtttccaggccttgctcaggaagccctgtattcaggaggctaccatttaaagtttgcagatgagcttatggggggcaatcttaaaaagtccacagcagatgcatccggctcgaggggccatcagctttgaataaatgcttgttccagagcccatgaatgccagcaggcacccctcctttcctggggtaaaggttttcagatgctgcatcttctaaattgagcctccggtcatactagttttgtgcttggaaccttgcttcaagaagatccctaagctgtagaacattttaacgttgatgccacaacgcagattgatgccttgtagatggagcttgcagatggagccccgtgacctctcacctacccacctgtttgcctgccttcttgtgcgtttctcggagaagttcttagcctgatgaaataacttggggcgttgaagagctgtttaattttaaatgccttagactggggatatattagaggaagcagattgtcaaattaagggtgtcattgtgttgtgctaaacgctgggagggtacaagttggtcattcctaaatctgtgtgtgagaaatggcaggtctagtttgggcattgtgattgcattgcagattactaggagaagggaatggtgggtacaccggtagtgctcttttgttcttgcttcgtttttttaaacttgaactttacttcgttagatttcataatactttcttggcattctagtaagaggaccctgaggtgggagttgtgggggacggggagaaggggacagcttggcaccggtcccgtgggcgttgcagtgtgggggatgggggtatgcagcttggcactggtactgggagggatgagggtgaagaaggggagagggttggttagagatacagtgtgggtggtgggggtggtaggaaatgcaggttgaagggaattctctggggctttggggaatttagtgcgtgggtgagccaagaaaatactaattaataatagtaagttgttagtgttggttaagttgttgcttggaagtgagaagttgcttagaaactttccaaagtgcttagaactttaagtgcaaacagacaaactaacaaacaaaaattgttttgctttgctacaaggtggggaagactgaagaagtgttaactgaaaacaggtgacacagagtcaccagttttccgagaaccaaagggaggggtgtgtgatgccatctcacaggcaggggaaatgtctttaccagcttcctcctggtggccaagacagcctgtttcagagggttgttttgtttggggtgtgggtgttatcaagtgaattagtcacttgaaagatgggcgtcagacttgcatacgcagcagatcagcatccttcgctgccccttagcaacttaggtggttgatttgaaactgtgaaggtgtgattttttcaggagctggaagtcttagaaaagccttgtaaatgcctatattgtgggcttttaacgtatttaagggaccacttaagacgagattagatgggctcttctggatttgttcctcatttgtcacaggtgtcttgtgattgaaaatcatgagcgaagtgaaattgcattgaatttcaagggaatttagtatgtcgacgcggccgcgaatttagtagtagtaggcggccgc

SEQ ID NO: 467123 - DNA, 5151 bp, Homo sapiens
  misc_feature (90)..(90): n is a, c, g, or t
  misc_feature (152)..(152): n is a, c, g, or t
cagtgagcaacgtgggcttgtgagagtgggggggcctctcacaagaagtgtaggcatgcattgtgtcagataaggttgggaggagactgngacaagatcaagggcagggggcaggggcaggaggctggtagtgctgtggcccagatattggncagaagtacagggaggatctcctcagggcttcaggggacagacagggagagatgactgagttagatgagactagggggcgggctgggggtgcgagaaggaagcttggcaaggagactaggtctagggggaccacagtggggcaggctgcatggaaaatatccgcagggtcccccaggcagaacagccacgctccaggccaggctgtccctactgcctggtggagggggaacttgacctctgggagggcgccgctcttgcatagctgagcgagcccgggtgcgctggtctgtgtggaaggaggaaggcagggagaggtagaaggggtggaggagtcaggaggaataggccgcagcagccctggaaatgatcaggaaggcaggcagtgggtgcagggctgcaggagggccgggagggctaatcttcaacttgtccatgccagcagcccctttttttccagaccaagggctgtgaacccgcctggggatgaggcctggtcttgtggaactgaacttagctcgacggggctgaccgctctggcccagggtggtatgtaattttcgctcggcctgggacggggcccaggccgggcccagcctggtggagcgtccaggtctgggtgcgaagccaggcccctgggcggaggtgaggggtggtctgaggagtgatgtggagttaaggcgccatcctcaccggtgactggtgcggcacctagcatgtttgacaggcggggactgcgaggcacgctgctcgggtgttggggacaacattgaccaacgctttattttccaggtggcagtgctccttttggacttttctctaggtttggcgctaaactcttcttgtgagctcactccaccccttcttcctccctttaacttatccattcacttaaaacattagctggtcatctggtaagcccgggacagtaagccgagtggctgttggagtcggtattgttggtaatggtggaggaagagaggccttcccgctgaggctggggtggggcggatcggtgttgcttgcctgcagagagggtggggagtgaatgtgcacccttgggtgggcctgcagccatccagctgaaagttacaaaaatgcttcatggaccgtggtttgttactatagtgttcctcatggcgagcagatggaaccgggagacatggagtccctggccagtgtgagtcctagcattgcaggaggggagaccctggaggagagagcccgcctcaattgatgcctgcagattgaatttccagaggcttaggaggaggaagttctccaatgttctgtttccaggccttgctcaggaagccctgtattcaggaggctaccatttaaagtttgcagatgagcttatggggggcaatcttaaaaagtccacagcagatgcatccggctcgaggggccatcagctttgaataaatgcttgttccagagcccatgaatgccagcaggcacccctcctttcctggggtaaaggttttcagatgctgcatcttctaaattgagcctccggtcatactagttttgtgcttggaaccttgcttcaagaagatccctaagctgtagaacattttaacgttgatgccacaacgcagattgatgccttgtagatggagcttgcagatggagccccgtgacctctcacctacccacctgtttgcctgccttcttgtgcgtttctcggagaagttcttagcctgatgaaataacttggggcgttgaagagctgtttaattttaaatgccttagactggggatatattagaggaagcagattgtcaaattaagggtgtcattgtgttgtgctaaacgctgggagggtacaagttggtcattcctaaatctgtgtgtgagaaatggcaggtctagtttgggcattgtgattgcattgcagattactaggagaagggaatggtgggtacaccggtagtgctcttttgttcttgcttcgtttttttaaacttgaactttacttcgttagatttcataatactttcttggcattctagtaagaggaccctgaggtgggagttgtgggggacggggagaaggggacagcttggcaccggtcccgtgggcgttgcagtgtgggggatgggggtatgcagcttggcactggtactgggagggatgagggtgaagaaggggagagggttggttagagatacagtgtgggtggtgggggtggtaggaaatgcaggttgaagggaattctctggggctttggggaatttagtgcgtgggtgagccaagaaaatactaattaataatagtaagttgttagtgttggttaagttgttgcttggaagtgagaagttgcttagaaactttccaaagtgcttagaactttaagtgcaaacagacaaactaacaaacaaaaattgttttgctttgctacaaggtggggaagactgaagaagtgttaactgaaaacaggtgacacagagtcaccagttttccgagaaccaaagggaggggtgtgtgatgccatctcacaggcaggggaaatgtctttaccagcttcctcctggtggccaagacagcctgtttcagagggttgttttgtttggggtgtgggtgttatcaagtgaattagtcacttgaaagatgggcgtcagacttgcatacgcagcagatcagcatccttcgctgccccttagcaacttaggtggttgatttgaaactgtgaaggtgtgattttttcaggagctggaagtcttagaaaagccttgtaaatgcctatattgtgggcttttaacgtatttaagggaccacttaagacgagattagatgggctcttctggatttgttcctcatttgtcacaggtgtcttgtgattgaaaatcatgagcgaagtgaaattgcattgaatttcaagggaatttagtatgtaaatcgtgccttagaaacacatctgttgtcttttctgtgtttggtcgatattaataatggcaaaatttttgcctatctagtatcttcaaattgtagtctttgtaacaaccaaataaccttttgtggtcactgtaaaattaatatttggtagacagaatccatgtacctttgctaaggttagaatgaataatttattgtatttttaatttgaatgtttgtgctttttaaatgagccaagactagaggggaaactatcacctaaaatcagtttggaaaacaagacctaaaaagggaaggggatggggattgtggggagagagtgggcgaggtgcctttactacatgtgtgatctgaaaaccctgcttggttctgagctgcgtctattgaattggtaaagtaataccaatggctttttatcatttccttcttccctttaagtttcacttgaaattttaaaaatcatggttatttttatcgttgggatctttctgtcttctgggttccattttttaaatgtttaaaaatatgttgacatggtagttcagttcttaaccaatgacttggggatgatgcaaacaattactgtcgttgggatttagagtgtattagtcacgcatgtatggggaagtagtctcgggtatgctgttgtgaaattgaaactgtaaaagtagatggttgaaagtactggtatgttgctctgtatggtaagaactaattctgttacgtcatgtacataattactaatcacttttcttcccctttacagcacaaataaagtttgagttctaaaactcattagaattgttgtattgctatgttacatttctcgacccctatcacattgccttcataacgactttggatgtatcttcatattgtagatttaggtctagatttgctagctccaagtaattaaggccatgtaggagagcatggtaaccacagatagaactggtattatcccaagtggtctgcagactgctgagtggggatgggatctgctctctgttgagagttggtaatcattggtttgaaatgtgatgaaaccactcaagccaatgaaggtgggtgtgtaggtggggagtactttgccataatattttaaaacattacctggttagagttctaagtggtacttatttttgtttggttaggggaaagcctgaataaaaacagaaatggacacataatatgcatattccatagtctttgggaggctggaatgtgcctgggatttgggtctaagtgtatgcgtaattcttacctcactaaagaatttgccttgtttttttccttttggtgagtgactaaaacgtctgggcttccctgtgtgcgtgctacagtaagcaagcagaggctgtgcaaaggtgtgagcaggatcacgtggaatctggaggatacatcttggcttgcaaactgcctctgtctcctgggtgggactgttctgtccttgcactgctgttctgtgttacctcttggggtgtaaggttttgcttacaggagacaaactttgggcgtagaatggaagccactgccagcctctgtgctgagaaggaaggtgcttgtttcaaagggagcagcaagggaggcttgttctactcacctgggcctgtttgcctgagaaggggagataagggctgaactgggactagccagggggaccaacacaaatggtgggggatcatgacctgaaggattctttccttcccatgagctgcagggctggttgccgtccttgcaactgtgtcttatttgcctgtgccgttatatcttggtgacccctccacgtgtacactactgacaaacgggtggagtgctggggagaagtcactgtgccgcccacctagtaaaccttctgtctgtgctcatggcatctccaagatggggcactgctgtgtgcagaatccagggtcctctttctgcttgcaactcctttccctggatgccccagaaacaatccaggcctcctttcctatcttacccctttgctttgctttttaccccagcacctctataaccgccttctcttaggcctcctttcctatcttacccctttgctttgctttttaccccaggcataaggtgggcccacggcataagtgg

SEQ ID NO: 467124 - DNA, 892 bp, Homo sapiens
cgggagttagcgacagggagggatgcgcgcctgggtgtagttgtgggggaggaagtggctagctcagggcttcaggggacagacagggagagatgactgagttagatgagactagggggcgggctgggggtgcgagaaggaagcttggcaaggagactaggtctagggggaccacagtggggcaggctgcatggaaaatatccgcagggtcccccaggcagaacagccacgctccaggccaggctgtccctccccatacccaacccctgtttcaaacctcaatctaggcctcctatttattctagccacctctagcctaggccgtttactcaatcctcgtgatcagggtgagcatcaaatcaaactacgccctgatcgggcgcactggaggaaggagcccaaacaatctcatatgaatgtcaccctagccatcatgctactatccaaattactatttaagtggctccttttaacctgctcgagccttatcagaacgagaaagaacacgctcttgattaccttcctgccatcgtgaccctgtggcaataatatgattatctccacataaggagagaccaagcggagccccttggaactgccgaggggagtcgaaggtagtatctaggttaaaagtgataaggcgaggacttggcgtattttaataaggcgataagaacttttatataagagctttacaataaatttctggaaaagaatgagagttcctgaatgttacaaaattttgtcgcagacctaattaactgcggtttttgaatgacaggatcgggattgggtacgaattttgcatctgtaattttagacaccggtatatgatgggcatcaatatgagtctgtgaaaaaaaaaaatgttgggggattaaagggggagaag

SEQ ID NO: 467125 - DNA, 854 bp, Homo sapiens
gcgacgtacggttaactttgacccaaagacaacctcttctctcccgcttctctcgctgtgaagatggcgctctccagggtcttcaaagcttcacctttctccaaaggcagatgtgaagaacttgatgtcttatgtggtaaccaagacaaaagcgattaatgggaaataccatcgtttcttgggtcgtcatttcccccgcttctatgtcctgtacacaatcttcatgaaaggattgcagatgttatgggctgatgccaaaaaggctagaagaataaagacaaatatgtggaagcacaatataaagtttcatcaacttccataccgggagatggagcatttgagacaggtacctgtttcccaggcaactactgatcaggcatttctggaccccaaaacaacaaactgatttcttagatatctatcatgctttccggaagcagtcccacccagaaattattagttatttagaaaaggtcatccctctcatttctgatgcaggactccggtggcgtctgacagatctgtgcaccaagatacagcgtggtacccacccagcaatacatgatatcttggctctgagagagtgtttctctaaccatcctctgggcatgaaccaactccaggctttgcacgtgaaagcttgagcgggcatggttctcacattttactggctctcccttgttgcgactcgttggagatcataacatgggatcaccaactggcaggttggcaagtggggttggcattgactgtccgaagcaaaccgtgtaccgcggcgaattagcattgggaaaagggccacccgggggaggtggattccgcgaaaaggtgcaggcacgggccccccagtgggc

SEQ ID NO: 467126 - DNA, 420 bp, Homo sapiens
  misc_feature (415)..(415): n is a, c, g, or t
taatcattctatgattattaaggaccatttctgttctgagtggtataggcttgttatctccgtggcctgaattctacgcatattggtgaagataggtgtcgaacttggctgggagaatggctgcagatttcctgcagcctgaaaggtaaaacacatttctgtggttataccactaaaatccaagtcacttttgtattttattctgaggtcattttggagttaattattgagtactgtgagacatatatatacatacatctaattgaaagggcccaaactcacatgcctactgcatgcccggcaggtaacgaagtaggccataagacaaaagggagtagtggggactgtggaaacctaaaagtgaatgcatgctagtgtgaattttccagcctgggcaacaacagtgaaactcccntctca

SEQ ID NO: 467127 - DNA, 2197 bp, Homo sapiens
gcgacgtacggttaactttgacccaaagacaacctcttctctcccgcttctctcgctgtgaagatggcgctctccagggtgtgctgggctcggtcggctgtgtggggctcggcagtcacccctggacattttgtcacccggaggctgcaacttggtcgctctggcctggcttggggggcccctcggtgagggacctgtagcgagaaaagcatttttgacgtccaggctctttcagtgtctcaaccttgcttgcattctgtctcttaattctcagagttccacgccttggccctggaatttttattcttctgttcaggattcaaactccgatccccactagtgacccggcttcctgaccctctgtactctcagtgccccatattgtctggtttccccgcgtgtcctgagctcatctttcagcctcactttttcggctcaggttttaccgctgctatctcgattccacctctttctgacttagcctgcagttcaaattgtcccacaggcattgcgctctctccagaggcataccctgagttcctttcctgcctggcctttgcctgatttgtgtttcacagtctgattgcctatctcttcttgaccccaagaccttccttggatttcagaagtgtcaagccttgggatacaatctccgagactcctgctttacattagggactcaaggcgtgagggagcttctaggactgattcccagatagtctctttgatcttccttgtaggtcttcaaagcttcacctttctccaaaggcagatgtgaagaacttgatgtcttatgtggtaaccaagacaaaagcgattaatgggaaataccatcgtttcttgggtcgtcatttcccccgcttctatgtcctgtacacaatcttcatgaaagaaagccttgagccgggccatgcttctcacatcttacctgcctcctcccttgttgagacatcgtttgaagactcatacaactgtgattcaccaactggacaaggctttggcaaagctggggattggccagctgactgctcaggaagtaaaatcggcttgttatctccgtggcctgaattctacgcatattggtgaagataggtgtcgaacttggctgggagaatggctgcagatttcctgcagcctgaaagaagctgagctgtctctcttgctgcacaacgtggtcctgctctccaccaactaccttgggacaaggcgctgaatgaaccatggagcggatggcattgtcctgcagtcgtatagtatagcagtgcaggaacaaacagcacttgccagcaaagtctgtgtgtactgttaagtgtgtgggaggcagagagaggagcaggggccatgggcttcacagcatggcacacctgtgggaactgcagacattcctctcacagctagaactgaaacaaaccctcttgctaggggtggtccgtgtgaggtgtcatcctgtccccctcataattactaatagctggaactggcagcagcctctactgggcttttactgtgatgtgttcagttcatgtcctaggaagtcagcttttgccccaggtgggaatccttatttggcttaggactgatccacttccatgttacttacatctgtgggtttttgttgttgctgttagaaaatttgtggctggtgaaaacagcactcctttggctggagcacttgtgtccgtgcatgtacttgggtgtttccctccatcctttctgatatgaccaaaaatcaagttgttttgttttttgtcaccttcactggcatgggctaaccacttctttttcaaaccctctgaacacctttttctgatgggtaacttgcaggaatattctattggaaaagataacaggaagtacaagtgcttcttgaccccttcctcaatgtttctagccttcactctccattgtcttttctgggctgtattacagccctctgtggatcttcaactctgctgcctccactgtgatgcagcagtccaactgtaactgacagtggctgccttctctgggccatggatcacacctgtaaggtactaattactgcccagcctggggagatcaggagaggtctgcatagttagtaagttgggtttagcttttgtgtgtgcatcagtgacttagagttctgtaataacttattgtaaatgcatgaagcactgtttttaaacccaagtaaagactgcttgaaacctgttga

SEQ ID NO: 467128 - DNA, 1980 bp, Homo sapiens
gcgacgtacggttaactttgacccaaagacaacctcttctctcccgcttctctcgctgtgaagatggcgctctccagggtgtgctgggctcggtcggctgtgtggggctcggcagtcacccctggacattttgtcacccggaggctgcaacttggtcgctctggcctggcttggggggcccctcggtcttcaaagcttcacctttctccaaaggcagatgtgaagaacttgatgtcttatgtggtaaccaagacaaaagcgattaatgggaaataccatcgtttcttgggtcgtcatttcccccgcttctatgtcctgtacacaatcttcatgaaaggtattatttccattccaccttttgccaactacctggtcttcttgctaatgtacctgtttcccaggcaactactgatcaggcatttctggaccccaaaacaacaaactgatttcttagatatctatcatgctttccggaagcagtcccacccagaaattattagttatttagaaaaggtcatccctctcatttctgatgcaggactccggtggcgtctgacagatctgtgcaccaagatacagcgtggtacccacccagcaatacatgatatcttggctctgagagagtgtttctctaaccatcctctgggcatgaaccaactccaggctttgcacgtgaaagccttgagccgggccatgcttctcacatcttacctgcctcctcccttgttgagacatcgtttgaagactcatacaactgtgattcaccaactggacaaggctttggcaaagctggggattggccagctgactgctcaggaagtaaaatcggcttgttatctccgtggcctgaattctacgcatattggtgaagataggtgtcgaacttggctgggagaatggctgcagatttcctgcagcctgaaagaagctgagctgtctctcttgctgcacaacgtggtcctgctctccaccaactaccttgggacaaggcgctgaatgaaccatggagcggatggcattgtcctgcagtcgtatagtatagcagtgcaggaacaaacagcacttgccagcaaagtctgtgtgtactgttaagtgtgtgggaggcagagagaggagcaggggccatgggcttcacagcatggcacacctgtgggaactgcagacattcctctcacagctagaactgaaacaaaccctcttgctaggggtggtccgtgtgaggtgtcatcctgtccccctcataattactaatagctggaactggcagcagcctctactgggcttttactgtgatgtgttcagttcatgtcctaggaagtcagcttttgccccaggtgggaatccttatttggcttaggactgatccacttccatgttacttacatctgtgggtttttgttgttgctgttagaaaatttgtggctggtgaaaacagcactcctttggctggagcacttgtgtccgtgcatgtacttgggtgtttccctccatcctttctgatatgaccaaaaatcaagttgttttgttttttgtcaccttcactggcatgggctaaccacttctttttcaaaccctctgaacacctttttctgatgggtaacttgcaggaatattctattggaaaagataacaggaagtacaagtgcttcttgaccccttcctcaatgtttctagccttcactctccattgtcttttctgggctgtattacagccctctgtggatcttcaactctgctgcctccactgtgatgcagcagtccaactgtaactgacagtggctgccttctctgggccatggatcacacctgtaaggtactaattactgcccagcctggggagatcaggagaggtctgcatagttagtaagttgggtttagcttttgtgtgtgcatcagtgacttagagttctgtaataacttattgtaaatgcatgaagcactgtttttaaacccaagtaaagactgcttgaaacctgttga

SEQ ID NO: 467129 - DNA, 2014 bp, Homo sapiens
gcgacgtacggttaactttgacccaaagacaacctcttctctcccgcttctctcgctgtgaagatggcgctctccagggtgtgctgggctcggtcggctgtgtggggctcggcagtcacccctggacattttgtcacccggaggctgcaacttggtcgctctggcctggcttggggggcccctcggtcttcaaagcttcacctttctccaaaggcagatgtgaagaacttgatgtcttatgtggtaaccaagacaaaagcgattaatgggaaataccatcgtttcttgggtcgtcatttcccccgcttctatgtcctgtacacaatcttcatgaaagttccgccaagacgtcaccaagtgtcttttcctaggtattatttccattccaccttttgccaactacctggtcttcttgctaatgtacctgtttcccaggcaactactgatcaggcatttctggaccccaaaacaacaaactgatttcttagatatctatcatgctttccggaagcagtcccacccagaaattattagttatttagaaaaggtcatccctctcatttctgatgcaggactccggtggcgtctgacagatctgtgcaccaagatacagcgtggtacccacccagcaatacatgatatcttggctctgagagagtgtttctctaaccatcctctgggcatgaaccaactccaggctttgcacgtgaaagccttgagccgggccatgcttctcacatcttacctgcctcctcccttgttgagacatcgtttgaagactcatacaactgtgattcaccaactggacaaggctttggcaaagctggggattggccagctgactgctcaggaagtaaaatcggcttgttatctccgtggcctgaattctacgcatattggtgaagataggtgtcgaacttggctgggagaatggctgcagatttcctgcagcctgaaagaagctgagctgtctctcttgctgcacaacgtggtcctgctctccaccaactaccttgggacaaggcgctgaatgaaccatggagcggatggcattgtcctgcagtcgtatagtatagcagtgcaggaacaaacagcacttgccagcaaagtctgtgtgtactgttaagtgtgtgggaggcagagagaggagcaggggccatgggcttcacagcatggcacacctgtgggaactgcagacattcctctcacagctagaactgaaacaaaccctcttgctaggggtggtccgtgtgaggtgtcatcctgtccccctcataattactaatagctggaactggcagcagcctctactgggcttttactgtgatgtgttcagttcatgtcctaggaagtcagcttttgccccaggtgggaatccttatttggcttaggactgatccacttccatgttacttacatctgtgggtttttgttgttgctgttagaaaatttgtggctggtgaaaacagcactcctttggctggagcacttgtgtccgtgcatgtacttgggtgtttccctccatcctttctgatatgaccaaaaatcaagttgttttgttttttgtcaccttcactggcatgggctaaccacttctttttcaaaccctctgaacacctttttctgatgggtaacttgcaggaatattctattggaaaagataacaggaagtacaagtgcttcttgaccccttcctcaatgtttctagccttcactctccattgtcttttctgggctgtattacagccctctgtggatcttcaactctgctgcctccactgtgatgcagcagtccaactgtaactgacagtggctgccttctctgggccatggatcacacctgtaaggtactaattactgcccagcctggggagatcaggagaggtctgcatagttagtaagttgggtttagcttttgtgtgtgcatcagtgacttagagttctgtaataacttattgtaaatgcatgaagcactgtttttaaacccaagtaaagactgcttgaaacctgttga

SEQ ID NO: 467130 - DNA, 2571 bp, Homo sapiens
tttgagacggcatctcactctgtcgcccaggctggagtgcagtggctcaatcttggctcactgcaagctccacctcccgggttcaagccattctcctacctcagcctcccaagatatttttcttctctcttttttttttttttcgagacggagtctctctgttgcccccaggctggagttgcagtgagccgagatcgcgccactgcagtccagcttgggtgacagagcgagactctgtctcagaaaaaaaaacaacaaatcagttgccttttacatactgggtccacataaggactgtgctatagttagattgtcaacatcacatatagtgtcctggtcaggctgcaactctctccaaagcatgctcttcacatgctttagttcaaaatgagtcattatatctgattgctgcgtggcaggctattctgctagtccttcctttcacatcccatttcagtaatggtgcttgaaattgtgcttcagtgtgtcttataaactttggtctgagagtcacttaagagaaagggctgactgtagtggctctcaccagtaatcccagcacttggggagactgaagcaggaagattgcttgagaccaggagtttgagaccaccctgggcaatatagcaagacccgtctctgcaaaaaaattaaaaacttagccaggcatagtggcctgtgcctgtagtcccagctactcagtaggctgtggtgggaggattgcttgagcctaggaggtcgaggctgcagtgagctgtgatcttgccactgtactccagcctgggtgagagaggggaccctgtctcttaaaaaaaaaaaaaaaaaaaaaaaaactgaaaaagaaaaagaacactgaggtagggaaatagtgtctccatctcttcttcctagtattcatgtctaccaaatgctttctttggcttcctctgaaagaagccagtttcagcaagtgagtttgtgattctttctcctttcaggtacctgtttcccaggcaactactgatcaggcatttctggaccccaaaacaacaaactgatttcttagatatctatcatgctttccggaagcagtcccacccagaaattattagttatttagaaaaggtcatccctctcatttctgatgcaggactccggtggcgtctgacagatctgtgcaccaagatacagcgtggtacccacccagcaatacatgatatcttggctctgagagagtgtttctctaaccatcctctgggcatgaaccaactccaggctttgcacgtgaaagccttgagccgggccatgcttctcacatcttacctgcctcctcccttgttgagacatcgtttgaagactcatacaactgtgattcaccaactggacaaggctttggcaaagctggggattggccagctgactgctcaggaagtaaaatcggcttgttatctccgtggcctgaattctacgcatattggtgaagataggtgtcgaacttggctgggagaatggctgcagatttcctgcagcctgaaagaagctgagctgtctctcttgctgcacaacgtggtcctgctctccaccaactaccttgggacaaggcgctgaatgaaccatggagcggatggcattgtcctgcagtcgtatagtatagcagtgcaggaacaaacagcacttgccagcaaagtctgtgtgtactgttaagtgtgtgggaggcagagagaggagcaggggccatgggcttcacagcatggcacacctgtgggaactgcagacattcctctcacagctagaactgaaacaaaccctcttgctaggggtggtccgtgtgaggtgtcatcctgtccccctcataattactaatagctggaactggcagcagcctctactgggcttttactgtgatgtgttcagttcatgtcctaggaagtcagcttttgccccaggtgggaatccttatttggcttaggactgatccacttccatgttacttacatctgtgggtttttgttgttgctgttagaaaatttgtggctggtgaaaacagcactcctttggctggagcacttgtgtccgtgcatgtacttgggtgtttccctccatcctttctgatatgaccaaaaatcaagttgttttgttttttgtcaccttcactggcatgggctaaccacttctttttcaaaccctctgaacacctttttctgatgggtaacttgcaggaatattctattggaaaagataacaggaagtacaagtgcttcttgaccccttcctcaatgtttctagccttcactctccattgtcttttctgggctgtattacagccctctgtggatcttcaactctgctgcctccactgtgatgcagcagtccaactgtaactgacagtggctgccttctctgggccatggatcacacctgtaaggtactaattactgcccagcctggggagatcaggagaggtctgcatagttagtaagttgggtttagcttttgtgtgtgcatcagtgacttagagttctgtaataacttattgtaaatgcatgaagcactgtttttaaacccaagtaaagactgcttgaaacctgttga

SEQ ID NO: 467131 - DNA, 2096 bp, Homo sapiens
gcgacgtacggttaactttgacccaaagacaacctcttctctcccgcttctctcgctgtgaagatggcgctctccagggtgtgctgggctcggtcggctgtgtggggctcggcagtcacccctggacattttgtcacccggaggctgcaacttggtcgctctggcctggcttggggggcccctcggtcttcaaagcttcacctttctccaaaggcagatgtgaagaacttgatgtcttatgtggtaaccaagacaaaagcgattaatgggaaataccatcgtttcttgggtcgtcatttcccccgcttctatgtcctgtacacaatcttcatgaaaggattgcagatgttatgggctgatgccaaaaaggctagaagaataaagacaaatatgtggaagcacaatataaagtttcatcaacttccataccgggagatggagcatttgagacaggtattatttccattccaccttttgccaactacctggtcttcttgctaatgtacctgtttcccaggcaactactgatcaggcatttctggaccccaaaacaacaaactgatttcttagatatctatcatgctttccggaagcagtcccacccagaaattattagttatttagaaaaggtcatccctctcatttctgatgcaggactccggtggcgtctgacagatctgtgcaccaagatacagcgtggtacccacccagcaatacatgatatcttggctctgagagagtgtttctctaaccatcctctgggcatgaaccaactccaggctttgcacgtgaaagccttgagccgggccatgcttctcacatcttacctgcctcctcccttgttgagacatcgtttgaagactcatacaactgtgattcaccaactggacaaggctttggcaaagctggggattggccagctgactgctcaggaagtaaaatcggcttgttatctccgtggcctgaattctacgcatattggtgaagataggtgtcgaacttggctgggagaatggctgcagatttcctgcagcctgaaagaagctgagctgtctctcttgctgcacaacgtggtcctgctctccaccaactaccttgggacaaggcgctgaatgaaccatggagcggatggcattgtcctgcagtcgtatagtatagcagtgcaggaacaaacagcacttgccagcaaagtctgtgtgtactgttaagtgtgtgggaggcagagagaggagcaggggccatgggcttcacagcatggcacacctgtgggaactgcagacattcctctcacagctagaactgaaacaaaccctcttgctaggggtggtccgtgtgaggtgtcatcctgtccccctcataattactaatagctggaactggcagcagcctctactgggcttttactgtgatgtgttcagttcatgtcctaggaagtcagcttttgccccaggtgggaatccttatttggcttaggactgatccacttccatgttacttacatctgtgggtttttgttgttgctgttagaaaatttgtggctggtgaaaacagcactcctttggctggagcacttgtgtccgtgcatgtacttgggtgtttccctccatcctttctgatatgaccaaaaatcaagttgttttgttttttgtcaccttcactggcatgggctaaccacttctttttcaaaccctctgaacacctttttctgatgggtaacttgcaggaatattctattggaaaagataacaggaagtacaagtgcttcttgaccccttcctcaatgtttctagccttcactctccattgtcttttctgggctgtattacagccctctgtggatcttcaactctgctgcctccactgtgatgcagcagtccaactgtaactgacagtggctgccttctctgggccatggatcacacctgtaaggtactaattactgcccagcctggggagatcaggagaggtctgcatagttagtaagttgggtttagcttttgtgtgtgcatcagtgacttagagttctgtaataacttattgtaaatgcatgaagcactgtttttaaacccaagtaaagactgcttgaaacctgttga

SEQ ID NO: 467132 - DNA, 1860 bp, Homo sapiens
gcgacgtacggttaactttgacccaaagacaacctcttctctcccgcttctctcgctgtgaagatggcgctctccagggtgtgctgggctcggtcggctgtgtggggctcggcagtcacccctggacattttgtcacccggaggctgcaacttggtcgctctggcctggcttggggggcccctcggtcttcaaagcttcacctttctccaaaggcagatgtgaagaacttgatgtcttatgtggtaaccaagacaaaagcgattaatgggaaataccatcgtttcttgggtcgtcatttcccccgcttctatgtcctgtacacaatcttcatgaaaggattgcagatgttatgggctgatgccaaaaaggctagaagaataaagacaaatatgtggaagcacaatataaagtttcatcaacttccataccgggagatggagcatttgagacagatacagcgtggtacccacccagcaatacatgatatcttggctctgagagagtgtttctctaaccatcctctgggcatgaaccaactccaggctttgcacgtgaaagccttgagccgggccatgcttctcacatcttacctgcctcctcccttgttgagacatcgtttgaagactcatacaactgtgattcaccaactggacaaggctttggcaaagctggggattggccagctgactgctcaggaagtaaaatcggcttgttatctccgtggcctgaattctacgcatattggtgaagataggtgtcgaacttggctgggagaatggctgcagatttcctgcagcctgaaagaagctgagctgtctctcttgctgcacaacgtggtcctgctctccaccaactaccttgggacaaggcgctgaatgaaccatggagcggatggcattgtcctgcagtcgtatagtatagcagtgcaggaacaaacagcacttgccagcaaagtctgtgtgtactgttaagtgtgtgggaggcagagagaggagcaggggccatgggcttcacagcatggcacacctgtgggaactgcagacattcctctcacagctagaactgaaacaaaccctcttgctaggggtggtccgtgtgaggtgtcatcctgtccccctcataattactaatagctggaactggcagcagcctctactgggcttttactgtgatgtgttcagttcatgtcctaggaagtcagcttttgccccaggtgggaatccttatttggcttaggactgatccacttccatgttacttacatctgtgggtttttgttgttgctgttagaaaatttgtggctggtgaaaacagcactcctttggctggagcacttgtgtccgtgcatgtacttgggtgtttccctccatcctttctgatatgaccaaaaatcaagttgttttgttttttgtcaccttcactggcatgggctaaccacttctttttcaaaccctctgaacacctttttctgatgggtaacttgcaggaatattctattggaaaagataacaggaagtacaagtgcttcttgaccccttcctcaatgtttctagccttcactctccattgtcttttctgggctgtattacagccctctgtggatcttcaactctgctgcctccactgtgatgcagcagtccaactgtaactgacagtggctgccttctctgggccatggatcacacctgtaaggtactaattactgcccagcctggggagatcaggagaggtctgcatagttagtaagttgggtttagcttttgtgtgtgcatcagtgacttagagttctgtaataacttattgtaaatgcatgaagcactgtttttaaacccaagtaaagactgcttgaaacctgttga

SEQ ID NO: 467133 - DNA, 1880 bp, Homo sapiens
ctgaacaggttgggtcagctggacagggggggtcagctggacaggtagggaaatagtgtctccatctcttcttcctagtattcatgtctaccaaatgctttctttggcttcctctgaaagaagccagtttcagcaagtgagtttgtgattctttctcctttcaggtacctgtttcccaggcaactactgatcaggcatttctggaccccaaaacaacaaactgatttcttagatatctatcatgctttccggaagcagtcccacccagaaattattagttatttagaaaaggtcatccctctcatttctgatgcaggactccggtggcgtctgacagatctgtgcaccaaggtattcctgcagttaacccttcctacaaatgtggaatcttgttagattcagtgtgcactaaactaggtaagaggagtagtcaggactttcctaacatctacaaatctcttacctcttccaagatacagcgtggtacccacccagcaatacatgatatcttggctctgagagagtgtttctctaaccatcctctgggcatgaaccaactccaggctttgcacgtgaaagccttgagccgggccatgcttctcacatcttacctgcctcctcccttgttgagacatcgtttgaagactcatacaactgtgattcaccaactggacaaggctttggcaaagctggggattggccagctgactgctcaggaagtaaaatcggcttgttatctccgtggcctgaattctacgcatattggtgaagataggtgtcgaacttggctgggagaatggctgcagatttcctgcagcctgaaagaagctgagctgtctctcttgctgcacaacgtggtcctgctctccaccaactaccttgggacaaggcgctgaatgaaccatggagcggatggcattgtcctgcagtcgtatagtatagcagtgcaggaacaaacagcacttgccagcaaagtctgtgtgtactgttaagtgtgtgggaggcagagagaggagcaggggccatgggcttcacagcatggcacacctgtgggaactgcagacattcctctcacagctagaactgaaacaaaccctcttgctaggggtggtccgtgtgaggtgtcatcctgtccccctcataattactaatagctggaactggcagcagcctctactgggcttttactgtgatgtgttcagttcatgtcctaggaagtcagcttttgccccaggtgggaatccttatttggcttaggactgatccacttccatgttacttacatctgtgggtttttgttgttgctgttagaaaatttgtggctggtgaaaacagcactcctttggctggagcacttgtgtccgtgcatgtacttgggtgtttccctccatcctttctgatatgaccaaaaatcaagttgttttgttttttgtcaccttcactggcatgggctaaccacttctttttcaaaccctctgaacacctttttctgatgggtaacttgcaggaatattctattggaaaagataacaggaagtacaagtgcttcttgaccccttcctcaatgtttctagccttcactctccattgtcttttctgggctgtattacagccctctgtggatcttcaactctgctgcctccactgtgatgcagcagtccaactgtaactgacagtggctgccttctctgggccatggatcacacctgtaaggtactaattactgcccagcctggggagatcaggagaggtctgcatagttagtaagttgggtttagcttttgtgtgtgcatcagtgacttagagttctgtaataacttattgtaaatgcatgaagcactgtttttaaacccaagtaaagactgcttgaaacctgttga

SEQ ID NO: 467134 - DNA, 1758 bp, Homo sapiens
gcgacgtacggttaactttgacccaaagacaacctcttctctcccgcttctctcgctgtgaagatggcgctctccagggtgtgctgggctcggtcggctgtgtggggctcggcagtcacccctggacattttgtcacccggaggctgcaacttggtcgctctggcctggcttggggggcccctcggtcttcaaagcttcacctttctccaaaggcagatgtgaagaacttgatgtcttatgtggtaaccaagacaaaagcgattaatgggaaataccatcgtttcttgggtcgtcatttcccccgcttctatgtcctgtacacaatcttcatgaaaggattgcagatgttatgggctgatgccaaaaaggctagaagaataaagacaaatatgtggaagcacaatataaagtttcatcaacttccataccgggagatggagcatttgagacagaaagccttgagccgggccatgcttctcacatcttacctgcctcctcccttgttgagacatcgtttgaagactcatacaactgtgattcaccaactggacaaggctttggcaaagctggggattggccagctgactgctcaggaagtaaaatcggcttgttatctccgtggcctgaattctacgcatattggtgaagataggtgtcgaacttggctgggagaatggctgcagatttcctgcagcctgaaagaagctgagctgtctctcttgctgcacaacgtggtcctgctctccaccaactaccttgggacaaggcgctgaatgaaccatggagcggatggcattgtcctgcagtcgtatagtatagcagtgcaggaacaaacagcacttgccagcaaagtctgtgtgtactgttaagtgtgtgggaggcagagagaggagcaggggccatgggcttcacagcatggcacacctgtgggaactgcagacattcctctcacagctagaactgaaacaaaccctcttgctaggggtggtccgtgtgaggtgtcatcctgtccccctcataattactaatagctggaactggcagcagcctctactgggcttttactgtgatgtgttcagttcatgtcctaggaagtcagcttttgccccaggtgggaatccttatttggcttaggactgatccacttccatgttacttacatctgtgggtttttgttgttgctgttagaaaatttgtggctggtgaaaacagcactcctttggctggagcacttgtgtccgtgcatgtacttgggtgtttccctccatcctttctgatatgaccaaaaatcaagttgttttgttttttgtcaccttcactggcatgggctaaccacttctttttcaaaccctctgaacacctttttctgatgggtaacttgcaggaatattctattggaaaagataacaggaagtacaagtgcttcttgaccccttcctcaatgtttctagccttcactctccattgtcttttctgggctgtattacagccctctgtggatcttcaactctgctgcctccactgtgatgcagcagtccaactgtaactgacagtggctgccttctctgggccatggatcacacctgtaaggtactaattactgcccagcctggggagatcaggagaggtctgcatagttagtaagttgggtttagcttttgtgtgtgcatcagtgacttagagttctgtaataacttattgtaaatgcatgaagcactgtttttaaacccaagtaaagactgcttgaaacctgttga

SEQ ID NO: 467135 - DNA, 2355 bp, Homo sapiens
gcgacgtacggttaactttgacccaaagacaacctcttctctcccgcttctctcgctgtgaagatggcgctctccagggtgtgctgggctcggtcggctgtgtggggctcggcagtcacccctggacattttgtcacccggaggctgcaacttggtcgctctggcctggcttggggggcccctcggtcttcaaagcttcacctttctccaaaggcagatgtgaagaacttgatgtcttatgtggtaaccaagacaaaagcgattaatgggaaataccatcgtttcttgggtcgtcatttcccccgcttctatgtcctgtacacaatcttcatgaaaggattgcagatgttatgggctgatgccaaaaaggctagaagaataaagacaaatatgtggaagcacaatataaagtttcatcaacttccataccgggagatggagcatttgagacagttccgccaagacgtcaccaagtgtcttttcctaggtattatttccattccaccttttgccaactacctggtcttcttgctaatgtacctgtttcccaggcaactactgatcaggcatttctggaccccaaaacaacaaactgatttcttagatatctatcatgctttccggaagcagtcccacccagaaattattagttatttagaaaaggtcatccctctcatttctgatgcaggactccggtggcgtctgacagatctgtgcaccaaggtattcctgcagttaacccttcctacaaatgtggaatcttgttagattcagtgtgcactaaactaggtaagaggagtagtcaggactttcctaacatctacaaatctcttacctcttccaagatacagcgtggtacccacccagcaatacatgatatcttggctctgagagagtgtttctctaaccatcctctgggcatgaaccaactccaggctttgcacgtggtgagcactttgagggcttctcttttccatagcatcaccatgtttcaggtgtttgcttgagctcatactatttgcctttcccctcctatgtggttgtgttacaaaagccttgagccgggccatgcttctcacatcttacctgcctcctcccttgttgagacatcgtttgaagactcatacaactgtgattcaccaactggacaaggctttggcaaagctggggattggccagctgactgctcaggaagtaaaatcggcttgttatctccgtggcctgaattctacgcatattggtgaagataggtgtcgaacttggctgggagaatggctgcagatttcctgcagcctgaaagaagctgagctgtctctcttgctgcacaacgtggtcctgctctccaccaactaccttgggacaaggcgctgaatgaaccatggagcggatggcattgtcctgcagtcgtatagtatagcagtgcaggaacaaacagcacttgccagcaaagtctgtgtgtactgttaagtgtgtgggaggcagagagaggagcaggggccatgggcttcacagcatggcacacctgtgggaactgcagacattcctctcacagctagaactgaaacaaaccctcttgctaggggtggtccgtgtgaggtgtcatcctgtccccctcataattactaatagctggaactggcagcagcctctactgggcttttactgtgatgtgttcagttcatgtcctaggaagtcagcttttgccccaggtgggaatccttatttggcttaggactgatccacttccatgttacttacatctgtgggtttttgttgttgctgttagaaaatttgtggctggtgaaaacagcactcctttggctggagcacttgtgtccgtgcatgtacttgggtgtttccctccatcctttctgatatgaccaaaaatcaagttgttttgttttttgtcaccttcactggcatgggctaaccacttctttttcaaaccctctgaacacctttttctgatgggtaacttgcaggaatattctattggaaaagataacaggaagtacaagtgcttcttgaccccttcctcaatgtttctagccttcactctccattgtcttttctgggctgtattacagccctctgtggatcttcaactctgctgcctccactgtgatgcagcagtccaactgtaactgacagtggctgccttctctgggccatggatcacacctgtaaggtactaattactgcccagcctggggagatcaggagaggtctgcatagttagtaagttgggtttagcttttgtgtgtgcatcagtgacttagagttctgtaataacttattgtaaatgcatgaagcactgtttttaaacccaagtaaagactgcttgaaacctgttga

SEQ ID NO: 467136 - DNA, 2087 bp, Homo sapiens
gcgacgtacggttaactttgacccaaagacaacctcttctctcccgcttctctcgctgtgaagatggcgctctccagggtgtgctgggctcggtcggctgtgtggggctcggcagtcacccctggacattttgtcacccggaggctgcaacttggtcgctctggcctggcttggggggcccctcggtcttcaaagcttcacctttctccaaaggcagatgtgaagaacttgatgtcttatgtggtaaccaagacaaaagcgattaatgggaaataccatcgtttcttgggtcgtcatttcccccgcttctatgtcctgtacacaatcttcatgaaaggattgcagatgttatgggctgatgccaaaaaggctagaagaataaagacaaatatgtggaagcacaatataaagtttcatcaacttccataccgggagatggagcatttgagacagttccgccaagacgtcaccaagtgtcttttcctaggtattatttccattccaccttttgccaactacctggtcttcttgctaatgtacctgtttcccaggcaactactgatcaggcatttctggaccccaaaacaacaaactgatttcttagatatctatcatgctttccggaagcagtcccacccagaaattattagttatttagaaaaggtcatccctctcatttctgatgcaggactccggtggcgtctgacagatctgtgcaccaagatacagcgtggtacccacccagcaatacatgatatcttggctctgagagagtgtttctctaaccatcctctgggcatgaaccaactccaggctttgcacgtgaaagccttgagccgggccatgcttctcacatcttacctgcctcctcccttgttgagacatcgtttgaagactcatacaactgtgattcaccaactggacaaggctttggcaaagctggggattggccagctgactgctcaggaagtaaaatcgataggtgtcgaacttggctgggagaatggctgcagatttcctgcagcctgaaagaagctgagctgtctctcttgctgcacaacgtggtcctgctctccaccaactaccttgggacaaggcgctgaatgaaccatggagcggatggcattgtcctgcagtcgtatagtatagcagtgcaggaacaaacagcacttgccagcaaagtctgtgtgtactgttaagtgtgtgggaggcagagagaggagcaggggccatgggcttcacagcatggcacacctgtgggaactgcagacattcctctcacagctagaactgaaacaaaccctcttgctaggggtggtccgtgtgaggtgtcatcctgtccccctcataattactaatagctggaactggcagcagcctctactgggcttttactgtgatgtgttcagttcatgtcctaggaagtcagcttttgccccaggtgggaatccttatttggcttaggactgatccacttccatgttacttacatctgtgggtttttgttgttgctgttagaaaatttgtggctggtgaaaacagcactcctttggctggagcacttgtgtccgtgcatgtacttgggtgtttccctccatcctttctgatatgaccaaaaatcaagttgttttgttttttgtcaccttcactggcatgggctaaccacttctttttcaaaccctctgaacacctttttctgatgggtaacttgcaggaatattctattggaaaagataacaggaagtacaagtgcttcttgaccccttcctcaatgtttctagccttcactctccattgtcttttctgggctgtattacagccctctgtggatcttcaactctgctgcctccactgtgatgcagcagtccaactgtaactgacagtggctgccttctctgggccatggatcacacctgtaaggtactaattactgcccagcctggggagatcaggagaggtctgcatagttagtaagttgggtttagcttttgtgtgtgcatcagtgacttagagttctgtaataacttattgtaaatgcatgaagcactgtttttaaacccaagtaaagactgcttgaaacctgttga

SEQ ID NO: 467137 - DNA, 1545 bp, Homo sapiens
gcgacgtacggttaactttgacccaaagacaacctcttctctcccgcttctctcgctgtgaagatggcgctctccagggtgtgctgggctcggtcggctgtgtggggctcggcagtcacccctggacattttgtcacccggaggctgcaacttggtcgctctggcctggcttggggggcccctcggtcttcaaagcttcacctttctccaaaggcagatgtgaagaacttgatgtcttatgtggtaaccaagacaaaagcgattaatgggaaataccatcgtttcttgggtcgtcatttcccccgcttctatgtcctgtacacaatcttcatgaaagaaagccttgagccgggccatgcttctcacatcttacctgcctcctcccttgttgagacatcgtttgaagactcatacaactgtgattcaccaactggacaaggctttggcaaagctggggattggccagctgactgctcaggaagtaaaatcgaagctgagctgtctctcttgctgcacaacgtggtcctgctctccaccaactaccttgggacaaggcgctgaatgaaccatggagcggatggcattgtcctgcagtcgtatagtatagcagtgcaggaacaaacagcacttgccagcaaagtctgtgtgtactgttaagtgtgtgggaggcagagagaggagcaggggccatgggcttcacagcatggcacacctgtgggaactgcagacattcctctcacagctagaactgaaacaaaccctcttgctaggggtggtccgtgtgaggtgtcatcctgtccccctcataattactaatagctggaactggcagcagcctctactgggcttttactgtgatgtgttcagttcatgtcctaggaagtcagcttttgccccaggtgggaatccttatttggcttaggactgatccacttccatgttacttacatctgtgggtttttgttgttgctgttagaaaatttgtggctggtgaaaacagcactcctttggctggagcacttgtgtccgtgcatgtacttgggtgtttccctccatcctttctgatatgaccaaaaatcaagttgttttgttttttgtcaccttcactggcatgggctaaccacttctttttcaaaccctctgaacacctttttctgatgggtaacttgcaggaatattctattggaaaagataacaggaagtacaagtgcttcttgaccccttcctcaatgtttctagccttcactctccattgtcttttctgggctgtattacagccctctgtggatcttcaactctgctgcctccactgtgatgcagcagtccaactgtaactgacagtggctgccttctctgggccatggatcacacctgtaaggtactaattactgcccagcctggggagatcaggagaggtctgcatagttagtaagttgggtttagcttttgtgtgtgcatcagtgacttagagttctgtaataacttattgtaaatgcatgaagcactgtttttaaacccaagtaaagactgcttgaaacctgttga

SEQ ID NO: 467138 - DNA, 2015 bp, Homo sapiens
gcgacgtacggttaactttgacccaaagacaacctcttctctcccgcttctctcgctgtgaagatggcgctctccagggtgtgctgggctcggtcggctgtgtggggctcggcagtcacccctggacattttgtcacccggaggctgcaacttggtcgctctggcctggcttggggggcccctcggtcttcaaagcttcacctttctccaaaggcagatgtgaagaacttgatgtcttatgtggtaaccaagacaaaagcgattaatgggaaataccatcgtttcttgggtcgtcatttcccccgcttctatgtcctgtacacaatcttcatgaaaggattgcagatgttatgggctgatgccaaaaaggctagaagaataaagacaaatatgtggaagcacaatataaagtttcatcaacttccataccgggagatggagcatttgagacagttccgccaagacgtcaccaagtgtcttttcctaggtattatttccattccaccttttgccaactacctggtcttcttgctaatgtacctgtttcccaggcaactactgatcaggcatttctggaccccaaaacaacaaactgatttcttagatatctatcatgctttccggaagcagtcccacccagaaattattagttatttagaaaaggtcatccctctcatttctgatgcaggactccggtggcgtctgacagatctgtgcaccaagatacagcgtggtacccacccagcaatacatgatatcttggctctgagagagtgtttctctaaccatcctctgggcatgaaccaactccaggctttgcacgtgaaagccttgagccgggccatgcttctcacatcttacctgcctcctcccttgttgagacatcgtttgaagactcatacaactgtgattcaccaactggacaaggctttggcaaagctggggattggccagctgactgctcaggaagtaaaatcggcttgttatctccgtggcctgaattctacgcatattggtgaagataggtgtcgaacttggctgggagaatggctgcagatttcctgcagcctgaaagaagctgagctgtctctcttgctgcacaacgtggtcctgctctccaccaactaccttgggacaaggcgctgaatgaaccatggagcggatggcattgtcctgcagtcgtatagtatagtgcagacattcctctcacagctagaactgaaacaaaccctcttgctaggggtggtccgtgtgaggtgtcatcctgtccccctcataattactaatagctggaactggcagcagcctctactgggcttttactgtgatgtgttcagttcatgtcctaggaagtcagcttttgccccaggtgggaatccttatttggcttaggactgatccacttccatgttacttacatctgtgggtttttgttgttgctgttagaaaatttgtggctggtgaaaacagcactcctttggctggagcacttgtgtccgtgcatgtacttgggtgtttccctccatcctttctgatatgaccaaaaatcaagttgttttgttttttgtcaccttcactggcatgggctaaccacttctttttcaaaccctctgaacacctttttctgatgggtaacttgcaggaatattctattggaaaagataacaggaagtacaagtgcttcttgaccccttcctcaatgtttctagccttcactctccattgtcttttctgggctgtattacagccctctgtggatcttcaactctgctgcctccactgtgatgcagcagtccaactgtaactgacagtggctgccttctctgggccatggatcacacctgtaaggtactaattactgcccagcctggggagatcaggagaggtctgcatagttagtaagttgggtttagcttttgtgtgtgcatcagtgacttagagttctgtaataacttattgtaaatgcatgaagcactgtttttaaacccaagtaaagactgcttgaaacctgttga

SEQ ID NO: 467139 - DNA, 2155 bp, Homo sapiens
gcgacgtacggttaactttgacccaaagacaacctcttctctcccgcttctctcgctgtgaagatggcgctctccagggtgtgctgggctcggtcggctgtgtggggctcggcagtcacccctggacattttgtcacccggaggctgcaacttggtcgctctggcctggcttggggggcccctcggtcttcaaagcttcacctttctccaaaggcagatgtgaagaacttgatgtcttatgtggtaaccaagacaaaagcgattaatgggaaataccatcgtttcttgggtcgtcatttcccccgcttctatgtcctgtacacaatcttcatgaaaggattgcagatgttatgggctgatgccaaaaaggctagaagaataaagacaaatatgtggaagcacaatataaagtttcatcaacttccataccgggagatggagcatttgagacagttccgccaagacgtcaccaagtgtcttttcctaggtattatttccattccaccttttgccaactacctggtcttcttgctaatgtacctgtttcccaggcaactactgatcaggcatttctggaccccaaaacaacaaactgatttcttagatatctatcatgctttccggaagcagtcccacccagaaattattagttatttagaaaaggtcatccctctcatttctgatgcaggactccggtggcgtctgacagatctgtgcaccaaggtattcctgcagttaacccttcctacaaatgtggaatcttgttagattcagtgtgcactaaactaggtaagaggagtagtcaggactttcctaacatctacaaatctcttacctcttccaagatacagcgtggtacccacccagcaatacatgatatcttggctctgagagagtgtttctctaaccatcctctgggcatgaaccaactccaggctttgcacgtgaaagccttgagccgggccatgcttctcacatcttacctgcctcctcccttgttgagacatcgtttgaagactcatacaactgtgattcaccaactggacaaggctttggcaaagctggggattggccagctgactgctcaggaagtaaaatcgaagctgagctgtctctcttgctgcacaacgtggtcctgctctccaccaactaccttgggacaaggcgctgaatgaaccatggagcggatggcattgtcctgcagtcgtatagtatagcagtgcaggaacaaacagcacttgccagcaaagtctgtgtgtactgttaagtgtgtgggaggcagagagaggagcaggggccatgggcttcacagcatggcacacctgtgggaactgcagacattcctctcacagctagaactgaaacaaaccctcttgctaggggtggtccgtgtgaggtgtcatcctgtccccctcataattactaatagctggaactggcagcagcctctactgggcttttactgtgatgtgttcagttcatgtcctaggaagtcagcttttgccccaggtgggaatccttatttggcttaggactgatccacttccatgttacttacatctgtgggtttttgttgttgctgttagaaaatttgtggctggtgaaaacagcactcctttggctggagcacttgtgtccgtgcatgtacttgggtgtttccctccatcctttctgatatgaccaaaaatcaagttgttttgttttttgtcaccttcactggcatgggctaaccacttctttttcaaaccctctgaacacctttttctgatgggtaacttgcaggaatattctattggaaaagataacaggaagtacaagtgcttcttgaccccttcctcaatgtttctagccttcactctccattgtcttttctgggctgtattacagccctctgtggatcttcaactctgctgcctccactgtgatgcagcagtccaactgtaactgacagtggctgccttctctgggccatggatcacacctgtaaggtactaattactgcccagcctggggagatcaggagaggtctgcatagttagtaagttgggtttagcttttgtgtgtgcatcagtgacttagagttctgtaataacttattgtaaatgcatgaagcactgtttttaaacccaagtaaagactgcttgaaacctgttga

SEQ ID NO: 467140 - DNA, 2409 bp, Homo sapiens
tttgagacggcatctcactctgtcgcccaggctggagtgcagtggctcaatcttggctcactgcaagctccacctcccgggttcaagccattctcctacctcagcctcccaagatatttttcttctctcttttttttttttttcgagacggagtctctctgttgcccccaggctggagttgcagtgagccgagatcgcgccactgcagtccagcttgggtgacagagcgagactctgtctcagaaaaaaaaacaacaaatcagttgccttttacatactgggtccacataaggactgtgctatagttagattgtcaacatcacatatagtgtcctggtcaggctgcaactctctccaaagcatgctcttcacatgctttagttcaaaatgagtcattatatctgattgctgcgtggcaggctattctgctagtccttcctttcacatcccatttcagtaatggtgcttgaaattgtgcttcagtgtgtcttataaactttggtctgagagtcacttaagagaaagggctgactgtagtggctctcaccagtaatcccagcacttggggagactgaagcaggaagattgcttgagaccaggagtttgagaccaccctgggcaatatagcaagacccgtctctgcaaaaaaattaaaaacttagccaggcatagtggcctgtgcctgtagtcccagctactcagtaggctgtggtgggaggattgcttgagcctaggaggtcgaggctgcagtgagctgtgatcttgccactgtactccagcctgggtgagagaggggaccctgtctcttaaaaaaaaaaaaaaaaaaaaaaaaactgaaaaagaaaaagaacactgaggtagggaaatagtgtctccatctcttcttcctagtattcatgtctaccaaatgctttctttggcttcctctgaaagaagccagtttcagcaagtgagtttgtgattctttctcctttcaggtacctgtttcccaggcaactactgatcagccctggcctcaagagatccatcaacccaaagtgccgagactacaggtgtgagctaccgcacccagcatatttatttatttttcagtctcactattttaaccaagctggtcttgaactcctggcctcaagcaatcctcccatctcagcctcccaagtagctgggattacaggcatgcaccaccacgcccagctaatttcgtatttttttttagtagagaccaggtttctccatgttggtcaggctgatctcgaactcccgacctcaggtgatccgctggcctcggcctcccaaagttttgggatcactggcgtgagccaccatgtccagcctatcctgttctttatagaagctgagctgtctctcttgctgcacaacgtggtcctgctctccaccaactaccttgggacaaggcgctgaatgaaccatggagcggatggcattgtcctgcagtcgtatagtatagcagtgcaggaacaaacagcacttgccagcaaagtctgtgtgtactgttaagtgtgtgggaggcagagagaggagcaggggccatgggcttcacagcatggcacacctgtgggaactgcagacattcctctcacagctagaactgaaacaaaccctcttgctaggggtggtccgtgtgaggtgtcatcctgtccccctcataattactaatagctggaactggcagcagcctctactgggcttttactgtgatgtgttcagttcatgtcctaggaagtcagcttttgccccaggtgggaatccttatttggcttaggactgatccacttccatgttacttacatctgtgggtttttgttgttgctgttagaaaatttgtggctggtgaaaacagcactcctttggctggagcacttgtgtccgtgcatgtacttgggtgtttccctccatcctttctgatatgaccaaaaatcaagttgttttgttttttgtcaccttcactggcatgggctaaccacttctttttcaaaccctctgaacacctttttctgatgggtaacttgcaggaatattctattggaaaagataacaggaagtacaagtgcttcttgaccccttcctcaatgtttctagccttcactctccattgtcttttctgggctgtattacagccctctgtggatcttcaactctgctgcctccactgtgatgcagcagtccaactgtaactgacagtggctgccttctctgggccatggatcacacctgtaaggtactaattactgcccagcctggggagatcaggagaggtctgcatagttagtaagttgggtttagcttttgtgtgtgcatcagtgacttagagttctgtaataacttattgtaaatgcatgaagcactgtttttaaacccaagtaaagactgcttgaaacctgttga

SEQ ID NO: 467141 - DNA, 2022 bp, Homo sapiens
gcgacgtacggttaactttgacccaaagacaacctcttctctcccgcttctctcgctgtgaagatggcgctctccagggtgtgctgggctcggtcggctgtgtggggctcggcagtcacccctggacattttgtcacccggaggctgcaacttggtcgctctggcctggcttggggggcccctcggtcttcaaagcttcacctttctccaaaggcagatgtgaagaacttgatgtcttatgtggtaaccaagacaaaagcgattaatgggaaataccatcgtttcttgggtcgtcatttcccccgcttctatgtcctgtacacaatcttcatgaaaggattgcagatgttatgggctgatgccaaaaaggctagaagaataaagacaaatatgtggaagcacaatataaagtttcatcaacttccataccgggagatggagcatttgagacagttccgccaagacgtcaccaagtgtcttttcctaggtattatttccattccaccttttgccaactacctggtcttcttgctaatgtacctgtttcccaggcaactactgatcaggcatttctggaccccaaaacaacaaactgatttcttagatatctatcatgctttccggaagcagtcccacccagaaattattagttatttagaaaaggtcatccctctcatttctgatgcaggactccggtggcgtctgacagatctgtgcaccaagatacagcgtggtacccacccagcaatacatgatatcttggctctgagagagtgtttctctaaccatcctctgggcatgaaccaactccaggctttgcacgtgaaagccttgagccgggccatgcttctcacatcttacctgcctcctcccttgttgagacatcgtttgaagactcatacaactgtgattcaccaactggacaaggctttggcaaagctggggattggccagctgactgctcaggaagtaaaatcggcttgttatctccgtggcctgaattctacgcatattggtgaagataggtgtcgaacttggctgggagaatggctgcagatttcctgcagcctgaaagaagctgagctgtctctcttgctgcacaacgtggtcctgctctccaccaactaccttgggacaaggcgctgaatgaaccatggagcggatggcattgtcctgcagtcgtatagtatagcagtgcaggaacaaacagcacttgccagcaaagtctgtgtgtactgttaagtgtgtgggaggcagagagaggagcaggggccatgggcttcacagcatggcacacctgtgggaactgcagacattcctctcacagctagaactgaaacaaaccctcttgctaggggtggtccgtgtgaggtgtcatcctgtccccctcataattactaatagctggaactggcagcagcctctactgggcttttactgtgatgtgttcagttcatgtcctaggaagtcagcttttgccccaggtgggaatccttatttggcttaggactgatccacttccatgttacttacatctgtgggtttttgttgttgctgttagaaaatttgtggctggtgaaaacagcactcctttggctggagcacttgtgtccgtgcatgtacttgggtgtttccctccatcctttctgatatgaccaaaaatcaagttgttttgttttttgtcaccttcactggcatgggctaaccacttctttttcaaaccctctgaacacctttttctgatgggtaacttgcaggaatattctattggaaaagataacaggaagtacaagtgcttcttgaccccttcctcaatgtttctagccttcactctccattgtcttttctgggctgtattacagccctctgtggatcttcaactctgctgcctccactgtgatgcagcagtccaactgtaactgacagtggctgccttctctgggccatggatcacacctgtaaggtactaattaatgaaaataaccccctactaattaactctattaaacgccttttaatcgg

SEQ ID NO: 467142 - DNA, 917 bp, Homo sapiens
aaggctaggtacgaggctgggtggcgctaccttgggacaaggcgctgaatgaaccatggagcggatggcattgtcctgcagtcgtatagtatagtgcagacattcctctcacagctagaactgaaacaaaccctcttgctaggggtggtccgtgtgaggtgtcatcctgtccccctcataattactaatagctggaactggcagcagcctctactgggcttttactgtgatgtgttcagttcatgtcctaggaagtcagcttttgccccaggtgggaatccttatttggcttaggactgatccacttccatgttacttacatctgtgggtttttgttgttgctgttagaaaatttgtggctggtgaaaacagcactcctttggctggagcacttgtgtccgtgcatgtacttgggtgtttccctccatcctttctgatatgaccaaaaatcaagttgttttgttttttgtcaccttcactggcatgggctaaccacttctttttcaaaccctctgaacacctttttctgatgggtaacttgcaggaatattctattggaaaagataacaggaagtacaagtgcttcttgaccccttcctcaatgtttctagccttcactctccattgtcttttctgggctgtattacagccctctgtggatcttcaactctgctgcctccactgtgatgcagcagtccaactgtaactgacagtggctgccttctctgggccatggatcacacctgtaaggtactaattactgcccagcctggggagatcaggagaggtctgcatagttagtaagttgggtttagcttttgtgtgtgcatcagtgacttagagttctgtaataacttattgtaaatgcatgaagcactgtttttaaacccaagtaaagactgcttgaaacctgttga

SEQ ID NO: 467143 - DNA, 1464 bp, Homo sapiens
gcgacgtacggttaactttgacccaaagacaacctcttctctcccgcttctctcgctgtgaagatggcgctctccagggtgtgctgggctcggtcggctgtgtggggctcggcagtcacccctggacattttgtcacccggaggctgcaacttggtcgctctggcctggcttggggggcccctcggtcttcaaagcttcacctttctccaaaggcagatgtgaagaacttgatgtcttatgtggtaaccaagacaaaagcgattaatgggaaataccatcgtttcttgggtcgtcatttcccccgcttctatgtcctgtacacaatcttcatgaaaggattgcagatgttatgggctgatgccaaaaaggctagaagaataaagacaaatatgtggaagcacaatataaagtttcatcaacttccataccgggagatggagcatttgagacagttccgccaagacgtcaccaagtgtcttttcctaggtattatttccattccaccttttgccaactacctggtcttcttgctaatgtacctgtttcccaggcaactactgatcaggcatttctggaccccaaaacaacaaactgatttcttagatatctatcatgctttccggaagcagtcccacccagaaattattagttatttagaaaaggtcatccctctcatttctgatgcaggactccggtggcgtctgacagatctgtgcaccaaggtattcctgcagttaacccttcctacaaatgtggaatcttgttagattcagtgtgcactaaactaggtaagaggagaagtcagcttttgccccaggtgggaatccttatttggcttaggactgatccacttccatgttacttacatctgtgggtttttgttgttgctgttagaaaatttgtggctggtgaaaacagcactcctttggctggagcacttgtgtccgtgcatgtacttgggtgtttccctccatcctttctgatatgaccaaaaatcaagttgttttgttttttgtcaccttcactggcatgggctaaccacttctttttcaaaccctctgaacacctttttctgatgggtaacttgcaggaatattctattggaaaagataacaggaagtacaagtgcttcttgaccccttcctcaatgtttctagccttcactctccattgtcttttctgggctgtattacagccctctgtggatcttcaactctgctgcctccactgtgatgcagcagtccaactgtaactgacagtggctgccttctctgggccatggatcacacctgtaaggtactaattactgcccagcctggggagatcaggagaggtctgcatagttagtaagttgggtttagcttttgtgtgtgcatcagtgacttagagttctgtaataacttattgtaaatgcatgaagcactgtttttaaacccaagtaaagactgcttgaaacctgttga

SEQ ID NO: 467144 - DNA, 703 bp, Homo sapiens
gcctactactactaaattcgcggccgcgtcgacctaggaagtcagcttttgccccaggtgggaatccttatttggcttaggactgatccacttccatgttacttacatctgtgggtttttgttgttgctgttagaaaatttgtggctggtgaaaacagcactcctttggctggagcacttgtgtccgtgcatgtacttgggtgtttccctccatcctttctgatatgaccaaaaatcaagttgttttgttttttgtcaccttcactggcatgggctaaccacttctttttcaaaccctctgaacacctttttctgatgggtaacttgcaggaatattctattggaaaagataacaggaagtacaagtgcttcttgaccccttcctcaatgtttctagccttcactctccattgtcttttctgggctgtattacagccctctgtggatcttcaactctgctgcctccactgtgatgcagcagtccaactgtaactgacagtggctgccttctctgggccatggatcacacctgtaaggtactaattactgcccagcctggggagatcaggagaggtctgcatagttagtaagttgggtttagcttttgtgtgtgcatcagtgacttagagttctgtaataacttattgtaaatgcatgaagcactgtttttaaacccaagtaaagactgcttgaaacctgttga

SEQ ID NO: 467145 - DNA, 1243 bp, Homo sapiens
gcgacgtacggttaactttgacccaaagacaacctcttctctcccgcttctctcgctgtgaagatggcgctctccagggtgtgctgggctcggtcggctgtgtggggctcggcagtcacccctggacattttgtcacccggaggctgcaacttggtcgctctggcctggcttggggggcccctcggtcttcaaagcttcacctttctccaaaggcagatgtgaagaacttgatgtcttatgtggtaaccaagacaaaagcgattaatgggaaataccatcgtttcttgggtcgtcatttcccccgcttctatgtcctgtacacaatcttcatgaaaggattgcagatgttatgggctgatgccaaaaaggctagaagaataaagacaaatatgtggaagcacaatataaagtttcatcaacttccataccgggagatggagcatttgagacagttccgccaagacgtcaccaagtgtcttttcctaggtattatttccattccaccttttgccaactacctggtcttcttgctaatgtacctgtttcccaggcaactactgatcaggcatttctggaccccaaaacaacaaactgatttcttagatatctatcatgctttccggaagcagtcccacccagaaattattagttatttagaaaaggtcatccctctcatttctgatgcaggactccggtggcgtctgacagatctgtgcaccaagatacagcgtggtacccacccagcaatacatgatatcttggctctgagagagtgtttctctaaccatcctctgggcatgaaccaactccaggctttgcacgtgaaagccttgagccgggccatgcttctcacatcttacctgcctcctcccttgttgagacatcgtttgaagactcatacaactgtgattcaccaactggacaaggctttggcaaagctggggattggccagctgactgctcaggaagtaaaatcggtaagagcttgattgcaacatcaaccctcaacccttggtgtgcttttgagcctatggcaggccggaggtttacaggggctccttgtcttgtttgtttatagaacccagcttctttattctctcacttcatttatttatttatgatttatttttatttatttatttattttgagacagagtctcattctgttgcccaggctagagtacatgagccaagatcgcaccactgcactccagcctgggtgatagagtgagactctgtctc

SEQ ID NO: 467146 - DNA, 1196 bp, Homo sapiens
  misc_feature (910)..(910): n is a, c, g, or t
  misc_feature (921)..(921): n is a, c, g, or t
  misc_feature (929)..(929): n is a, c, g, or t
  misc_feature (946)..(946): n is a, c, g, or t
gcgacgtacggttaactttgacccaaagacaacctcttctctcccgcttctctcgctgtgaagatggcgctctccagggtgtgctgggctcggtcggctgtgtggggctcggcagtcacccctggacattttgtcacccggaggctgcaacttggtcgctctggcctggcttggggggcccctcggtcttcaaagcttcacctttctccaaaggcagatgtgaagaacttgatgtcttatgtggtaaccaagacaaaagcgattaatgggaaataccatcgtttcttgggtcgtcatttcccccgcttctatgtcctgtacacaatcttcatgaaaggattgcagatgttatgggctgatgccaaaaaggctagaagaataaagacaaatatgtggaagcacaatataaagtttcatcaacttccataccgggagatggagcatttgagacagttccgccaagacgtcaccaagtgtcttttcctaggtattatttccattccaccttttgccaactacctggtcttcttgctaatgtacctgtttcccaggcaactactgatcaggcatttctggaccccaaaacaacaaactgatttcttagatatctatcatgctttccggaagcagtcccacccagaaattattagttatttagaaaaggtcatccctctcatttctgatgcaggactccggtggcgtctgacagatctgtgcaccaagatacagcgtggtacccacccagcaatacatgatatcttggctctgagagagtgtttctctaaccatcctctgggcatgaaccaactccaggctttgcacgtgaaagccttgagccgggccatgcttctcacatcttacctgcctcctcccttgttgagacatcgtttgaagactcatacacttgccnctgtactccancctgggtnagagaggggaccctgtntcttttaaaaaaaaaaagaaaaaaaaagttccagaaaggagattaaattaatatctggctggggaatacatagggttaatttagccagactttctgaagttagggagcttgatttttaaaaaggagtgaccagtgaaacagaagagggagaccattccatagcagattaccagaagcccaacgtagctagaagagagcgatgtgctaagcggacaaaatgttgagaaaccgtcgattctcacgtcctcta

SEQ ID NO: 467147 - DNA, 1800 bp, Homo sapiens
gcgacgtacggttaactttgacccaaagacaacctcttctctcccgcttctctcgctgtgaagatggcgctctccagggtgtgctgggctcggtcggctgtgtggggctcggcagtcacccctggacattttgtcacccggaggctgcaacttggtcgctctggcctggcttggggggcccctcggtgagggacctgtagcgagaaaagcatttttgacgtccaggctctttcagtgtctcaaccttgcttgcattctgtctcttaattctcagagttccacgccttggccctggaatttttattcttctgttcaggattcaaactccgatccccactagtgacccggcttcctgaccctctgtactctcagtgccccatattgtctggtttccccgcgtgtcctgagctcatctttcagcctcactttttcggctcaggttttaccgctgctatctcgattccacctctttctgacttagcctgcagttcaaattgtcccacaggcattgcgctctctccagaggcataccctgagttcctttcctgcctggcctttgcctgatttgtgtttcacagtctgattgcctatctcttcttgaccccaagaccttccttggatttcagaagtgtcaagccttgggatacaatctccgagactcctgctttacattagggactcaaggcgtgagggagcttctaggactgattcccagatagtctctttgatcttccttgtaggtcttcaaagcttcacctttctccaaaggcagatgtgaagaacttgatgtcttatgtggtaaccaagacaaaagcgattaatgggaaataccatcgtttcttgggtcgtcatttcccccgcttctatgtcctgtacacaatcttcatgaaaggattgcagatgttatgggctgatgccaaaaaggctagaagaataaagacaaatatgtggaagcacaatataaagtttcatcaacttccataccgggagatggagcatttgagacagttccgccaagacgtcaccaagtgtcttttcctaggtattatttccattccaccttttgccaactacctggtcttcttgctaatgtacctgtttcccaggcaactactgatcagccctggcctcaagagatccatcaacccaaagtgccgagactacaggtgtgagctaccgcacccagcatatttatttatttttcagtctcactattttaaccaagctggtcttgaactcctggcctcaagcaatcctcccatctcagcctcccaagtagctgggattacaggcatgcaccaccacgcccagctaatttcgtatttttttttagtagagaccaggtttctccatgttggtcaggctgatctcgaactcccgacctcaggtgatccgctggcctcggcctcccaaagttttgggatcactggcgtgagccaccatgtccagcctatcctgttctttataggtatttattatagcagtatccctagcctctacccactagatgccagtagcaccccttcacccacagttgtctcaaccaaaaatgtctctagacattgccaaatgtcctaggggtggggaggagagaggcaggattgtccccgttgagaagtactggtctaaaggcattcaaactcagaaaaaaaaacagtctgctgaccaaacacaaagcatctgagggtatgtattaggcttgtttgccccctgtttaggctaggtcttgatgttttgtgggcctttggatgttagggtaggcctactaatcttgaagctgagaaatgtccctagagcacc

SEQ ID NO: 467148 - DNA, 1032 bp, Homo sapiens
gcgacgtacggttaactttgacccaaagacaacctcttctctcccgcttctctcgctgtgaagatggcgctctccagggtgtgctgggctcggtcggctgtgtggggctcggcagtcacccctggacattttgtcacccggaggctgcaacttggtcgctctggcctggcttggggggcccctcggtgagggacctgtagcgagaaaagcatttttgacgtccaggctctttcagtgtctcaaccttgcttgcattctgtctcttaattctcagagttccacgccttggccctggaatttttattcttctgttcaggattcaaactccgatccccactagtgacccggcttcctgaccctctgtactctcagtgccccatattgtctggtttccccgcgtgtcctgagctcatctttcagcctcactttttcggctcaggttttaccgctgctatctcgattccacctctttctgacttagcctgcagttcaaattgtcccacaggcattgcgctctctccagaggcataccctgagttcctttcctgcctggcctttgcctgatttgtgtttcacagtctgattgcctatctcttcttgaccccaagaccttccttggatttcagaagtgtcaagccttgggatacaatctccgagactcctgctttacattagggactcaaggcgtgagggagcttctaggactgattcccagatagtctctttgatcttccttgtaggtcttcaaagcttcacctttctccaaaggcagatgtgaagaacttgatgtcttatgtggtaaccaagacaaaagcgattaatgggaaataccatcgtttcttgggtcgtcatttcccccgcttctatgtcctgtacacaatcttcatgaaaggtaaaaacgaaactacaatagaaattccggaatcagctcttgggcagggtcaaagagttagcataaataagatcatttgcaggttctgctatggggatgtgagccgagatatcttatatttcataaatgcctgcgcctta

SEQ ID NO: 467149 - DNA, 602 bp, Homo sapiens
cgaggcgggcagatcacaaggtcaggagattgagaccatcctggctaacacagtgaaaccctgtctctactaaaaatacaaaatactagctaggcgtggtggcgggtgcctgtaatcccagctacttgggaggctgaggcagtagaatcgcatgaacccaggaggcagaggttgcagtgagccgagatcgcgccactgcagtccagcttgggtgacagagcgagactctgtctcagaaaaaaaaacaacaaatcagttgccttttacatactgggtccacataaggactgtgctatagttagattgtcaacatcacatatagtgtcctggtcaggctgcaactctctccaaagcatgctcttcacatgctttagttcaaaatgagtcattatatctgattgctgcgtggcaggctattctgctagtccttcctttcacatcccatttcagtaatggtgcttgaaattgtgcttcagtgtgtcttataaactttggtctgagagtcacttaagagaaagggctgactgtagtggctctcaccagtaatcccagcacttggggagactgaagcaggaagattgcttgagaccaggagtttgaga

SEQ ID NO: 467150 - DNA, 1421 bp, Homo sapiens
  misc_feature (1135)..(1135): n is a, c, g, or t
  misc_feature (1146)..(1146): n is a, c, g, or t
  misc_feature (1154)..(1154): n is a, c, g, or t
  misc_feature (1171)..(1171): n is a, c, g, or t
gcgacgtacggttaactttgacccaaagacaacctcttctctcccgcttctctcgctgtgaagatggcgctctccagggtgtgctgggctcggtcggctgtgtggggctcggcagtcacccctggacattttgtcacccggaggctgcaacttggtcgctctggcctggcttggggggcccctcggtcttcaaagcttcacctttctccaaaggcagatgtgaagaacttgatgtcttatgtggtaaccaagacaaaagcgattaatgggaaataccatcgtttcttgggtcgtcatttcccccgcttctatgtcctgtacacaatcttcatgaaaggattgcagatgttatgggctgatgccaaaaaggctagaagaataaagacaaatatgtggaagcacaatataaagtttcatcaacttccataccgggagatggagcatttgagacagttccgccaagacgtcaccaagtgtcttttcctaggtattatttccattccaccttttgccaactacctggtcttcttgctaatgtacctgtttcccaggcaactactgatcaggcatttctggaccccaaaacaacaaactgatttcttagatatctatcatgctttccggaagcagtcccacccagaaattattagttatttagaaaaggtcatccctctcatttctgatgcaggactccggtggcgtctgacagatctgtgcaccaaggtattcctgcagttaacccttcctacaaatgtggaatcttgttagattcagtgtgcactaaactaggtaagaggagtagtcaggactttcctaacatctacaaatctcttacctcttccaagatacagcgtggtacccacccagcaatacatgatatcttggctctgagagagtgtttctctaaccatcctctgggcatgaaccaactccaggctttgcacgtggtgagcactttgagggcttctcttttccatagcatcaccatgtttcaggtgtttgcttgagctcatactatttgcctttcccctcctatgtggttgtgttacaaaagccttgagccgggccatgcttctcacatcttacctgcctcctcccttgttgagacatcgtttgaagactcatacacttgccnctgtactccancctgggtnagagaggggaccctgtntcttttaaaaaaaaaaagaaaaaaaaagttccagaaaggagattaaattaatatctggctggggaatacatagggttaatttagccagactttctgaagttagggagcttgatttttaaaaaggagtgaccagtgaaacagaagagggagaccattccatagcagattaccagaagcccaacgtagctagaagagagcgatgtgctaagcggacaaaatgttgagaaaccgtcgattctcacgtcctcta

SEQ ID NO: 467151 - DNA, 1483 bp, Homo sapiens
gcgacgtacggttaactttgacccaaagacaacctcttctctcccgcttctctcgctgtgaagatggcgctctccagggtgtgctgggctcggtcggctgtgtggggctcggcagtcacccctggacattttgtcacccggaggctgcaacttggtcgctctggcctggcttggggggcccctcggtcttcaaagcttcacctttctccaaaggcagatgtgaagaacttgatgtcttatgtggtaaccaagacaaaagcgattaatgggaaataccatcgtttcttgggtcgtcatttcccccgcttctatgtcctgtacacaatcttcatgaaaggattgcagatgttatgggctgatgccaaaaaggctagaagaataaagacaaatatgtggaagcacaatataaagtttcatcaacttccataccgggagatggagcatttgagacagttccgccaagacgtcaccaagtgtcttttcctaggtattatttccattccaccttttgccaactacctggtcttcttgctaatgtacctgtttcccaggcaactactgatcaggcatttctggaccccaaaacaacaaactgatttcttagatatctatcatgctttccggaagcagtcccacccagaaattattagttatttagaaaaggtcatccctctcatttctgatgcaggactccggtggcgtctgacagatctgtgcaccaagatacagcgtggtacccacccagcaatacatgatatcttggctctgagagagtgtttctctaaccatcctctgggcatgaaccaactccaggctttgcacgtgaaagccttgagccgggccatgcttctcacatcttacctgcctcctcccttgttgagacatcgtttgaagactcatacaactgtgattcaccaactggacaaggctttggcaaagctggggattggccagctgactgctcaggaagtaaaatcggcttgttatctccgtggcctgaattctacgcatattggtgaagataggtgtcgaacttggctgggagaatggctgcagatttcctgcagcctgaaagtagagaccaggtttctccatgttggtcaggctgatctcgaactcccgacctcaggtgatccgctggcctcggcctcccaaagttttgggatcactggcgtgagccaccatgtccagcctatcctgttctttataggtatttattatagcagtatccctagcctctacccactagatgccagtagcaccccttcacccacagttgtctcaaccaaaaatgtctctagacattgccaaatgtcctaggggtggggaggagagaggcaggattgtccccgttgagaagtactggtctaaaggcattcaaactcagtgccccctgtttaggctaggtcttgatgttttgtgggcctttggatgttagggtaggcctactaatcttgaagctgagaaatgtccctagagcacc

SEQ ID NO: 467152 - DNA, 2076 bp, Homo sapiens
gcgacgtacggttaactttgacccaaagacaacctcttctctcccgcttctctcgctgtgaagatggcgctctccagggtgtgctgggctcggtcggctgtgtggggctcggcagtcacccctggacattttgtcacccggaggctgcaacttggtcgctctggcctggcttggggggcccctcggtcttcaaagcttcacctttctccaaaggcagatgtgaagaacttgatgtcttatgtggtaaccaagacaaaagcgattaatgggaaataccatcgtttcttgggtcgtcatttcccccgcttctatgtcctgtacacaatcttcatgaaaggattgcagatgttatgggctgatgccaaaaaggctagaagaataaagacaaatatgtggaagcacaatataaagtttcatcaacttccataccgggagatggagcatttgagacagttccgccaagacgtcaccaagtgtcttttcctaggtattatttccattccaccttttgccaactacctggtcttcttgctaatgtacctgtttcccaggcaactactgatcaggcatttctggaccccaaaacaacaaactgatttcttagatatctatcatgctttccggaagcagtcccacccagaaattattagttatttagaaaaggtcatccctctcatttctgatgcaggactccggtggcgtctgacagatctgtgcaccaagatacagcgtggtacccacccagcaatacatgatatcttggctctgagagagtgtttctctaaccatcctctgggcatgaaccaactccaggctttgcacgtgaaagccttgagccgggccatgcttctcacatcttacctgcctcctcccttgttgagacatcgtttgaagactcatacaactgtgattcaccaactggacaaggctttggcaaagctggggattggccagctgactgctcaggaagtaaaatcggcttgttatctccgtggcctgaattctacgcatattggtgaagataggtgtcgaacttggctgggagaatggctgcagatttcctgcagcctgaaagaagctgagctgtctctcttgctgcacaacgtggtcctgctctccaccaactaccttgggacaaggcgctgaatgaaccatggagcggatggcattgtcctgcagtcgtatagtatagcagtgcaggaacaaacagcacttgccagcaaagtctgtgtgtactgttaagtgtgtgggaggcagagagaggagcaggggccatgggcttcacagcatggcacacctgtgggaactgcagacattcctctcacagctagaactgaaacaaaccctcttgctaggggtggtccgtgtgaggtgtcatcctgtccccctcataattactaatagctggaactggcagcagcctctactgggcttttactgtgatgtgttcagttcatgtcctaggaagtcagcttttgccccaggtgggaatccttatttggcttaggactgatccacttccatgttacttacatctgtgggtttttgttgttgctgttagaaaatttgtggctggtgaaaacagcactcctttggctggagcacttgtgtccgtgcatgtacttgggtgtttccctccatcctttctgatatgaccaaaaatcaagttgttttgttttttgtcaccttcactggcatgggctaaccacttctttttcaaaccctctgaacacctttttctgatgggtaacttgcaggaatattctattggcttcactctccattgtcttttctgggctgtattacagccctctgtggatcttcaactctgctgcctccactgtgatgcagcagtccaactgtaactgacagtggctgccttctctgggccatggatcacacctgtaaggtactaattactgcccagcctggggagatcaggagaggtctgcatagttagtaagttgggtttagcttttgtgtgtgcatcagtgacttagagttctgtaataacttattgtaaatgcatgaagcactgtttttaaacccaagtaaagactgcttgaaacctgttga

SEQ ID NO: 467153 - DNA, 2307 bp, Homo sapiens
gcgacgtacggttaactttgacccaaagacaacctcttctctcccgcttctctcgctgtgaagatggcgctctccagggtgtgctgggctcggtcggctgtgtggggctcggcagtcacccctggacattttgtcacccggaggctgcaacttggtcgctctggcctggcttggggggcccctcggtcttcaaagcttcacctttctccaaaggcagatgtgaagaacttgatgtcttatgtggtaaccaagacaaaagcgattaatgggaaataccatcgtttcttgggtcgtcatttcccccgcttctatgtcctgtacacaatcttcatgaaaggattgcagatgttatgggctgatgccaaaaaggctagaagaataaagacaaatatgtggaagcacaatataaagtttcatcaacttccataccgggagatggagcatttgagacagttccgccaagacgtcaccaagtgtcttttcctaggtattatttccattccaccttttgccaactacctggtcttcttgctaatgtacctgtttcccaggcaactactgatcaggcatttctggaccccaaaacaacaaactgatttcttagatatctatcatgctttccggaagcagtcccacccagaaattattagttatttagaaaaggtcatccctctcatttctgatgcaggactccggtggcgtctgacagatctgtgcaccaagatacagcgtggtacccacccagcaatacatgatatcttggctctgagagagtgtttctctaaccatcctctgggcatgaaccaactccaggctttgcacgtgaaagccttgagccgggccatgcttctcacatcttacctgcctcctcccttgttgagacatcgtttgaagactcatacaactgtgattcaccaactggacaaggctttggcaaagctggggattggccagctgactgctcaggaagtaaaatcggcttgttatctccgtggcctgaattctacgcatattggtgaagataggtgtcgaacttggctgggagaatggctgcagatttcctgcagcctgaaagaagctgagctgtctctcttgctgcacaacgtggtcctgctctccaccaactaccttgggacaaggcgctgaatgaaccatggagcggatggcattgtcctgcagtcgtatagtatagcagtgcaggaacaaacagcacttgccagcaaagtctgtgtgtactgttaagtgtgtgggaggcagagagaggagcaggggccatgggcttcacagcatggcacacctgtgggaactgcagacattcctctcacagctagaactgaaacaaaccctcttgctaggggtggtccgtgtgaggtgtcatcctgtccccctcataattactaatagctggaactggcagcagcctctactgggcttttactgtgatgtgttcagttcatgtcctaggaagtcagcttttgccccaggtgggaatccttatttggcttaggactgatccacttccatgttacttacatctgtgggtttttgttgttgctgttagaaaatttgtggctggtgaaaacagcactcctttggctggagcacttgtgtccgtgcatgtacttgggtgtttccctccatcctttctgatatgaccaaaaatcaagttgttttgttttttgtcaccttcactggcatgggctaaccacttctttttcaaaccctctgaacacctttttctgatgggtaacttgcaggaatattctattggaaaagataacaggaagtacaagtgcttcttgaccccttcctcaatgtttctagccttcactctccattgtcttttctgggctgtattacagccctctgtggatcttcaactctgctgcctccactgtgatgcagcagtccaactgtaactgacagtggctgccttctctgggccatggatcacacctgtaaggtactaattactgcccagcctggggagatcaggagaggtctgcatagttagtaagttgggtttagcttttgtgtgtgcatcagtgacttagagttctgtaataacttattgtaaatgcatgaagcactgtttttaaacccaagtaaagactgcttgaaacctgttgaaaaaaacacaaaaaagaaacaaagaacaaggacaagaaaaaaaacaaaaaaaaaggaacaaaagaaaaaacgaagataaagaaatacaaaagaaaaaacagacaaaacatagaaaaaagaggggggggggcccgccctgaaagtttcctcccgtggggggcgccacctaagacggca

SEQ ID NO: 467154 - DNA, 1777 bp, Homo sapiens
gcgacgtacggttaactttgacccaaagacaacctcttctctcccgcttctctcgctgtgaagatggcgctctccagggtgtgctgggctcggtcggctgtgtggggctcggcagtcacccctggacattttgtcacccggaggctgcaacttggtcgctctggcctggcttggggggcccctcggtcttcaaagcttcacctttctccaaaggcagatgtgaagaacttgatgtcttatgtggtaaccaagacaaaagcgattaatgggaaataccatcgtttcttgggtcgtcatttcccccgcttctatgtcctgtacacaatcttcatgaaagaaagccttgagccgggccatgcttctcacatcttacctgcctcctcccttgttgagacatcgtttgaagactcatacaactgtgattcaccaactggacaaggctttggcaaagctggggattggccagctgactgctcaggaagtaaaatcggcttgttatctccgtggcctgaattctacgcatattggtgaagataggtgtcgaacttggctgggagaatggctgcagatttcctgcagcctgaaagtagagaccaggtttctccatgttggtcaggctgatctcgaactcccgacctcaggtgatccgctggcctcggcctcccaaagttttgggatcactggcgtgagccaccatgtccagcctatcctgttctttatagaagctgagctgtctctcttgctgcacaacgtggtcctgctctccaccaactaccttgggacaaggcgctgaatgaaccatggagcggatggcattgtcctgcagtcgtatagtatagcagtgcaggaacaaacagcacttgccagcaaagtctgtgtgtactgttaagtgtgtgggaggcagagagaggagcaggggccatgggcttcacagcatggcacacctgtgggaactgcagacattcctctcacagctagaactgaaacaaaccctcttgctaggggtggtccgtgtgaggtgtcatcctgtccccctcataattactaatagctggaactggcagcagcctctactgggcttttactgtgatgtgttcagttcatgtcctaggaagtcagcttttgccccaggtgggaatccttatttggcttaggactgatccacttccatgttacttacatctgtgggtttttgttgttgctgttagaaaatttgtggctggtgaaaacagcactcctttggctggagcacttgtgtccgtgcatgtacttgggtgtttccctccatcctttctgatatgaccaaaaatcaagttgttttgttttttgtcaccttcactggcatgggctaaccacttctttttcaaaccctctgaacacctttttctgatgggtaacttgcaggaatattctattggaaaagataacaggaagtacaagtgcttcttgaccccttcctcaatgtttctagccttcactctccattgtcttttctgggctgtattacagccctctgtggatcttcaactctgctgcctccactgtgatgcagcagtccaactgtaactgacagtggctgccttctctgggccatggatcacacctgtaaggtactaattactgcccagcctggggagatcaggagaggtctgcatagttagtaagttgggtttagcttttgtgtgtgcatcagtgacttagagttctgtaataacttattgtaaatgcatgaagcactgtttttaaacccaagtaaagactgcttgaaacctgttga

SEQ ID NO: 467155 - DNA, 2012 bp, Homo sapiens
gcgacgtacggttaactttgacccaaagacaacctcttctctcccgcttctctcgctgtgaagatggcgctctccagggtgtgctgggctcggtcggctgtgtggggctcggcagtcacccctggacattttgtcacccggaggctgcaacttggtcgctctggcctggcttggggggcccctcggtcttcaaagcttcacctttctccaaaggcagatgtgaagaacttgatgtcttatgtggtaaccaagacaaaagcgattaatgggaaataccatcgtttcttgggtcgtcatttcccccgcttctatgtcctgtacacaatcttcatgaaaggattgcagatgttatgggctgatgccaaaaaggctagaagaataaagacaaatatgtggaagcacaatataaagtttcatcaacttccataccgggagatggagcatttgagacagttccgccaagacgtcaccaagtgtcttttcctaggtattatttccattccaccttttgccaactacctggtcttcttgctaatgtacctgtttcccaggcaactactgatcaggcatttctggaccccaaaacaacaaactgatttcttagatatctatcatgctttccggaagcagtcccacccagaaattattagttatttagaaaaggtcatccctctcatttctgatgcaggactccggtggcgtctgacagatctgtgcaccaagatacagcgtggtacccacccagcaatacatgatatcttggctctgagagagtgtttctctaaccatcctctgggcatgaaccaactccaggctttgcacgtgaaagccttgagccgggccatgcttctcacatcttacctgcctcctcccttgttgagacatcgtttgaagactcatacaataggtgtcgaacttggctgggagaatggctgcagatttcctgcagcctgaaagaagctgagctgtctctcttgctgcacaacgtggtcctgctctccaccaactaccttgggacaaggcgctgaatgaaccatggagcggatggcattgtcctgcagtcgtatagtatagcagtgcaggaacaaacagcacttgccagcaaagtctgtgtgtactgttaagtgtgtgggaggcagagagaggagcaggggccatgggcttcacagcatggcacacctgtgggaactgcagacattcctctcacagctagaactgaaacaaaccctcttgctaggggtggtccgtgtgaggtgtcatcctgtccccctcataattactaatagctggaactggcagcagcctctactgggcttttactgtgatgtgttcagttcatgtcctaggaagtcagcttttgccccaggtgggaatccttatttggcttaggactgatccacttccatgttacttacatctgtgggtttttgttgttgctgttagaaaatttgtggctggtgaaaacagcactcctttggctggagcacttgtgtccgtgcatgtacttgggtgtttccctccatcctttctgatatgaccaaaaatcaagttgttttgttttttgtcaccttcactggcatgggctaaccacttctttttcaaaccctctgaacacctttttctgatgggtaacttgcaggaatattctattggaaaagataacaggaagtacaagtgcttcttgaccccttcctcaatgtttctagccttcactctccattgtcttttctgggctgtattacagccctctgtggatcttcaactctgctgcctccactgtgatgcagcagtccaactgtaactgacagtggctgccttctctgggccatggatcacacctgtaaggtactaattactgcccagcctggggagatcaggagaggtctgcatagttagtaagttgggtttagcttttgtgtgtgcatcagtgacttagagttctgtaataacttattgtaaatgcatgaagcactgtttttaaacccaagtaaagactgcttgaaacctgttga

SEQ ID NO: 467156 - DNA, 1490 bp, Homo sapiens
gcgacgtacggttaactttgacccaaagacaacctcttctctcccgcttctctcgctgtgaagatggcgctctccagggtgtgctgggctcggtcggctgtgtggggctcggcagtcacccctggacattttgtcacccggaggctgcaacttggtcgctctggcctggcttggggggcccctcgaaagccttgagccgggccatgcttctcacatcttacctgcctcctcccttgttgagacatcgtttgaagactcatacaactgtgattcaccaactggacaaggctttggcaaagctggggattggccagctgactgctcaggaagtaaaatcggcttgttatctccgtggcctgaattctacgcatattggtgaagataggtgtcgaacttggctgggagaatggctgcagatttcctgcagcctgaaagaagctgagctgtctctcttgctgcacaacgtggtcctgctctccaccaactaccttgggacaaggcgctgaatgaaccatggagcggatggcattgtcctgcagtcgtatagtatagcagtgcaggaacaaacagcacttgccagcaaagtctgtgtgtactgttaagtgtgtgggaggcagagagaggagcaggggccatgggcttcacagcatggcacacctgtgggaactgcagacattcctctcacagctagaactgaaacaaaccctcttgctaggggtggtccgtgtgaggtgtcatcctgtccccctcataattactaatagctggaactggcagcagcctctactgggcttttactgtgatgtgttcagttcatgtcctaggaagtcagcttttgccccaggtgggaatccttatttggcttaggactgatccacttccatgttacttacatctgtgggtttttgttgttgctgttagaaaatttgtggctggtgaaaacagcactcctttggctggagcacttgtgtccgtgcatgtacttgggtgtttccctccatcctttctgatatgaccaaaaatcaagttgttttgttttttgtcaccttcactggcatgggctaaccacttctttttcaaaccctctgaacacctttttctgatgggtaacttgcaggaatattctattggaaaagataacaggaagtacaagtgcttcttgaccccttcctcaatgtttctagccttcactctccattgtcttttctgggctgtattacagccctctgtggatcttcaactctgctgcctccactgtgatgcagcagtccaactgtaactgacagtggctgccttctctgggccatggatcacacctgtaaggtactaattactgcccagcctggggagatcaggagaggtctgcatagttagtaagttgggtttagcttttgtgtgtgcatcagtgacttagagttctgtaataacttattgtaaatgcatgaagcactgtttttaaacccaagtaaagactgcttgaaacctgttga

SEQ ID NO: 467157 - DNA, 1642 bp, Homo sapiens
gcgacgtacggttaactttgacccaaagacaacctcttctctcccgcttctctcgctgtgaagatggcgctctccagggtgtgctgggctcggtcggctgtgtggggctcggcagtcacccctggacattttgtcacccggaggctgcaacttggtcgctctggcctggcttggggggcccctcggtcttcaaagcttcacctttctccaaaggcagatgtgaagaacttgatgtcttatgtggtaaccaagacaaaagcgattaatgggaaataccatcgtttcttgggtcgtcatttcccccgcttctatgtcctgtacacaatcttcatgaaagaaagccttgagccgggccatgcttctcacatcttacctgcctcctcccttgttgagacatcgtttgaagactcatacaactgtgattcaccaactggacaaggctttggcaaagctggggattggccagctgactgctcaggaagtaaaatcggcttgttatctccgtggcctgaattctacgcatattggtgaagataggtgtcgaacttggctgggagaatggctgcagatttcctgcagcctgaaagaagctgagctgtctctcttgctgcacaacgtggtcctgctctccaccaactaccttgggacaaggcgctgaatgaaccatggagcggatggcattgtcctgcagtcgtatagtatagcagtgcaggaacaaacagcacttgccagcaaagtctgtgtgtactgttaagtgtgtgggaggcagagagaggagcaggggccatgggcttcacagcatggcacacctgtgggaactgcagacattcctctcacagctagaactgaaacaaaccctcttgctaggggtggtccgtgtgaggtgtcatcctgtccccctcataattactaatagctggaactggcagcagcctctactgggcttttactgtgatgtgttcagttcatgtcctaggaagtcagcttttgccccaggtgggaatccttatttggcttaggactgatccacttccatgttacttacatctgtgggtttttgttgttgctgttagaaaatttgtggctggtgaaaacagcactcctttggctggagcacttgtgtccgtgcatgtacttgggtgtttccctccatcctttctgatatgaccaaaaatcaagttgttttgttttttgtcaccttcactggcatgggctaaccacttctttttcaaaccctctgaacacctttttctgatgggtaacttgcaggaatattctattggaaaagataacaggaagtacaagtgcttcttgaccccttcctcaatgtttctagccttcactctccattgtcttttctgggctgtattacagccctctgtggatcttcaactctgctgcctccactgtgatgcagcagtccaactgtaactgacagtggctgccttctctgggccatggatcacacctgtaaggtactaattactgcccagcctggggagatcaggagaggtctgcatagttagtaagttgggtttagcttttgtgtgtgcatcagtgacttagagttctgtaataacttattgtaaatgcatgaagcactgtttttaaacccaagtaaagactgcttgaaacctgttga

SEQ ID NO: 467158 - DNA, 1827 bp, Homo sapiens
gcgacgtacggttaactttgacccaaagacaacctcttctctcccgcttctctcgctgtgaagatggcgctctccagggtgtgctgggctcggtcggctgtgtggggctcggcagtcacccctggacattttgtcacccggaggctgcaacttggtcgctctggcctggcttggggggcccctcggtcttcaaagcttcacctttctccaaaggcagatgtgaagaacttgatgtcttatgtggtaaccaagacaaaagcgattaatgggaaataccatcgtttcttgggtcgtcatttcccccgcttctatgtcctgtacacaatcttcatgaaagttccgccaagacgtcaccaagtgtcttttcctaggtattatttccattccaccttttgccaactacctggtcttcttgctaatatacagcgtggtacccacccagcaatacatgatatcttggctctgagagagtgtttctctaaccatcctctgggcatgaaccaactccaggctttgcacgtgaaagccttgagccgggccatgcttctcacatcttacctgcctcctcccttgttgagacatcgtttgaagactcatacaactgtgattcaccaactggacaaggctttggcaaagctggggattggccagctgactgctcaggaagtaaaatcggcttgttatctccgtggcctgaattctacgcatattggtgaagataggtgtcgaacttggctgggagaatggctgcagatttcctgcagcctgaaagaagctgagctgtctctcttgctgcacaacgtggtcctgctctccaccaactaccttgggacaaggcgctgaatgaaccatggagcggatggcattgtcctgcagtcgtatagtatagcagtgcaggaacaaacagcacttgccagcaaagtctgtgtgtactgttaagtgtgtgggaggcagagagaggagcaggggccatgggcttcacagcatggcacacctgtgggaactgcagacattcctctcacagctagaactgaaacaaaccctcttgctaggggtggtccgtgtgaggtgtcatcctgtccccctcataattactaatagctggaactggcagcagcctctactgggcttttactgtgatgtgttcagttcatgtcctaggaagtcagcttttgccccaggtgggaatccttatttggcttaggactgatccacttccatgttacttacatctgtgggtttttgttgttgctgttagaaaatttgtggctggtgaaaacagcactcctttggctggagcacttgtgtccgtgcatgtacttgggtgtttccctccatcctttctgatatgaccaaaaatcaagttgttttgttttttgtcaccttcactggcatgggctaaccacttctttttcaaaccctctgaacacctttttctgatgggtaacttgcaggaatattctattggaaaagataacaggaagtacaagtgcttcttgaccccttcctcaatgtttctagccttcactctccattgtcttttctgggctgtattacagccctctgtggatcttcaactctgctgcctccactgtgatgcagcagtccaactgtaactgacagtggctgccttctctgggccatggatcacacctgtaaggtactaattactgcccagcctggggagatcaggagaggtctgcatagttagtaagttgggtttagcttttgtgtgtgcatcagtgacttagagttctgtaataacttattgtaaatgcatgaagcactgtttttaaacccaagtaaagactgcttgaaacctgttga

SEQ ID NO: 467159 - DNA, 2001 bp, Homo sapiens
gcgacgtacggttaactttgacccaaagacaacctcttctctcccgcttctctcgctgtgaagatggcgctctccagggtgtgctgggctcggtcggctgtgtggggctcggcagtcacccctggacattttgtcacccggaggctgcaacttggtcgctctggcctggcttggggggcccctcgtctctttgatcttccttgtaggtcttcaaagcttcacctttctccaaaggcagatgtgaagaacttgatgtcttatgtggtaaccaagacaaaagcgattaatgggaaataccatcgtttcttgggtcgtcatttcccccgcttctatgtcctgtacacaatcttcatgaaaggtattatttccattccaccttttgccaactacctggtcttcttgctaatgtacctgtttcccaggcaactactgatcaggcatttctggaccccaaaacaacaaactgatttcttagatatctatcatgctttccggaagcagtcccacccagaaattattagttatttagaaaaggtcatccctctcatttctgatgcaggactccggtggcgtctgacagatctgtgcaccaagatacagcgtggtacccacccagcaatacatgatatcttggctctgagagagtgtttctctaaccatcctctgggcatgaaccaactccaggctttgcacgtgaaagccttgagccgggccatgcttctcacatcttacctgcctcctcccttgttgagacatcgtttgaagactcatacaactgtgattcaccaactggacaaggctttggcaaagctggggattggccagctgactgctcaggaagtaaaatcggcttgttatctccgtggcctgaattctacgcatattggtgaagataggtgtcgaacttggctgggagaatggctgcagatttcctgcagcctgaaagaagctgagctgtctctcttgctgcacaacgtggtcctgctctccaccaactaccttgggacaaggcgctgaatgaaccatggagcggatggcattgtcctgcagtcgtatagtatagcagtgcaggaacaaacagcacttgccagcaaagtctgtgtgtactgttaagtgtgtgggaggcagagagaggagcaggggccatgggcttcacagcatggcacacctgtgggaactgcagacattcctctcacagctagaactgaaacaaaccctcttgctaggggtggtccgtgtgaggtgtcatcctgtccccctcataattactaatagctggaactggcagcagcctctactgggcttttactgtgatgtgttcagttcatgtcctaggaagtcagcttttgccccaggtgggaatccttatttggcttaggactgatccacttccatgttacttacatctgtgggtttttgttgttgctgttagaaaatttgtggctggtgaaaacagcactcctttggctggagcacttgtgtccgtgcatgtacttgggtgtttccctccatcctttctgatatgaccaaaaatcaagttgttttgttttttgtcaccttcactggcatgggctaaccacttctttttcaaaccctctgaacacctttttctgatgggtaacttgcaggaatattctattggaaaagataacaggaagtacaagtgcttcttgaccccttcctcaatgtttctagccttcactctccattgtcttttctgggctgtattacagccctctgtggatcttcaactctgctgcctccactgtgatgcagcagtccaactgtaactgacagtggctgccttctctgggccatggatcacacctgtaaggtactaattactgcccagcctggggagatcaggagaggtctgcatagttagtaagttgggtttagcttttgtgtgtgcatcagtgacttagagttctgtaataacttattgtaaatgcatgaagcactgtttttaaacccaagtaaagactgcttgaaacctgttga

SEQ ID NO: 467160 - DNA, 2569 bp, Homo sapiens
gcgacgtacggttaactttgacccaaagacaacctcttctctcccgcttctctcgctgtgaagatggcgctctccagggtgtgctgggctcggtcggctgtgtggggctcggcagtcacccctggacattttgtcacccggaggctgcaacttggtcgctctggcctggcttggggggcccctcggtgagggacctgtagcgagaaaagcatttttgacgtccaggctctttcagtgtctcaaccttgcttgcattctgtctcttaattctcagagttccacgccttggccctggaatttttattcttctgttcaggattcaaactccgatccccactagtgacccggcttcctgaccctctgtactctcagtgccccatattgtctggtttccccgcgtgtcctgagctcatctttcagcctcactttttcggctcaggttttaccgctgctatctcgattccacctctttctgacttagcctgcagttcaaattgtcccacaggcattgcgctctctccagaggcataccctgagttcctttcctgcctggcctttgcctgatttgtgtttcacagtctgattgcctatctcttcttgaccccaagaccttccttggatttcagaagtgtcaagccttgggatacaatctccgagactcctgctttacattagggactcaaggcgtgagggagcttctaggactgattcccagatagtctctttgatcttccttgtaggtcttcaaagcttcacctttctccaaaggcagatgtgaagaacttgatgtcttatgtggtaaccaagacaaaagcgattaatgggaaataccatcgtttcttgggtcgtcatttcccccgcttctatgtcctgtacacaatcttcatgaaagttccgccaagacgtcaccaagtgtcttttcctaggtattatttccattccaccttttgccaactacctggtcttcttgctaatgtacctgtttcccaggcaactactgatcaggcatttctggaccccaaaacaacaaactgatttcttagatatctatcatgctttccggaagcagtcccacccagaaattattagttatttagaaaaggtcatccctctcatttctgatgcaggactccggtggcgtctgacagatctgtgcaccaagatacagcgtggtacccacccagcaatacatgatatcttggctctgagagagtgtttctctaaccatcctctgggcatgaaccaactccaggctttgcacgtgaaagccttgagccgggccatgcttctcacatcttacctgcctcctcccttgttgagacatcgtttgaagactcatacaactgtgattcaccaactggacaaggctttggcaaagctggggattggccagctgactgctcaggaagtaaaatcggcttgttatctccgtggcctgaattctacgcatattggtgaagataggtgtcgaacttggctgggagaatggctgcagatttcctgcagcctgaaagaagctgagctgtctctcttgctgcacaacgtggtcctgctctccaccaactaccttgggacaaggcgctgaatgaaccatggagcggatggcattgtcctgcagtcgtatagtatagcagtgcaggaacaaacagcacttgccagcaaagtctgtgtgtactgttaagtgtgtgggaggcagagagaggagcaggggccatgggcttcacagcatggcacacctgtgggaactgcagacattcctctcacagctagaactgaaacaaaccctcttgctaggggtggtccgtgtgaggtgtcatcctgtccccctcataattactaatagctggaactggcagcagcctctactgggcttttactgtgatgtgttcagttcatgtcctaggaagtcagcttttgccccaggtgggaatccttatttggcttaggactgatccacttccatgttacttacatctgtgggtttttgttgttgctgttagaaaatttgtggctggtgaaaacagcactcctttggctggagcacttgtgtccgtgcatgtacttgggtgtttccctccatcctttctgatatgaccaaaaatcaagttgttttgttttttgtcaccttcactggcatgggctaaccacttctttttcaaaccctctgaacacctttttctgatgggtaacttgcaggaatattctattggaaaagataacaggaagtacaagtgcttcttgaccccttcctcaatgtttctagccttcactctccattgtcttttctgggctgtattacagccctctgtggatcttcaactctgctgcctccactgtgatgcagcagtccaactgtaactgacagtggctgccttctctgggccatggatcacacctgtaaggtactaattactgcccagcctggggagatcaggagaggtctgcatagttagtaagttgggtttagcttttgtgtgtgcatcagtgacttagagttctgtaataacttattgtaaatgcatgaagcactgtttttaaacccaagtaaagactgcttgaaacctgttga

SEQ ID NO: 467161 - DNA, 2130 bp, Homo sapiens
gcgacgtacggttaactttgacccaaagacaacctcttctctcccgcttctctcgctgtgaagatggcgctctccagggtgtgctgggctcggtcggctgtgtggggctcggcagtcacccctggacattttgtcacccggaggctgcaacttggtcgctctggcctggcttggggggcccctcggtcttcaaagcttcacctttctccaaaggcagatgtgaagaacttgatgtcttatgtggtaaccaagacaaaagcgattaatgggaaataccatcgtttcttgggtcgtcatttcccccgcttctatgtcctgtacacaatcttcatgaaaggattgcagatgttatgggctgatgccaaaaaggctagaagaataaagacaaatatgtggaagcacaatataaagtttcatcaacttccataccgggagatggagcatttgagacagttccgccaagacgtcaccaagtgtcttttcctaggtattatttccattccaccttttgccaactacctggtcttcttgctaatgtacctgtttcccaggcaactactgatcaggcatttctggaccccaaaacaacaaactgatttcttagatatctatcatgctttccggaagcagtcccacccagaaattattagttatttagaaaaggtcatccctctcatttctgatgcaggactccggtggcgtctgacagatctgtgcaccaagatacagcgtggtacccacccagcaatacatgatatcttggctctgagagagtgtttctctaaccatcctctgggcatgaaccaactccaggctttgcacgtgaaagccttgagccgggccatgcttctcacatcttacctgcctcctcccttgttgagacatcgtttgaagactcatacaactgtgattcaccaactggacaaggctttggcaaagctggggattggccagctgactgctcaggaagtaaaatcggcttgttatctccgtggcctgaattctacgcatattggtgaagataggtgtcgaacttggctgggagaatggctgcagatttcctgcagcctgaaagaagctgagctgtctctcttgctgcacaacgtggtcctgctctccaccaactaccttgggacaaggcgctgaatgaaccatggagcggatggcattgtcctgcagtcgtatagtatagcagtgcaggaacaaacagcacttgccagcaaagtctgtgtgtactgttaagtgtgtgggaggcagagagaggagcaggggccatgggcttcacagcatggcacacctgtgggaactgcagacattcctctcacagctagaactgaaacaaaccctcttgctaggggtggtccgtgtgaggtgtcatcctgtccccctcataattactaatagctggaactggcagcagcctctactgggcttttactgtgatgtgttcagttcatgtcctaggaagtcagcttttgccccaggtgggaatccttatttggcttaggactgatccacttccatgttacttacatctgtgggtttttgttgttgctgttagaaaatttgtggctggtgaaaacagcactcctttggctggagcacttgtgtccgtgcatgtacttgggtgtttccctccatcctttctgatatgaccaaaaatcaagttgttttgttttttgtcaccttcactggcatgggctaaccacttctttttcaaaccctctgaacacctttttctgatgggtaacttgcaggaatattctattggaaaagataacaggaagtacaagtgcttcttgaccccttcctcaatgtttctagccttcactctccattgtcttttctgggctgtattacagccctctgtggatcttcaactctgctgcctccactgtgatgcagcagtccaactgtaactgacagtggctgccttctctgggccatggatcacacctgtaaggtactaattactgcccagcctggggagatcaggagaggtctgcatagttagtaagttgggtttagcttttgtgtgtgcatcagtgacttagagttctgtaataacttattgtaaatgcatgaagcactgtttttaaacccaagtaaagactgcttgaaacctgttga

SEQ ID NO: 467162 - DNA, 559 bp, Homo sapiens
agtaaatatttataggctttgtagactaacaggcaaattaagtgaagccacagaacagtggacctgatagaggcatggctgaagtgcccactccagggcaggactttcagggcataaggtgccatcctccaggacacaggctgcactttaaagacctttacacagtgctcagtgggaagaatgcatgggcctggggaccagaggccctgcctgtctcatccccagggaccagttgggaaaggaatcggcatttcccattctctgtaagtttgggttctgcaggtctaaagggcctggtcccaggaagacacttctgccaggggaggtgccaccagggcactcaatctccttgtgccaagggaccttgcagcaggaagaggagtcaccctcctggtggcactgactggccaccattaccaggaggaggaaaggcttctgctccagactggaagtatatgtttggcacccaggcgatccatgtgggcacctcaagtgcagcaatcccagctgagaacagcagatgtgctggctgagggatggatgaatggggaacagatgt

SEQ ID NO: 467163 - DNA, 1165 bp, Homo sapiens
gtgtgatgaacttctgcagacagggcaacctacaggggctccagcgagaatgaccctgcaatgcagtgcttgtcaatgccttggggagggctctgatctgcacaggggcccctgtcttgtcccagcatccactaaaaggttcctgagccaaggcctcaatgtcctcctcctggaagtttccaggtttctatttgcaccttggccaaagtggaaaattgaagagcgcagactccacccagccctgcagcctcagggctgggaggaacaaagagaggacctgagctttttcggtctttgttttaactcctctaaatttatttgggtatttaaacaaacagaaactacatcatgcatcattactttttgcctttgtacaacaaaacaaagtactcaatatctctgcagaggtttggtgctcattttctttcctttcagtaacatcaggcagacttttcgatatgatccagttttgcacagtcactagagtgtcgcatcatgaattattaaatcagtgcttcgtggtaatacataatttcttatcaattattcatgctaatgtgtgtgtagtttacttaattgtgttattgacgatcaaaagtaatttcctgaaagtcctcaaggacacaaaatttaatcagcataactacttttcagatgcaatgctgttaagtattcttaatttgctcaacagttcacttatttatgtacctttctggaggaaatacgagtttaatcaaacaattagattgaagagttagtgtacataagggcttgagcttacatccttcaaccaaacattcgtaattacagggaaacggaagcaactttgccgctttttggcaaatcgtttcatctttatactcaacaagcaaaatacagcaggaagaaggatttgatttttttctttaaaggagacagtgggttttatcaaatgcttcgtagtgatcatagacaaggcatgatacactcaggagtattatttgggggtcatggagtgggggaaggtaaaaaggggacaggaaatgtgaaagtaaaacattttgacgataataactgaaaccaaaataaccatcatgaaggcaataaccatccgcatggaaacaccatcagcaaaagccaccaaagactgcaacctttcccatgccgggcgcccctgccagaaagc

SEQ ID NO: 467164 - DNA, 727 bp, Homo sapiens
tgtgaagtccttgtcttgcacatattgagagagcctccacatattgagagagctggggatgctagcacagcagggttggtgctggggcctgtggggcagcacgtgcatgagaaagatgtggctgccaagtcaagagctggagggacgtgtgaaaaccctgcgaagcttccttaggcaaaggcccgtgtatgagtcagtcgtattaagcaccttcctgctgttgtgcagccaatctcctgaactcttcatcttgcaaaaccgaagctctgaccggcgaacaattcccacttcccctccccggccccaggagagggaaaggccaccaggaggttctggtcccatctctacaataaactgtgcaaatctggagcctcagttttcttacctggagagggggatgaaccacgcctacattatgggtggccgtaatgtgatgagaggagcagcgggtggtaaagggggcccactgtgctcttgctgcgtcccagaccccatgggactctccttccttcccacctatggctgccagagtaaccgcacggccagcgtggccaccctgcgcatgaaggcccgcgagcactcagaagctgtcctgcagtcagccaacctcctgccttccaccagcagcagccccggccctgtcgccaagccggcgcccccagatggcagccaggaaaagacctctcccaccaaggaacagagcgaggcagagaagagtgtatgaggg

SEQ ID NO: 467165 - DNA, 1064 bp, Homo sapiens
tgcgctaggcttctgcccaggtatctagcaccttctctgtgccatgccaggggatgcagttctgagctcacagccctggggaaccagcccctagggattctggctagggaaggagatggggatgcagagtgaatacttctcagctgtgacttcactgtcatgctcttgcaatcctggatcagcagggccctccgtctccccacctgaccagcccactcccatccacatcgccccatccccaatcagcctgcagcccccacaggccagcctggcgagaggcaaggtccagactctgtctggcaacatctatgctaaactctgctgtgtccaagtaatgcctactccccattccctgcaatggctctcccaggagcacctgccttggctctcatgtcctcgcccctttaaccaggaaattgtgtttggagttgggggaaagtccttgcggcaggaacatcagagctccaccagttgggtggggctcctttcagaattcaccatcatcaaaggagcactagatggcaggattgggggaggctgtgtcagcagcagaggaggtgggaggacctttgagactgctgcaggtctgcagggcaccgagagactgtccttgaatggcaccttaggttgatctaggaaccctgagttaggagaagcctcagaggtcaccagaacctcattcatgccaggcaggagcccaccaggacctggcaaatgaagcctgaagatgcccctgcctggctgtccccaccttcccccacagacacccctgtctcccagtcagatccaaagaacacacagaacacatctgctctctttttaaatcagttacgttttttcttttaaataaaattatatatcttcactgaagaaaatgtagaaaacatagctaaataagaagagaataaaaaccacacatgatctcactaatgagagaaaagctttccagtgttgactgtaatgaatttctgcctggtgttttttctatacaaatagttgtaaacaaaaataggatcatattgtgaagacttctgtgaccagctttttgaatcaaacagtgttgt

SEQ ID NO: 467166 - DNA, 630 bp, Homo sapiens
gacccgtccagatgcatttcccctgggctccctgcaagccagtttcctggcctcaagcctggcctgggggtggcctgtgggggagaagccacgagggcagcagctctggctccagggctgtttctgaaggagccggggtgggcgtcccagcagccagcatgcaggccctgatctggggagacaaggtggagagacaggctctccaggagccatggagaggcagggagaatgcccgttttggggagggtcttaagggacagagctggatgcctaggaggcaggaggaagagagcatgggcaaggagggcactgctggaatgagtgatgagccagggctcatcacagaaggccaggaatgggaacaaggcagttggattttattccacaggcaacaagaaataacttcaaacttacggaaaagctatgagagtggcagataactcccatgagcttttgatccaaattcaccaactgtttatgtttttgttccatttattttaccatttgtattctctcccctctcccttccccttctttcctcatctctcctctcctctctttctccctctcctccccttctcctcttctgtctttcttctcctctcctctctctctctccagacacatata

SEQ ID NO: 467167 - DNA, 657 bp, Homo sapiens
tgctacctcacccaactggtggagctctgatgttcctgccgcaaggactttctgggggaatggggccttgggggctgtctcccaccctcaccaagactaaaagggccgaggcagttgagactgtcatggccttagtaggagcaggaacacccagattggccctggctcctgccatccacatgaagctctctccagcggaaaaggagctactccgtctgcagtttggtgccacctggtggcagctgttggctctggctgaaatcagtgaggatgattctgggctgggtggctctgtgcaacttcaggacagcagcagctgtttcagaaagtaccaaggctgcatccaggggacctactccctgttgctggaggtctcgatttggcaagctttgctacagtgtctgtacgaggccctcccaacaccccaacctccccaggtccccaggaggctgacggctgatgcttagccctgtcaagaccccttgacaagactctggcgagaactctggggacagaggagatactgtgtctttggtctcttctccactggaagctgcaggagagcacataaggacaggagctcctccccagctagaggatgataaaatgcatatctatcccttgttgtgtatatatattttctgttcctaagtcccc

SEQ ID NO: 467168 - DNA, 590 bp, Homo sapiens
ctggtgtaaatgtatacacttctggcattaccacgatcttttgattactgtagtttcatggtatgttttcaaatcaggaaataaggtactcgcttctgtttcctcttctgccacgattgtaagcctgaggcctccctagccatgtggaactgttctgagctgaggaacctagtgttcacctcattttccccgtctttcgggaattcccgtccttcattgcctgatgtccaatgtgttgaagtccgtggtttcatatattttgactggatcttttattgttccaagtgggagggtaaatatgttccttgttacttcatttcaaaatctggttttgactactatgcacctactagaacggcaaatcttcagaacatagcaacacccaatgctggtgaggaggtggatcaacaggaactctcattcgttgcaggtgctggtggtaggctgaattctaagataatcgccagtgactctcgcccttgtgtgatcacctgcttttgaatatgggcagaacttctaaacataatctgactcccatgattatgttaaattatatggcaaaggggtgttgtagatgttattaagatccc

SEQ ID NO: 467169 - DNA, 997 bp, Homo sapiens
cataagcagtccctgccttcacagtagtttcagagtacagatgacttctggcagaagcgctctctcatgggtcatggttacatggcagctaccgcggcaaagcgagagcctcagagacgccactgcggccagcacagccggagacctgagctgggggctcaactggctggaaaagaaagggaaaagaatcatggatttgattttgattcctttattgcaggaactattcaacttagttcccaacatgagcctactgatgttgttgataaattaaatgacttgaatagctcagtgtcccaactagaattgaaaagcttgatatcaaagtcagtaagccaagaaaaacaggaaaaaggaatggcaaatctggctcagttagaaaccttgtaccaatcttcttgggacagccagtgtgtgagtggtggggaggactgttttctcatcaatcagttttgtgacgtaaggaaggatgaacaagttgagaaagaaaacacttacactcgttacttggacaagttctttagcaggaaagaagatactgaaatgctagaaactgagccagtagaggaagaagagcttggggagagaggaaatgaggaaaggtttctgaacaacagtggggagttcctctttaacaagtttcagtcgcgtccatgtgaagagaccaccaaacaggctttgtcttgggctccgaggcctgacaaaaagcagctcgagtccataggcatcccgcagtttcacagtccagttgggtcaccacttaagtcaacacaggccacattaacaccttctgctatgaaatcttcctctaatattcctcatcaaacatacagtagcagtctgaaacttctgaactaaaacactcagcagacatttatctttgtattctgcatgaaatgtgttttgtctttttttattactagtgtttaagtcattttttacttgaatcagatggtgtcatttagtaaggattttattagttcttggcttttaaaat

SEQ ID NO: 467170 - DNA, 1038 bp, Homo sapiens
tcatcactagaggcggcagagatgatgacctttttggctccccctgcaaatgagccccagaccttctccatggcggtgaagacactggcggactccacaacacatttagtgccaacatcaccccattggattttggtaggatcttggtcctggcaagatgatgatgggatttccattgaagacgagctttccattctcagccttgactgtaccatggaatttgccatgggtggaatcatactagatcatgtagactatgttgttgaggtcaatgaaggggtcattgatggtgacaatatccactttaccagaattaaaagcagccctagtgaccgggtgcccaatatagtccaatccgttggctctggcattcaccttcaccatggtgtctcagggaagaggctggtggtgcatgagaagatgcagctgtctgtcgaaccagaagagcagagagactgaaattgttcttaatgattacaagtacaaaccgaaatgccttaaatgattttaaaagctttcttgaattattaacagttcatttcacctagggggcagtgatgagctggggaaaaaaatgaccacattggtacagtatactgaagtgcaggttgccactctcactcttgcaaataattttaattgctctcctaaattgtctgtcttggaaaaaaattttgagttgaataaatttccaaatattcatgtttctctagcaactcaccaacagcaattccaaattggttgattatatgttgacattcattaaaatattagaagaaaattaaacatttaaaatttggtaatttgatattttttacacctgatgtggtgttggccttcaatttttcacaactgcttaaactaactgcagttgattctcattattcacagagtccatatttgtaaattcccctatgagctaaagcttatttgtaatcctgaaattaatacttgaggtgcttttgccatcatttgcgaacattcacagagcagcaaaaaatttgatttgcctgatatacaacactaaggtagaacaag

SEQ ID NO: 467171 - DNA, 595 bp, Homo sapiens
tgacgttgttttcaaataacaagaatgagacaacttttccaatggcttcagcaggacgaactaggctttgtgggcagatgttataagtgggagaaggaggaaggggagagggagagctccaagggaaacaggaatagggagaaaaggtgcttcctggcccctggagatgtctccaatgggtgcaggtttcgagagggacagcttggcggcctggagcaatcatggaaggcttcctggtggcagactctaggactgggatttgatagagggcttggatatggcagtgggtctcctggggtggtgatgcttgaggaaggatcagcaaacccactgtccaaacctgggcatggcaccgtggtgcatatcagtcttgatcacccgcaatatggaaccatggagactaatcacacatacttacagttaagtaattttggataattgacacatatttggagtaaggataaattcacctaaatatccagatttctggcattctggaaaaatggtcagatttggctccccaccccgcgttcttgcctggcagctcttggctggcacagagctgtggcaccctcccagcctcccttcacgtagc

SEQ ID NO: 467172 - DNA, 1202 bp, Homo sapiens
tcaaggatagagctttcagccatgtgtcagagggtaggagcttcacctcctgcagcccagtcccctggtcctgcctgcccagagcagcatcaccctcaccagctgcatgcagccctcaacacagggcaaggatttgatgagtgttcattcaggaacttatcaatgttccactcctgtggaggtgaggtcctgcagctggcaatgcatagaggctcggatcattggcggctgtccaggcacccaggcagaatgtttcacatccccagcccacgctggcagatccatgcaactgcccagaatgaagtgagtcctgaaccacaacagacaggcccattgttgagctaccatggatggagctcattgaggacttgcctcttccaggactattgctttaaagtaaagaaggaagcggaagtgaaagaggaagaagaaaaggaagaagaggaagatgatgaaggaggagaaggaggggagcagaagcagcagcaatgggggagggatgggaaaggagaggagctgcgctttctaggatgccagaaaagagtgatagttacatgcaatgagaacacatggacacaggaagaggaacatcacactctggggactgttgtggggtcggaggaggcgggagggatagcattaggagatatacctaatgctaaatgacgagttaatgggtgcagcacaccaacatggcatatgtatacatatgtaacaaacctgcacgttgtgcacatgtaccctaaaacttaaagtataatattaataaaataataataataaaaaagagtgatagttacatggatgttggcttttgattatttgttgacttgtaaaagtttgcttagtgcaattttctgaatgtgtgtcatatttcaaaataaataatcttgactcattggtttggcaataagaactagctttaccatctaggatatttggtggacattttccaatgtttggatgaaaatatgtttaaagctggcactcagacaaaagcattccatcaaaaatattatgctgataaagtaagtcagaattacattatttgaaactatttaaacttattaagaattttagatttcaactttaaaatgtgcataaggtacatagtttttaaagcctaatggctgaaacagactaatggtttattctctgacataaaagaagttggagatagacaggttatgcttgtgtggcag

SEQ ID NO: 467173 - DNA, 692 bp, Homo sapiens
aaactgtgagcccaataaacctcttttctttataagctgtggcagagcaaagatgtgagctcgccttctctcataattgcctcagcactcgcctaccctgatgcacaggaagtccaacgcctcctttctgggccctccctcctcccctgtattgtccaagaatccttcttcttcagtcctgctccctggcaccagatggacaaagaacaactccagccctatgctgccattgctggatgctgccacacggtgtcgctatggaaggtgtagcctgcaattggcgctggtggaaagtaccaaggggaaatgtgaggttggagcccccacacggagtccccccactgggccactgcctagtggagctgtgaaaaggagaccacctttctccagaccccagaatggtagatccactggcagcttgtaccctgcacctgcaaaagccacaagcactaaactgagagcagccacaggggatgttctcagtgaagacttaggaagagttgatgggtggatggtcctagagaaatctctttaccctcatttcctgtccttagcctttaccaggacagggctatgaagttggtgaagaccctgtagatgagaactggcatatagatgtcattttgtatttgggactttgggggattttaatacattttgccagctcatgcaaatttgttaaaagttcagct

SEQ ID NO: 467174 - DNA, 1685 bp, Homo sapiens
gtgggcataaggagaaaggggtgtatgagacatcaatggctacacatttccagcaggctgcagatacacgtggacaaaagacttgcactatctgccagatgctgcttcctaaccagtgcagttacgcatcacaccagagaatccatcagcacaaatctctctacacctgccctgagtgcggggccatctgcaggtcggtgcacttccagacccatgtcaccaagaactgtctgcactacatgaggagagttggttttcgatgtgtgcattgcaatgttgtatactctgatgtggctgccctgcagtctcacattcaaggttctcactgtgaagtcttctacaagtgtcctatttgtccaatggcatgtaagtccgccccaagcacacattcccacacctacacacagcatcctggcatcaagataggagaaccagaaataatatataagtgttccatgtgcgacactgtgttcaccctgcaaaccttgctgtatcgccactttgaccaacacattgaaaaccagaagttgtctgttttcaagtgtccagactgttatcttttatatgcacagaagcaacttatgatggaccatatcaagtctatgcatggaacattgaaaagtattgaagggcctccaaacttgggtataaacttgcctttgagcattaagcctgcaactcaaaattcagcaaatcagaacaaagaggacaccaaatccatgaatgggaaagagaaattggaaaagaaatctccatctcctgtgaaaaaatcagtggaaaccaagaaagtggccagtcctgggtggacgtgttgggagtgtgaccgcctgttcattcagagagatgtgtacatatcccacgtgaggaaggagcaagggaagcaaatgaagaaacatccctgccgccagtgtgacaagctcatcccacagcctgtgccagcacaaccggatcaagcacaaaggcatcaggaaagtgtatgcctgctcgcactgcccagactccagacgtacctttaccaaacgattgatgctagagaagcacgagcaatcactcaaccactgaaaaagctgaaaatcaatgtttttaaggttctcaagagtgccatgtgtggcttcaccaccgaaaacctgcttcagttccacgaacacatccctcagcacaaatctgatagttcttcctaccagtgccaggagtgtggcctctggtacacgtctcacgtctctctgtccaggcacctcttcattgtacacaagttaaaggaacctcagccagtgtccaagcaaaatggagctggggaagataaccaacaggagaacaaacccagccatgaggatgaatcccccaatggcaccgtgtcagacagaaagtgcaaagtgtgcgtgaaaacttttgaaactgaagctgccttaaatactcacatgcggatacatggcatggccttcatcaaatccaaaaggatgagctcagccaagaaatagccacagaagatacttgcatgatctactgtagtcaacgttcggttcctcaaaaggtcttgctgctgtcaggtgttatgcactccatccataataactgtgtgaaacacatttcatatgtaaataaacgtgggacatttggcccatgtgcttctgtgagagagttattgattgtgagtctctgacatctttgtgaagtttgggaagtga

SEQ ID NO: 467175 - DNA, 794 bp, Homo sapiens
tacgcaaaaagggcagggcatttaggaggtgcacagtagataatgcgacaaggtgctgtagatgagcacctactaaatatcagagaaagaagtgaattgactgggcccagaagagaggaaaatgccagtctggtgatgccagaccaacagagaggagtgagtgggaggacaggctcagcactgaactatctagagttgcccttgagtcctagccaagatggctgtcactccccagatgggcttacagaaatgcattcccatttcataatgcctgctgtgattccaggtaattcctctaagtgcactattaaatcccagcagctgttccagataacagcaaagtcgacaattccagctgccgccttgtcaggaaatgaagcaaagcagcttggaccatgagatcagtttcatgagtcctgaccgtcattttataaatgaaatgagaatggaatgaaatgaagtggagtggagtgggatggaatgagatggaactagcaggaaataatagaatattccagaatagaaactatcaaagtacatcacatgtagtaaaggattagaaagcaaaagcaatctgaagattgaaagtcagaagcaaagttagaatggtgatttttttcccccaacccaacttggaagaatttgtctttggagaaccaacctaatcaaataaagtagcatcaatttactggagacataatccaacttgcataattgtcctggctggtttacaccacagctgttcatatgacatggttcattaaataataaagtcttcatcaggctctcctgca

SEQ ID NO: 467176 - DNA, 869 bp, Homo sapiens; identical to SEQ ID NO: 459604

SEQ ID NO: 467177 - DNA, 658 bp, Homo sapiens
cccaggggtgaggactttctctggagcctgaggaaatggacgtgggacctgagtcagggtgtgggagagaacctgtgagcttgctgagcttccagtggaaccaggcgagcaaagagcaaaatgccaagggagccaaccccagttcagttctacaacactacagcgacttctgccatttttgcagattagagcatgagcctcaggctgtcagcggagaaggcaggaacctgtttctccggctctggcttggctccgttctggggctgcttcctcctgccagcagcccagctgtgaagtcctctcaggaggtggtgaaccctggagagcaactgatgctacacaaaggacagcagctgaaaaggagcctccgggggtcactgtctcagagagcccctaacctggccagcccggaagggcagaggagagggctccctgagctaagctgccagccagaatttgggctgcagagattctaggtctgaagaccacacactatttggaatgttccttttagaaaagaatgctgtaggaggcaatatgaagacattttaaatatagttctcaaaaacacgttctttttttgtttttgttttgttttgtttttggcataaagttatgagcgggggctcgagatctgactggggtcaaatcctgtgcc

SEQ ID NO: 467178 - DNA, 970 bp, Homo sapiens
tgacattgaaggattgcttgctagggaaagtttggttaagtatgaagtctaattattccaatttagcaaacaaaaccttatctgcagtcattccccctcctccccaagcgttctcaggcctggctcctgtcacacagagctcacctccatgcctctgcccctgctgtccccggacaagccccccagccaggcggctctcaacctggtggcctcagtatgatcttcctgatttgcaagctttgtctcttaataatctgcctttgtctgttgatgttcagcaaacctttgggaaggtttcccttggcccctacagtgttggcgtcacagacaggatcctaaagctgctctacttttctggaagccacagtccagggaacccaggacctgacaaagcatcagaaggagccctcatgacccaatcgcctcttaaaggccctgcccctcacgactgccacactggggattcagttccaacacctggcatttgccagacacattaaaccatgaatctcacttagttgatctatattactattttaatgtacttttaaattatctttatgaatattttattgagaattttggctctcatatttaaaaatgaaattgtctgtaatactttcccactctccggcacctgagtccatggctttggcagccatagtgatcatgaacttccggctatgtcctagagtcatttatctccgaggatgtcaggaggaaccccaaaatgtcatcaagacactggctacaggtctaaactccaataaaatccagctgggttacatcaattcagacatctggataaaaggatgaatgaaaccatgtacataatacagaattatgcatgccaggaaaaaaaattatactgcctaaaagctgcaaccttcatgacatcaaatctattttaacactggctggttatgtgaggaaaaggctaataaaaaaaaattctggctgaccaaagaag

SEQ ID NO: 467179 - DNA, 856 bp, Homo sapiens
gcggcttgatattgcttatgttacttctgtggaggcctcttgcctgcagtgagccctgtgcgctaggtcttgaccgtgcagccagcgttgagagctgggggagacagcagcgagaggcccacgccaagcgcctgaaggtgccgctcccggccggctttgaatgaggagctgaggatgcacacaggcgtcctatctctcagagaagtgaagtcacagggaaaaccactgtccccagaattgaagagacaaacaggcagttatggaaaaccacaacttaatagagcagaaacccacaaacaaaaatctccccaggaatcagctccaggacaggaaaacttgaactgcagtggatggattgctgaaggaaaaagaggtttaattgactcagtttcacatggctggggaggcctcacaatcatggcagaaggcaaaggaggagcaaaggcacgtcttacatggtggcagtcaagggataatgagaaccaagtgaaaggggaaacccctttaaaaccatcagaccttgtgagacttgttcactaccatgagaactgtatgggggaacctgcccccatgattcaattatctcccactgggtccctcccacaacacatgggaattatgggagctacaatgcaagatgaaatttggatggagacacagccaaaccaaatcaccatgtgctatgcatcttcttagtgggggtggggagggaatatccctgcatacttcagccctctggacccctaagcattaccctgatgtcacaggctcctaaacctgcacagagctcactgctcaccctgcaaatggcatatgttttatcaaggcctccaatgaacttgccatctcttcctcc

SEQ ID NO: 467180 - DNA, 522 bp, Homo sapiens
ggggtaccgggcactgtgtgcaatgcaggacaaacaaagcctgggcgggaacaaggtgagggtggaagcagggccctgtttggtcctgggacagtgtgggttctacccgatcgacaatggaaagtcactgaaggtctccattggaggtgacacagtcggatctgcatttgaggaagatggcatcacctgttgtgaagagaaggacccagaaggcggcagcggtggagagactgtctcctgcttagcaagcaaggaaattaactgcaagtcctgtttggttgctgatgacgtgacctttgccaagtcacctagcctttctgcacttcggctctatctgaaaagcgatggggatagaacatctgttctacctacatcagggagtcgcagaggagatgaagaagaaagctttgaaaattggaagtgcctcaaaatatgagatcaatactatgtttctggaaaaatgttacatttaaagtacatatttgtagaccgaatgacactgtacacacttccttagttgac

SEQ ID NO: 467181 - DNA, 595 bp, Homo sapiens
cctgaggggtccggctccacttataggtgataatgaatgttttgcacgtgtgatgtcgggtctcgcccttggcgtctttggggcaccactcttgggcagagaagaaaaagaaggttcctgctgtgccagaaaccttaagaaaaagggaaggaatttcgcagagctgaagatcaagcgcctgagaaagaagtctgcccaaaagatgcttcgaaaggcaaggaggaaacttatctatcaaaaagcaaaccactatcacaaggaatgtaggcagatgtacagaactgaaattcgaatggcgaggctggcaagaaaagctggcaacatctatgtacctgcagaacccaaattggcgtttgtcatcaggatcagagatatcaatggtgggcaagagggctctctggttaaagacgtagtgtggactcctcctgccttgccctccaacagccctcaacccctccttcctcaccctaatggtgtcttgaatgtaacttactagtttgactttccctgaaccagagcaatgaactcatagaatgattttaacgttgagtaattatgtctccaggtgtttgacatttaaaacttgaagctgaaa

SEQ ID NO: 467182 - DNA, 646 bp, Homo sapiens
agcgctgacttctgcagcaccacgtcttgatgcctcacttaacccattctgtattttattttagatttagggggtacacatgcatgtctgttacatgggtatattgcatactggtgaggattgggcttcaagtatatccattacccaagtagtgaacattgcacccaacagggtaatcgttgacttccagcaagacatcctggaggacaatggaggtgaagaggaaatgggacgcaaaggaaacaggcctcgttccccagtccgcccacctgtgtgctgccctgggccagtcatatctcatcttcacaagtcccactcaaggcctgagttcctccgaaagcttttccactattgtgccccggagacttcttccttcgctgaacttctgttgcccttcctgaatggtttagcacctggtcccacagcgtgtgccttcctagaagtgaaagaagagaatgtgcttagtgacccgaaggtgctgaacggcccttatgggcagcaaccggctgtttgggttgaatgtgagatgtctctggattcctgacggtataggtatggtgtgtgaattctttttgtggcataagggaaatatctaatgacagcaaattgcttattttggatcattcttgagcctggttttaacatt

SEQ ID NO: 467183 - DNA, 534 bp, Homo sapiens
ctctcctctgccactcccacagaatgaagccacggaccttcgcagtgagtgttacagctcttaaaggtgatgtggacccaaagagtgagcaacaaagagatttattgtggagagcaaaagaacaaagattccacagcatggaaggggacccaagctggttaccactgctggctgcggtgacaagcttttattcccttatttgtccccatgcacgtcctgctgattggtccattttacacagtgctgctgatcggtccattttacagagcactgattggtccattttacaaacacaaagagccatgcatatggagtcatttacttcaaagatcggaggagaactcaatgaaattgagaaaaaagaacaatacaaaaattcaaaaggagacattacaaatgataccacagaaatacaacagatcatcagagactactagaaacaacaatatgcccacaaactagaaaacatagaggaaatggataaattcctggaaacatacaacttcccaacattaaaccaggaagaaatagaaa

SEQ ID NO: 467184 - DNA, 985 bp, Homo sapiens
catcagtgtgtgcgtgacatccagcatgaagaagctaactcaaagccctgcgtgttgcatcatcttcaatgcccattagacctaaaaggcaggatgatcaccatcattttttagatgaggaaactgaggttcagggagctttaaggacttgtttgggtttgcacaagtttggaaaaagatttgaacacagcaatgatggaagtatgtcagctgtcaaaggttctggcagcagaaggcagctgagaataaagcggcttcacgaaggaggagaagaagaagaaggaggagaaggaggagaaggaggaggaggaggaagaggagaagaagaagaggaagaagaagaagaagaagaggaagaagaggaacaagaaaaaaacatatccttaatttctgcatctgtgaatgatcatagtaagagcatagcaatattgatgccgtttaacccccaaaaaacgataagaaggtccaatacgcatgtgccctgagaaatgtaacatgttatgcacatgtaggtttaatttaaatgtagtcgaagatgtaaaatttgtaccattcttttaccggagaagtaaagtatagatggactggacttgacctctcactgctttactaaatactgtttgactttgggtaagtcacctgacctctctgtgcctcagatcccttattgatacagtgaggaagatgatgatatagacttcatggagttattgtgagaagcaaataaatgtatgcgcttaggatggtgcaaacacagagtaagcactagcaacttgaaacgtaccatctgtaggtataattataagctgtgatttcatattcacttagtgaaattctctatttgcactcaatcaagtaaaactgagtatctcacaccgactacaaagtagaaaattctctgcatctagtgttgacttaatgaccatctaaaaactgacaagtttgctttgattgtaagacagttaatcagatccattttaagctt

SEQ ID NO: 467185 - DNA, 961 bp, Homo sapiens
agaaccactagtccccacttagtcttggagaggaggcaaggatgtgtgtcctctgcggccagagaacagaaccatcccctctcaagttggtgcctctgcgagcggctgcggtcctgcttgtcctgggaatcgcaatgccaattgttctctccatgttttgcaactcaacaccatttcctcacgcctattttccttgtttccgctttgccactgtttgcagacacaggaagaggtcagtgggctcagatgaggacaaggcccctgccggagcacagattcagaatggtgttctagtacaactagagtctgatgctggtgtattgagcggaagcgaatgtggggattctttaccagcctgtattgtgtaccacactttcatacccaagtattttcttagaatgctcaaaagaagaagtagaatccagggtgacttcacaactgcggatacagggcaggaaaagggtagcatttggagtccgggtgaggaaagaaagttcttccatctacagcatatcttcattcttcttgggcgtggtacaggagcttgggaactgctgaacgtaggtacaagctgtaacacaggcaagctggggcatgccagcatgcaagcagggcccacgtggggcatcaccagccagaagtccctggcttgcaaagtgaccaacaagaaaaatcatacatcaaaagctgaggcagctgcagaatgttaaaaggtgcatgtcaaaacgagtttagctgagcatttcttcatttttcttcccatatcaggcctataggaggagtcaaaaaaacaacaaataaaagaatctatatgaattgtgagggaaagacacttcttgaaagtcagaagcatagcactctgaaggaagatccccggctcaccccaaggcttgaggcaacagagctccctgcttttaatgacatatttgcagcagggtctttgtggctatgacccacaacc

SEQ ID NO: 467186 - DNA, 1423 bp, Homo sapiens
ctgctgttcattctaaaggcagtcttttgcccactgaacatactcgatcctaaatgaatttcttgacaatgaactctttggagaggcagatgctgctggccagtgtgttgctggcagggtgttttcacccagacactgctgggtgtgatggagcaagtgctgcagacccacgtgttctgtctcctccttctaagctgcagcagtttcacgccatggccttcctcggtgaatatggtatcatcaacgctggagatctgctaataatttatgaagtaagtgagaagccatcgctgtcatgctctcaatacaagtcccgctgtcggtctgaagctcgccgcagctgctggcgttttcgcctccgccagatttcagatgaactcatgataggatctgacagagtaatgcccagctgtctaagttcagcacatgtgaaaatccaggaaagtaacaaagacagtgtttgtcacatgtagattaaaccacaagcaatagcaagctatagcaaggttaatgtgagatgtgcgaggcagtttcctctgcattgcatgaagcagatgcactgtaaataaattcagtcatctcaaacttttatttcttcatcttcgaaaatgttaattatcaattctagccattactgagtgtttgcatgtgtatgtgtgtgtatgtatgcgtgtgtaggtgtatattctgtgtgggtgtgttttttgtatgtgtgaattgaataatcaaatgattaattgttaattattcattaaataagaaaaactaccagtaaaatacagcctattccaacttttataaaatatgaactagaaatatgtgatatcattgaagaccacattaaagattacatatttttaatgtgtataatgtctattggaacaagtttttcctagacttatagaaatagtgaaggtgattttaaaaattacaaattcttcatagggaaataaaaatcatactgagatctgcttgctagccactgttggtaatgagataattagaggcaacaaatatattaacatattatagctctaatatacaagttaatgaaataacattttgacattatatagaagttaaaactcttaaagtggctttgctatatagcagctgctcaagaaatatttaaattcaaatttaatttttgaatggttagtcagtgtcagacactaggtaacaaatgtttacacccatgatcgcctaataattttggtgtgtttttttggttccaaatttacagatgagagagttgagaaaataagatctaagtaacatttctcgctttgattactaggaatcttagcaactaattaaaaacccaactagtgtcatagttatacattttgtatattgttaattttgttcatctttccttatattttcttacattattcatgttattttttaacctgttgtatat

SEQ ID NO: 467187 - DNA, 508 bp, Homo sapiens
cacctgaaggatcctgtggcattacttacttgtgcagcattgttcttcctctttaggagtgtgctttattgttatgtgtgaatttgattccatcatcatgatgctagctggttattttgcagacttgtttatgtggctgctccataatgtcactggtgaaagggtatcagggactcacttaaagaagcagtctgactgctttttggtagagcagctgtgctgtgttggtgaaatccttcactggatctcttcagcccccagtcagtttggtctctccaaggcccataggctggactggctgagatacccaaacagtcaaggtggtggcctgccctgccccctgggcactctgccccagggagaaattagaactcagtcagctgtagaacatgggtggggatggccagaggccctggttgggaagacccacccagtgaggagaagtggatgtgggccccatttaaaaagcagtctgaccatgccttgacaaaatagccatgctggggaa

SEQ ID NO: 467188 - DNA, 555 bp, Homo sapiens
agcagcaaagagggagtctgcagcttctcccatgcggaagctcaagagctcagatggctctgaagagatatttcatcttgaggcaaggaagctgggcaatcacccacctgctttgactgtcactggaggtggctgtcaccagagagagggtgtaaacttgaacacagtatctcctttcaaggattggccatcaatggccaacattcctggtcccacaatgaatagctcagtgatcacactacccacactgagagcagtacggaaatttgatatacccttttgccataatccttacctctgtcagagctccatagacttgggagatcctcccagggaagagaaacagtttgacagagtgtccaatgatccaacttttctggagcctgtccgtggaagtgacttcagtaccacttctcttgaagtgctgacaggacttagtgcactctagatgcctgggggctgctaagaacaaagaaaggggattgaatgtgcacgaaggttaaaaaggctcctagaatccctagcaaggctgattcgtgagggtcttctcctgta

SEQ ID NO: 467189 - DNA, 522 bp, Homo sapiens
tcttttcttttgtgagatcctatagcctatgactggctttagaaatattaaggcacatgctttgagcagcttttcctatggggacaacctgtgtgcaccaacccaagcctcctcttccaaccaccctctctttgacacatagtcaaactggggtacagtctgggtgtggggcagaacgcaagcccactgagccctatgggagtcagacccatgacccagccctcagtgacataggactccagctagcctcacactctggctacactgtataccaaatgaaaagttattctccggggcatgaattaagtttggagattaacaagttttggaggggacaaaaacatccaaaccatagaaaggaggaaaagttcaggggacctgagaaagccaagaaaaataacacaagtagaaaggagccaaatgcaaacataattatgtatccagtgtcctctgtgttttgggtttggaatgaaactgctgcacaatccactaaaagaatctcatagatccaagtccgtctac

SEQ ID NO: 467190 - DNA, 2121 bp, Homo sapiens
gacagtggaaaatgaggaaaaacctgaattgggtgctgagctctcctaggtcctgggagagccagatatgctgtccaagagccagataatagagtcaaaagccttagacatctacctggtgttctacgatattgaggctaagctggcattcaaaccacaagaggtagtccttcctattcttcctccactcccctgcaccccattccatagacagagaagcctcagcccatggccgtcagcaccacaggcctatagggagtactgtgaggctactgccaatatttccttaaggcccaaagactctttgggaccagttgagaagctagagcaacgaggccactgtaaaatcaagaagcataaactttgcatgccagtgggagtggataatatattcaaagtgtgcgaagaaaaaaacgtcattgaagaatattttattcagcaaaactgtccttcaaatacaaaggagaaattaagactttccaagataatcaaaagtggagagaatttattatcattagacatgctctacaagaaatgctaaaaagagttcctcaaattgaaaggataataagaaagcaacacactcagagtcatatggaaatattagcttctcccaaaaagcacatctcaattcaaactattcacatttcaactgttcaatagccacaactaactagaaaagcatctgagtgactgagttgtcagctgaactaaccagtttatttttaacatagaacagtattttactctagaaactgacttgataggggttgttacaagaataaataatgatatggaaaaagtcagatttagatatgaaatcttttcttgtgtataaaatataatgaaaatttaagtaggtatgtattctcaggcatttcacaaatcgtatttaacagaaagatttaattacttaacattacttaactcaacatactcttatcaagcacctggtgtttgccagtacggtactgaactccatatatgcaaagacgattaagacattgcactatatattcattagtgtttgagaaagatttatccaccatgaaacaagcaaaacagttttatgtttagctctcagtttattaggccattttattttctaagcatttaggtaaacattttctataacatacattgaggagtcatctttagttcctttgaatatattcttaaaatctcaaaccatctgcagtagtatatttaatgtcataaaacaaattatatatattagcccctttggtgtcctagattcttttgacgtttctcttttgaagagagagagtttctaaaaggggaactaacaaatgaaatgaccagtgctaaaatgaccaccccaataaagctacaaaatatctacctttccacttaatggatgtttggacctagacagcaggagtacttttccctgtagatttatccattatgtctcatgcactgctaattcattttcctgatatactagggccacccttcgttctcccattgtcctgtccaagaaagagcttgctttgaattatggggaggaagggtatcaaaatttcatatttagccgaaagatatagatttccttttgcatactcttattctgtgttgtctcccttcctcccttcctgaatcctcaatctgtacccaaacctaaaagtcatgttttgggttacgcttcattctgttttcaggaggacatagggtggcctttttttttgttctcatttatcagcatacatagagccaaggctctggaatgttttgtagttttcagtatataaattatccactagatcacttgttccagaaaacaaagttgttctgagcccaatacaaacgaccccagagatacaacagtcatttcccctttttacagttgttctttgttatgccccagtttactccatggtatagattaaatgcattctgcattttaaaaactccttgaaagcatctatttaatgttctcatttcagtgtgagaaaattgagctcaaacaggaagaaaatgtgacttatgttggccagaacattttctattaaaaagaacagattttcctgagctaacctacatttgagtcttgcattggattttggttggcattttaacatagtgtccccaaggttcaga

SEQ ID NO: 467191 - DNA, 4349 bp, Homo sapiens; identical to SEQ ID NO: 459600

SEQ ID NO: 467192 - DNA, 597 bp, Homo sapiens
ctcctcaagtgccgccaaagtggaagcccaggcagaggaggcaccgagagctagcgagggctgtgaggactgccagcacgctgtcacctctcaataacatgatatcaagaaaaggacaatatacctcttctgtggtggcctctttattcaccaggctcataaacactgctgtctccaaaggaactaagttcatctctctgctctttgaattatatgcattgaaactcgttaccgtggttcacaagctctaccagatttgctgcctctctgactcgacagcagcactcgcccccttggtatccacaccagagccaccccggcaggtctgtccttccaactggctgttctccctgaaggcctctgcacctaaagcagccaccccaggcagtgccatggctgactctacagcatttttccagaatgtgtgttacagagcaacttgcaggacactaaaaccctcatgttcacttttcaactgtgtagctatattttgtaatgcctcttgaatggtctcttcctagtgaaactgctgcaaattgacctaacaaatactcaaatgatagtttcagtgttctaaaatacagagctctctgctcc

SEQ ID NO: 467193 - DNA, 2326 bp, Homo sapiens
gtgggccttttgaggtgaccaggcctggtgagaggggcatccacggctggatgcagcgacgcctctccaccagcaccctgctttgaggacaacttcttggtccacactaatggctttcattcgggttttactgctcccacttcccaccgcagggccgcctgcttgctgctccacagcctccttgtcaaatgttcagatcttgcttgatctgtttttccactttcctccttgcttccctgcagcactgcccaggggtcaaaggttttggtggctgtgacatctggggcccaagccctcttctgttaccagatggtggcattttgggactgaaagctgtgctttgggatgaccatggggacacctgcttgtgtgggggggtggaggcgaatggcttcctggagtgatacatggggcagtacaggggtggggacatggaacctggtgagaagacagccctgacttggcagaaagaggttccaggcatcctgtgcaaagcatcttttctcgggccctgcctgccagagggctgtgctgtgagcaccgggcagcctggtcgcactgggcagtccagggtacaccatgaatcgtggctcctgggagaagacttcagcagtcggcctctctgaggtctactggtctgggtggtggagtgggcgctggggtggctccatcacagaggtctgtgcggccctcaatgtcactgtgtccccggggcccgtggttgactacctggagggggagaatgccactctcctctgccacgtctcccagaaaaggcggaaggacagcttgctggccgtgcgctggttctttgcacactccttcgactcccaggaggccttgatggtgaagatgaccaagctccgggtggtgcagtactatgggaatttcagccgcagcgccaaacggcggaggctgcgcctgctggaggagcagcggggggcgctctacaggctctccgtcttgacactgcagccctccgatcaagggcattacgtctgcagagtccaggaaatcagcaggcacaggaacaagtggacggcctggtccaatggctcctcagccacggaaatgagaggaacaagtaagattaggactggtgtttctaataatcagatgccaaagttgctgcaccgtcctgtgaaatatctgcactgcgggggagtgaggagcatccagtgattccttgcatagggttagtttagaatcccagtttgttagctctttcaacacatgtgtccataaatagattagggagagcttgttgctttctatcctaaataagggaaagggaactgtaattggattaaatcaaggacccacaatttctgaccctgaaagttgcataaaaaatgacccgaaggcacctgttggttagaatggcagcagctcattcaaggtgtagagattgaagagtcaccccctgaggcaaaggactgacaacaaagggccattctgaggttggcgggggtggaggttagagcagtgaataaaacaagtgaaagtccctgtacttagacagctagtgtggatatgggctcagtaggtctcaggcactgttctgagcacttcacacacatgaacccctttaacccctgcatctactctgacatgggcatttctcatcatccccattttacaaatgggtaaaataaggcacaggaaaattaagtgacttatccaaggacataaaactagcaagtggcaattgagtctttcaaccctgtgagcatgtgtttgccaaattttaaaaggcatacatttcacccaggggatttgggcttgaaagcagattctgattcagtagatccggcatggggcctgccattctgcatttctgaggagctcccgggtgacactgacattgctggcccgtggaccacatgtggggtggtaagggtccacaccatgatgggtatccttggcctcctggaaaccaagctccttgaagatatatgtgtattgttcatctccgtgttgtcttcatcaggaccttcttatccttatctaggcttgattagctgaagccatggaaatccagccaagctttttcaggagagaagtgggcacagtctaagggtgcaaagctcttggaatgcaaagagagtaaatacaacatgccaggccttgtggggcccagagtgccatcaagctttggcctctcatcttccctctgctatgcaggttctaggctccgctccattctgctcacttgttttccaacatggccacccacaaaatccactggctctttcaatctcagggctcacaataaccacatgcactctgtttcttattttaagtgtttgaagggggaatctggcag

SEQ ID NO: 467194 - DNA, 509 bp, Homo sapiens
ggttattatcatattctatgtatttcaacagccttattgatatgcttcatgggaaggtggaacaatggcaggcccagctgctgcttcacactgatgaggtgattccactgatcagcagcaataagatggaatgcacaagtggctggcagcatgtggaaaagggggagaaagaaggagatcgtggtctgcaaaagggcagggctgtggtgcaggtggtacaaggagcagcaagaaacaggaggaccccgatgcaacccatggattcagggcagggtctcagagcagggagaatccctgttggctcttggagcctgggcaggagcagcccagtgggcagactcaagcagacattcctggaagaggaccagggccataccacaagctctaaggcctccatcctgctcaccccagtctccctgcacaagcaccaagcatgggacacaggcacacagacagcatggatgcagggctgggctggaaagacccagacaccctgaatgtctccttca

SEQ ID NO: 467195 - DNA, 1777 bp, Homo sapiens
caaccgctgccagacgggcgggaacaactccccggacaccggtgggccgaggctgttgcgaggggcccacgtcaggcggtggatggtggatgctggacccagcggagcacccccttcccccggccccggccccggccccggccccgcgcctgcacgtccacggcggtgactgcccagcggcggcggcgagaaaagcggcggcctcccgcgccctctgccggctcaccgggaaggagcccggagccggtgcgctgaccccggaggatgcaggcggcgtctgcaagggggtcaacgccttcctccccggcaggttttacctcgtcagcggaggggtcccctttatcatctgtggggtcacggctgccacgaacatcaggaattacgggacagaggacgaggacacggcgtactgctggatggcctgggagcccagcctgggcgccttctacggcccagccgccatcatcaccctggtcacctgtgtgtacttcctgggcacctacgtgcagctgcggcgccacccagggcgcaggtacgagctgcgcacacagcccgaggagcagcggcggctggcgacacccgagggcggccgtgggatccggccaggcaccccacccgcacacgatgcccccggcgcctccgtgctgcagaacgagcactcattccaggcacagctgcgcgccgccgccttcacgctgttcctgttcacggccacgtgggccttcggggcgctggcggtgtcgcagggccacttcctggacatggtcttcagctgcctgtacggcgccttctgcgtgaccctgggactcttcgtgctcatccaccactgcgccaagcgtgaggacgtgtggcagtgctggtgggcatgctgcccgccccgcaaggacgcccaccctgcacttgacgccaacggggccgcgctgggccgcgccgcctgcctgcactcgccgggactgggccagccacggggcttcgcgcacccaccgggcccctgcaagatgaccaacctgcaggccgcgcagggccacgccagttgcctgtcaccggccaccccgtgctgcgccaagatgcactgcgagccactgacggcggacgaggcgcacgtgcacctgcaggaggagggcgccttcgggcacgacccccacctgcacgggtgccttcagggcagaactaagccgccctactttagccggcacccagcagaggagcccgagtacgcctaccacatcccatccagcctggatggcagcccccgcagctcgcgcacagacagcccccccagctctctggatggcccggcggggacacacacgctggcctgctgcacccagggcgaccccttccccatggtcacccagcccgagggcagtgatgggagccctgccctctacagctgccccacgcagccgggcagggaggcagcgctcgggcccggccacttggagatgctgcggaggacacagtccctgccctttggtggccccagccagaacgggctgcccaaggtcagcttccaccagaccatgaagccagagccagaccctgcgttccgcacctgactttcgtgccacttccttccttgtgtgtgcccgtgtgtctgcatgtcggatgcaacggagcgtgggtgcatgccagcctgtcctgcggccctcctggaaggaggggtgaaatatcacagtgtccacagctggagctcctggagagcaccagggaccccagcctcctgccccgtcaggccacagcatcagggaaggacggcagcccctgtgggaggtgt

SEQ ID NO: 467196 - DNA, 1050 bp, Homo sapiens
cctgtgggcaccgtgacctgaggcctccatggaccgtacatccgctggtcctcaagggaccccaaataaccgacgtggcccgcagacctccaataaccaacacagcttacagaccccaaataaccgaaccaacacggcccgcagaccccaaataaccgacatagcttacagaccccaaataaccgacgcggcccgcagacctcaaataaccgacgcggcccgcagaccccaaataactgacgtggcccgtagaccccaaataaccgacatggcccacagaccccaaataacggacgcggcccgtagaccccaaataaccgacgtagcccgtagactccaaataaccgacacggcccgcagacctcaaataaccgatgcggcccacagacctcaaataaccgacgcggcctgcagaccccaaataaccaacactgcttacagaccccaaataaccgacgcggcccgcagaccccaaataactgacgtggcccgtagaccccaaataaccgacatggcccgcagaccccaaataacggacgcggcccgtagaccccaaataaccgacacggcccgcagaccccaaataactgacgcagcctgcagaccccagataaccgatgcggcccgcagaccccaaataactgacacagcttggtgcacttgatcagaaagggtggccgtactgcaaaattaagatgtcattattcatggctaaatggggaatcagcccccgagcacctatgaaatcacaaaaggtctgcttgtttctggagtgtcttccttttggctggcaaagggagcagaaaatgtggaaagttctgtctacttagaggcccttcctcaaagtgggctggccagcaggattaggagggagatgcccatggcaggcagagatctgtgagaattaaacagcatattttaaaacaaccaatgggccagagaagaaatcacaaggaaaagcagaaatgactatgtggagataaatgaaacaaaaaaacccacgagacagctcagggatgcaggaaaagcagcactcagaggaaaattcat

SEQ ID NO: 467197 - DNA, 1315 bp, Homo sapiens
agtgcagccagacatttggggccactaccggtctctgcatcttgatcatcccgatggtcactgaactgattgggagaagccaccgctaccaccgaaaagagaacctggagtactgtatcatggtcattggggtccccaacgtgggcaagtcctccctcatcaactccctccggaggcagcacctcaggaaagatgaggaggccactgtccagggccatgcagtggtctctgagcggcccctgatgttcctgttggacactcctggcgtgctggctcctcggattgaaagtgtggagacaggcctgaagctggccctgtgtgtgctcacctcggctgctgcttccacaggaacggtgctggaccacctggtcggggaggagaccatggctgactacctgctgtacaccctcaacaaacaccagcgctttggcgtccagttggacaagttcgggagtatggctatacgtctgtgaaagcaacacacaatcaagaaaacgagcgttcccgtcacccccagtccctgctcctctttcgtgaaatcaaggaaacgagcgttcccgtcaccccccatccctgctcctccttcgtgaaatcaaggaaacgagcgttcccgtcacccccagtccctgctcctccttcgtgaaatcaaggaaacgagcgttcccgtcacccccagtccctgctcctccttcgtgaaatcaaggaaacgagcgttcccgtcacccccagtccctgctcctccttcgtgaaatcaaggaaacgagcgttcccgtcacccccagtccctgctcctccttcgtgaaatcaaggaaacgagcgttcccgtcacccccagtccctgctcctccttcgtgaaatcaaggaaatgagcgttcccgtcacccccagtccctgctcctccttcgtgaaatcaaggaaatgagcgttcccgtcacccccagtccctgtgctccttcgtgatcacaccttcctgcccctccctgagcccaggcagccgtctactgtccctgtaggttgctttgggttttctagaattccacgtagatggaatcacacaggatgtgcattcttgttgatctgtcactcggcacgattgttgtgtgatccccgtgtgtcgtcgtgtgttgtccgtcattcatcctttttgttgccaggcggtttcagtgtccaggtgcgctgcagtctgtcccttcacccgttgatggatatgtgggttgtttgcaggttttggctattgcagataaagctgctgtgaacattcatgtaccgacaggtctttgtgtagatccgggctttcgtttcccttgggttaata

SEQ ID NO: 467198 - DNA, 1050 bp, Homo sapiens
agaaagggagctgcaatttaaagtggtagtgtttgtccgagatgatggtgctcctgttctataattccagaccctatagttatgaaaggacaaagggttttgactcgagtgtgatgtatttaggagttgattcctgtaacagcccgtcggaaaagcgcggtattagggtaggagtgacccgattttccaggtgccgtctgtcacccttttctttgactaggaaagggaactccctgaccccttgcacttcccgagtgaggcaatgcctcgccctgctttggctcatgcacagtgcactgcacccactgtcctgtgcccactgtctggcactcccttgtgagatgaacccggtacctcagatggaaatgcagaaatcacccgtcttctgcgtcactcacgctgggaggtgtagaccagagctgttcctattcggccttcttggctgccaccccaaggttttcttaagaagctaatctactttaacaatatgtataaagaattattaaaggtttataaaaatctcatctcattgtcaaattggttaagattaaatagaattatctataaagtttcattaaaaattgggattgacattaataaaaaactaataaaagggtgaaattcgactttcttttgaacaagattttcaagtcataataaagactaataaaaagtttttactttttcaaatgtttaaatcattttaacaaaacaaatgacttatggtaatctgaaattctgtttcataatatcaattggctttaaacttctaacatattcgacaggcttcccaaaattaaacttgagtttcaagattgtcttccctgacccctaatgtttaaatactacagaaggcccctaaaacaaccccaaaaaagtgaacaggatcacttgacatatttaaatatgtgagactgccaaaatgatatttaatcttcctcaagttatatttcagtaaataatattaatgtatgttccaaaaccatataagatgtctaagattctaatgtctaaatatatactgtcaatcataattaaggttattgtgtt

SEQ ID NO: 467199 - DNA, 1269 bp, Homo sapiens
ggcttcttaagcattcacaagattaaagccacctttgccagaggcctggagatggaagcttaacatgacctctaagaactgctccaagaacagtgtgtacctgaccccgcacatgagtgtctgcacctgccccatcaggaaagctacctcggaaatccttgcactcaagaacatacctccatccatagctacgatggccagaatcgggaagccacagccacacagtgccctggacacaggagcccaggaaccactgcacagcgggtggtgcagtataccgggccatcgttctgccaggtcagtcccgcaaccacaaggaagaggaccaggaaagaggttaggggaaggaggcaccccagccatgcaaaggcagaagatattcttagaccatgggtcccaggagctgcacagtgaaggggtgaccaccagctggtctactgataatccccttgctggggcgaaagtctacacggacagttgtgtcatcagccttttcccgctgcacccattcaatgtagatgacatatttctctctgtaaatctggactactttgccaatttgctgacctttatggtgccctcacacaacctgaatatcatcatcctttcagacgggcatggatcaaacgttgtacttctgtctcagctctttggaaagaggggaagacataactgtcctgtgaatgtgggaaggcgcattgaaatgccttttgcagttactacttcggtcagaagtcacaaagggattgaacttcattttggccactcccacttcagtgatggccacaaagggccccactggttattaatgtcttttttcaactcaaacatttaaactatataacctggcatattgtagaagagaactgtgcagcattaaatattagcatctcacactcgcatgaacagaaatattcagattgcaaaaatataccaatttatgaagattaatattaactcactaatttttcaaagactcgcaattatttgatcaatttcaggagaaactattctatttttgcactatgttcatgcaaattgcctaagactcatcagtttctgttattttcaaatatagagtcactgactgattctattaatattctgcctcagtatttaaaaaaaattctcctataataattggaaaagttaacagaagtgattagatttgtcttagagtgtctcttattttgtgaaccttcatgtgaatcttcagtatctcttattttgtgaatcttcatcataatctgaagtattcccattactttt

SEQ ID NO: 467200 - DNA, 1155 bp, Homo sapiens
cggtggatcccgcactggggctgcaggtggagctgcctgccagtcccgcgctgtgcgcccgcactcctcagcccttgggtggtcgatgggactgggcgccctggagcagggggcggagctcgtcggggaggctccggccgcacaggagcccacggagcgggtgggaggctcaggcatggcgggctgcaggttccgagccctgcccctcgggaaggcagctaaggcccagcgagaaatcgagtgcagcgccgggccggccggctgctcggagtgcggggcccgccaagcccacgcccacccggaaatccagctggcccgcaagcgccacgcgcagccccgtgccgccaaagtgggagcccaggcagagcaggcgccgagagcgagcgagggctacgtattggaaattgatttctgtgttggaaatgggataattaaactggttgtttccatcttcatcattgtcatcataaaacgaggacagccggagatatgggataatgatgccatttaatcatttttacaagatataaaattactggctcctctgggaagatcattaaggaaaacaattgttcacagcaattggagatagagttttaattatttaacacagaaattaaactattagagagaccagtgttggatgaggcaacttactagaaatttatatacaagcgtctgtgaacattttagttttattaacccgcctaattccttcatccaaatccgtctgaaaggcctcttggctgtgccttttttagggttacataaatttcacctatgcaatttttttatgcttgaatatattacagaatgccacttctgttatggaagctaattgataatgtgatttgttatgttgccgggacataattcagaaagttattttaaagcctgtgatgcatggaacggcactcaccgtttaatatttctcacatgtgtggacacagcgtagggtaaaaaatgtggtgctgtgtggatgaaatatttccagaagcttttattcttgttgtttgggtgagcgccagcggctccatagaaggaagcccatatttccagcgcagctctgatttgaatttatttcctggtcattagttagctttttttttttcctaaactgaaataagcatgtgtatatatttgaaaaaagaaaaa

SEQ ID NO: 467201 - DNA, 661 bp, Homo sapiens
gacagcagcagtgctagctttctgcacagacttcgggtcgccaagtctaggctgaaaaatgtatcgccttacacccaaaagaaagccctatctcttctgttttttgaagctcagggaggtagcaaccagatggaacagctgtgccttccactctcccagaaggtttttgtgtggacataagttttcagcacatctggccaaataccaaggaatgagattgcacaaggatcttgtgcaacaagagaggccagagctggaattggacccccttgggatctgctgtgggatggaggctggagagcccatatcgaagaatcaggggggcactttgtttcccaacacgtttcagcatagatgggacagttacctgatggcagcaggagctgagaccgggcctccttggaatctgctgttcactgccagaactgatgtcagcaggcaggtgagcctttccaccaagatcctagtatgtacaattcctcctggacctttggaagatggttttggttgtaggctcaaggccaaacagggcttttctgaggatgagttgaatgtaattcttatctttactcctcaataggtaaagtagttttctcctttagattctttcttgtttttctctttgtttttctgatgtttgaatatgaggtgcttggtgtag

SEQ ID NO: 467202 - DNA, 709 bp, Homo sapiens
gaccacgatcagggctattgtgaaattagctaaattagtccgttctctcgacttttggactctctcctctgaatgccttataggtatagtttggcaatctcgctcacacctgggtgtgaacctgcgtgtacccagcccgggagatatcggggtctgtacaggattggtaccccttatgggttagagagaccttctttccttagctccaaggccagatctacgggtgctgaagttctagaagatattttggaccttgatttatctgtctcagaaacagacgattttatccagcttgtaagtggcgaaaagacagtgtttggatccattccactggctcatccatatgggggccagcagggatgtgaatgggagactggtgtagaaagtgctgaggagccgaagccaacaaattgctttaaacacaagatgaaaatgctctgttccatccacacaaagaatcacctaatactggtgtgaggcatctcacttagctgtggaggagtccttggaattagatctcagaaagacagttctggctttaagacagtaaaaccttttggcaatgggccaattgccttgaaaaaaaaaaaaaaccagagttctactttaaagaccttgcaagtggagaattgtcctacaaagattcttggaaatgttaacagagataactgacatgggtaactgggggccaaccaggaactgtcaacag

SEQ ID NO: 467203 - DNA, 972 bp, Homo sapiens
ttctccttgtgaggtgatattctggtacttcacacggaggaacccaagttctgaattcaaacatgcccggctctgacccgcttcctgccgcagctccttggctgggcctccctgctgccctgtatgcttggggcatcccaggctggctccaggctccagaacccaaccggggtctcccgcccgagcagccctgcgtggcctgcgaggaagacagcttgtttaacccgtgcagcctcatctcccggctgatctggcggttaccatggcaacccccaaggctcctcaggcattctcactgactgaccaggcttggaaaaaccattctggaatggacggagaaactgatgctggtcctgtgcttcctgtacacacagtagaagtgttttacaagtcccgcattgcagaggcacagctgagcaacccagttccagatcaggatgcagacatctttggaggaccgttattcgacttcttacaacaatccaaggccatcaccaggttttcagaaaccaagatggcctgcctgtgggaaataatgtggctgttaaaagctgactgggtcttcaaggaagttgtattagtgcatttggggggtcataacaaagtgccagaaattgagtggcataaaacaacagaaattaatggtcttgcagtcctggagagtagaagcctaatcaaggtgtggaaggggaaattccttcggaagtgtcttgtgggggcttgcagacagccgtcttctccctgtgtcatcacgtgggcctccctctgagtgtctgtgtcttattataaagacaccagtcatatgggatcagggccgaccctggtggtctccttttaccttgattacctctttgaataacttttccaaatacagtcacactctgagggactggggttagcacttcaacgtatgaattttggagggcacaattcaattggtaacagaaatgtaggactgagcaaagcaaagac

SEQ ID NO: 467204 - DNA, 551 bp, Homo sapiens
tcctcactcttcaggaaagaattcaggcctgtcctcggaatgctacaaggttcccacgccacccctaatcccgctcgaagcagccctgagaaacatcgcccattatctctccataccatccccccaaattttcgccataccaacactttaccactatttcgttttatttttcttattaatttaagaagacaggaatgtcaggcctctgagcccaagctaagccatcatatcccctgtgacctgcacatacacatccagatggccgactcagcctgcctgcacccaggtgaaataaacagccttgttgctcacacaaagcctgtttggtggtctcttcacacagttgcgcatgaaaagaatcctaaggaatctacaaataacttaccagaattcagtgaatttagcaagatcacaaagtacatagtcaaaatacaacaatcgtttttctataggctagcatgagacaactcaaaaaataaaatctaagattatgctatttaccatagagacaagtatataaaatacttagaaaaatgtttagtcttgaaata

SEQ ID NO: 467205 - DNA, 1020 bp, Homo sapiens
gaaaactaagtttcaaaatacaaaatgcatgctacagatttcattgctggagaggagcggaagaccttctggtgtgggctgggcagcaattcacttgaaggagaaacagcccgggtgtggagaggcggccatccttggcgggatcctttctaaggagccgagaaatcaacgacctataaatggcaccacccagcccaatggacagatgccccaggctgcagattctgtcagtgctgttctcgaagaggcccaggcacatgctgaaacatggaaggtaaaaccagcaagcagctggcatacattccacccagccgtcccccaggagaattgcttgagctccggagttccagaccaacctgggcaacagaacaagggctcatctctactagaaatcaaaaaattagccagccctcgggaaccaccaggagccaggagcacccccggccccccaaggccccaagtccagcctgccccaccccctccggtgcagaggtcctgtgacaccagtggcagccccgccacaccccccaaggccaagggcacaggcagcgtggtcttccccgccccgcccgactacttcctgccgccacagccaccaatgccgcccctggagtacccagagctcccgctgccgtccccggacttcatggagacccccctggacttcgtgctccctcccctcgctgtcgccaagaggcctcctatgccccaccccccccaacaggcacgaagcatcaatgttcacaagcagcaaatgaataaaagttaaacgttcttcctactgcatttctataaggattattggctgatcagctattgctagtgttagtgcatcatatgtgtgtcccagggaagctaaaagattggacaccccttcaggctaaatggaaatttaaaatgaagcaaatttagttttaaaaccaaaatatttactaactaaaactggcaatgtgttcttaatttttttaagcatatgcttgaaataggatagaagcctctccatagaaactttggaatcaa

SEQ ID NO: 467206 - DNA, 542 bp, Homo sapiens
ctcctcaagcacagccagagtgggcgccgaggccgaggaggcgccgagagtgagcgagggctgccagcatgctgtcacctctcaccagcactttgggaggccgaggcagtgactcaccaacttcagtaagccttaaccaaggttatggcttaattgaggttgcacacagaatctccaaagaggtgcagaccagtcctcacaagatccagaaccaccccaaagacagcccaaggaaaggaaagttttgctacctgcaaataggatacaactcacatctgttcagccaaacaggcttaagacggcaagagctcttgttgccacagatggttaaggatggtgtttgtgcatacagtacctcctgtaacccacaaattacagggggactgccaatcacgggcaccttaatctgcgataccagggaggccctcctgaaagtgtactttcccaggactaaccgggcaacaagggttcatatgagaaaagccccattgtaggggtgggttgcccctacacacctgtgggtgtttctcgtaaggtgggac

SEQ ID NO: 467207 - DNA, 5431 bp, Homo sapiens
gacgagagatcccgagtacgtctacagtcagccttacggtaagcttgtgcgctcggaagaagctagggtgataatggggcaaactaaaagtaaaattaaaagtaaatatgcctcttatctcagctttattaaaattcttttaaaaagagggggagttaaagtatctacaaaaaatctaatcaagctatttcaaataatagaacaattttgcccatggtttccagaacaaggaactttagatctaaaagattggaaaagaattggtaaggaactaaaacaagcaggtaggaagggtaatatcattccacttacagtatggaatgattgggccattattaaagcagctttagaaccatttcaaacagaagaagatagcgtttcagtttctgatgcccctggaagctgtttaatagattgtaatgaaaacacaaggaaaaaatcccagaaagaaaccgaaagtttacattgcgaatatgtagcagagccggtaatggctcagtcaacgcaaaatgttgactataatcaattacaggaggtgatatatcctgaaacgttaaaattagaaggaaaaggtccagaattagtggggccatcagagtctaaaccacgaggcacaagtcctcttccagcaggtcaggtgcccgtaagattacaacctcaaaagcaggttaaagaaaataagacccaaccgccagtagcctatcaatactggccgccagctgaacttcagtatcggccacccccagaaagtcagtatggatatccaggaatgcccccagcaccacagggcagggcgccataccctcagccgcccactaggagacttaatcctacggcaccacctagtagacagggtagtgaattacatgaaattattgataaatcaagaaaggaaggagatactgaggcatggcaattcccaataacgttagaaccgatgccacctggagaaggagcccaagagggagagcctcccacagttgaggccagatacaagtctttttcgataaaaatgctaaaagatatgaaagagggagtaaaacagtatggacccaactccccttatatgaggacattattagattccattgcttatggacatagactcattccttatgattgggagattctggcaaaatcgtctctctcaccctctcaatttttacaatttaagacttggtggattgatggggtacaagaacaggtccgaagaaatagggctgccaatcctccagttaacatagatgcagatcaactattaggaataggtcaaaattggagtactattagtcaacaagcattaatgcaaaatgaggccattgagcaagttagagctatctgccttagagcctgggaaaaaatccaagacccaggaagtacctgcccctcatttaatacagtaagacaaggttcaaaagagccctatcctgattttgtggcaaggctccaagatgttgctcaaaagtcaattgccgatgaaaaagcccataaggtcatagtggagttgatggcatatgaaaacgccaatcctgagtgtcaatcagccattaagccattaaaaggaaaggttcctgcaggatcagatgtaatctcagaatatgtaaaagcctgtgatggaatcggaggagctatgcataaagctatgcttatggctcaagcaataacaggagttgttttaggaggacaagttagaacatttggaggaaaatgttacaattgtggtcaaattggtcacttaaaaaagaattgcccagtcttaaacaaacagaatataactattcaagcaactacaacaggtagagagccacctgacttatgtccaagatgtaaaaaaggaaaacattgggctagtcaatggaataagccagttaccacaatacaacaattgtccctcaccacaagcggcagtgcagcagtagatttatgtactatacaagcagtctctctgcttccaggggagcccccacaaaaaatccccacaggggtatatggccccctgcctaaggggactgtaggactaatcttgggaagatcaagtctaaatctaaaaggagttcaaattcatactagtgtggttgattcagactataaaggcgaaattcagttggttattagctcttcaattccttggagtgccagtccaggagacaggattgctcaattattactcctgccatatattaagggtggaaatagtgaactaaaaaaaataggagggcttggaagcactgatccaacaggaaaggctgcatattgggcaagtcaggtctcagagaacagacctgtgtgcaaggccattattcaaggaaaacagtttgaagggttggtagacactggagcagatgtctctatcattgctttaaatcagtggccaaaaaattggcctaaacaaaaggctgttacaggacttgtcggcataggcacagcctcagaagtgtatcaaagtactgagattttacattgcttagggccagataatcaagaaagtactgttcagccaatgattacttcaattcctcttaatctgtggggtcgagatttattacaacaatggggtgcagaaatcaccatgcccgctccattatatagccccacgagggcggccactgtagagcctcctaaacccataccattaacttggaaaacagaaaaaccggtgtgggtaaatcagtggccgctaccaaaacaaaaactggaggctttacatttattagcaaatgaacagttagaaaagggtcacattgagccttcgttctcaccttggaattctcctgtgtttgtaattcagaagaaatcaggcaaatggcgtatgttaactgacttaagggctgtaaacgccttaattcaacccatggggcctctccaacccgggttgccctctccggccatgatcccaaaagattggcctttaattataattgatctaaaggactgcttttttaccatccctctggcagagcaggattgcgaaaaatttgcctttactataccagccataaataataaagaaccagccaccaggtttcagtggaaagtgttacctcagggaatgcttaatagtccaactatttgtcagacttttgtaggtcgagctcttcaaccagttagagaaaagttttcagactgttatattattcattatattgatgatattttatgtgctgcagaaacgaaagataaattaattgactgttatacatttctgcaagcagaggttgccaatgctggactggcaatagcatctgataagatccaaacctctactccttttcattatttagggatgcagatagaaaatagaaaaattaagccacaaaaaatagaaataagaaaagacacattaaaaacactaaatgattttcaaaaattactaggagatattaattggattcggccaactctaggcattcctacttatgccatgtcaaatttgttctctatcttaagaggagactcagacttaaatagtaaaagaatattaaccccagaggcaacaaaagaaattaaattagtggaagaaaaaattcagtcagcgcaaataaatagaataggtcccttagccccactccaacttttgatttttgccactgcacattctccaacaggcatcattattcaaaatactgatcttgtggagtggtcattccttcctcacagtacagttaagacttttacattgtacttggatcaaatagctacattaatcggtcagacaagattacgaataacaaaattatgtggaaatgacccagacaaaatagttgtccctttaaccaaggaacaagttagacaagcctttatcaattctggtgcatggcagattggtcttgctaattttgtgggaattattgataatcattacccaaaaacaaagatcttccagttcttaaaattgactacttggattctacctaaaattaccagatgtgaacctttagaaaatgctctaacagtatttactgatggttccagcaatggaaaagcagcttacacaggaccgaaagaacgagtaatcaaaactccatatcaatcggctcaaagagcagagttggttgcagtcattacagtgttacaagattttgaccaacctatcaatattatatcagattctgcatatgtagtacaggctacaagggatgttgagacagctctaattaaatatagcatggatgatcagttaaaccagctattcaatttattacaacaaactgtaagaaaaagaaatttcccattttatattactcatattcgagcacacactaatttaccagggcctttgactaaagcaaatgaacaagctgacttactggtatcatctgcactcataaaagcacaagaacttcatgctttgactcatgtaaatgcagcaggattaaaaaacaaatttgatgtcacatggaaacaggcaaaagatattgtacaacattgcacccagtgtcaagtcttacacctgcccactcaagaggcaggagttaatcccagaggtctgtgtcctaatgcattatggcaaatggatgtcacgcatgtaccttcatttggaagattatcatatgttcatgtaacagttgatacttattcacatttcatatgggcaacttgccaaacaggagaaagtacttcccatgttaaaaaacatttattgtcttgttttgctgtaatgggagttccagaaaaaatcaaaactgacaatggaccaggatattgtagtaaagctttccaaaaattcttaagtcagtggaaaatttcacatacaacaggaattccttataattcccaaggacaggccatagttgaaagaactaatagaacactcaaaactcaattagttaaacaaaaagaagggggagacagtaaggagtgtaccactcctcagatgcaacttaatctagcactctatactttaaattttttaaacatttatagaaatcagactactacttctgcagaacaacatcttactggtaaaaagaacagcccacatgaaggaaaactaatttggtggaaagataataaaaataagacatgggaaatagggaaggtgataacgtgggggagaggttttgcttgtgtttcaccaggagaaaatcagcttcctgtttggttacccactagacatttgaagttctacaatgaacccatcggagatgcaaagaaaagggcctccacggagatggtaacaccagtcacatggatggataatcctatagaagtatatgttaatgatagtgtatgggtacctggccccatagatgatcgctgccctgccaaacctgaggaagaagggatgatgataaatatttccattggggagagcaccaggatgtttaatgcctgcagtccaaaattggttggtagaagtacctactgtcagtcccatcagtagattcacttatcacatgtcagtaaactttgttaatgattggcaaaaaaa

SEQ ID NO: 467208 - DNA, 924 bp, Homo sapiens
acttctcgccatttggctctggaggtggcctgttcagtgggggcaaggggctctttgatgatgaggacgaggaggagacacggatgtgctgcctccgttccatcactgaaggagccacagaagcctgagcagcccactccaaggaaaagcccctatggtccccctcccactggcctgtttgatgatgatgatggtgatgatgataacgactttttctcgacaccccacagcaaaccttccaaaacaggtgtagaaagtaaggatggaagccaaagcacgagggaaaacgatagcctagttaatctagaaagagtgcaaacggatgcagaatgcatgcaggtctcggtgaagatgacagtgaatgaaggcaaagtccaatccactgctgatatctttggtgatgaagaaggagatctgttcaaagaaaaagccgtagcatcgccagaagccacgagagagcccagtggaggccatgttgccttctgtgttccagccttggaagtcaacggtggtccttttgcttcatttgttggtcaagatggtcacaatggcccatccaggttcatggggaggggccataggctccccttcttgatggatttgttttcttctcaaagtgcgagtaacttaaaaggtgcgtctctgctgcctggcaagctccccacgtcggtttccctgtttgatgatgaagatgaagagaagcctcatgggtaacacaaacagttgattaacctataaatagtatagtatctatttatatatttttgtattcctgacatatctagcatttccttatttttttttgatatttctaggctaagtggtttgtctgcaagatttttcaaattgttgcaaatgccaaaaaaaattttcagcatattactgagaaaacatttgtgtagaagtggacctgtgcagctcaaa

SEQ ID NO: 467209 - DNA, 545 bp, Homo sapiens
ataagagggcctatcacctgaggctcacaatgtgtcccttcttccacttcctgttctctacagagacttatttccttgatgttctcttttgccctgcaatattaggagcttcctcaactcctaacagattgcccaagggagcatcctgtggaatggaaatccgtttccacattatctctgtaatgccaatcctgctgatctcagttcagcagcaaactgtaacccctggacactgctggcaagtcataaaaaacagcagtggctggatttggaccatgggctatgatttgccagcccctgacctacacggctgcctgaaatacagcagtagcaccagggcagagaggaaggacaaagaaaacatttcagaggtggaatcagtaaaacttattgatgagtggcgcattaagagcaaaaggcaatttataaataccatatgttggcctacttaaatacagtaaaaaacagtattcacagtaataaacattcttaagcatttaaaccatctgtgaatacttgacatagtatacagcattatttaagct

SEQ ID NO: 467210 - DNA, 607 bp, Homo sapiens
attgcaggcatgagccactgtgcccagcatggaccagaggtcttaattgtatttttgtacccatataccaacctctcttcatccacctctcccagctgtccttctcagactgtggaaagcatccttctactcactgtttccacagatatttcatggacagcaaataatcacatgaaaagatgttcaaaattattaggttttagggaaatgcaaattgaaacaacaataagctatcactactcatctatcagaatggctaaaattaaaaatcatgacaccaccaaatgctgcaatgtaaaggaatggatgattgatgcatgcaacaacttggatggattgccaggaaattatgctgagcaaaaaacatcaatccaaaaaggttacataaatgtgattctacttttataacattttgttaaataacaaaattttagaagtagaggacagatgactatccactgtgtgaatacttggtgttcctgaaaagggaaccaagaagtggaatcagacaaatttaaagagagtattaaagaaaacttccaaagaccaaagaacacccaagtctttagcctaaaacattcatcatgtccaaagctggttgtacgta

SEQ ID NO: 467211 - DNA, 1082 bp, Homo sapiens
accatccataccagaagtcaaacaatttaaaggacccccatatgagccaataacaacagacaatgtcactgtacatgaccagctgtctcacctgtttggcatgtagcatgcagcatatgagaataagtgtctatggtcacatgaacatagctaagcttgccaaagtctgctatatgtgtaacatccattttgccagatttcatttggagcaaacctcgtgggttacagccttctacaggtgcaacaccagggacacgctgacaagagggataggcttgtacaatagctcaagactggctgcaaggcagatgaaacatacgaaaggcacagagaaggcgaatcgaggcttatcctcctcatgtaatggtatagaaaagaaacaatctttaagatccattgctacaagaggccagtctctaggaattgctgctggggatgccaagccctgctgtaatgcacccatcaacttaatgtgtgcattaatagctctcaaatcacgcagcagtcaccatcatctggacttttttgggataacaaagattggttaattccagggactaactgacttctctatatgtcctgcatccaattgttttttcaccaacagatgaagttgacctagcttctgctgtgttaggggccactgatccacccacacaggtttgtcactgagccattctaaagtataatttgaatattaggtcctttgatactgtcccataaatcttgtttatttttttttttttaccaattttttatctttttttcctctaactgaatgttttcaaataacctatctttgcattcaaagattctttcttttgcttcattaattatgctgttgatgttctctctgtgttgcattctccatttcattcatttcattcttctggtccagaatttctttgttttattattatttcaatatctctgttaaatttattatttgagttatttaatgttttccttatctaattgaattgtttctctgtattttttgaagttaactgagcatcattaaaacaagtactttgaattttttgtcaggcagtatgtagatttccatttctttggtgtcagct

SEQ ID NO: 467212 - DNA, 473 bp, Homo sapiens
tccacagaaagataactgggaaaccttcaccatgagaccagtgatgagagtgaagcccacgacaaagcaggcagtgaccaggtggaagctagtcctcaggctcatgatggtggagaataactgtggtgataaaacagcattcacagaaggaaaaactgctgaggaagaaatacataggtgtctggaggtgatggtcagcccaggtgatggtgattatgagcatgtttgccatgatggaggccaggatccaccaggaccaacgggcagactccagacacgccagacatcattaggagatgaacaaagccatctagagaccaatgtccctctaggatccctggtggctgctaattgggcactgttggaaatagaaatttattatacaagtatcatagctaccctttcattatgtgtgcaaatatatttaaggaatgacaaccacaatatataaagaagggttgtatgacttcaac

SEQ ID NO: 467213 - DNA, 721 bp, Homo sapiens
accatcttcaatgtctctttcagcaatatgaagttaaagccagatattgtgattgctgacctgatctggggttctcgtgatggtgctttatgtgaggtgacatgtgaggtgagggcccatgacagggagtccttagctgtgcgggttcagcttcagctgaggaaagaagtctcctggcaggaagagctgcaggagcagggccatgggcaggagtcctcctgggatgaaggaagtgcaaccagcagtgaggtgcgggcggcctgggaaggaggcacaggccagagcagctggggcttgcagaccgtgagaaggagctggaattttactttaggtgcaacagggatctgccggagcattttagtcagagcaggagcagcatctcattggagtttgcagacatgcaggcaattcagtggagaacactatggctgctccggaattagttctattaagaagatgtttcagtgggaacaggtgaagaacaatggtggtcacctggagatggagccctctgagatatgttttgaaggtagaatggagtggatgtggagtgaagagagaggaatcagagatgactgaagttgtaggcttgaaacactgaggtaaagaagtctcagggagaacagttttgggagggcttgtggaagagaggaatcaaagcacttgtttatttatttattagatatttattgagtgcctctcatgtgcagacacctaaaaa

SEQ ID NO: 467214 - DNA, 1659 bp, Homo sapiens
aagttggacgtgtgccttgttttgtgacttctcccgagggagagaaccgcagctcagccctatccaggatgggggcagattacccagcaccaccgccatactccagatgcgggtcaacgaggaagggaccctgaggcctggcagcaggtgcagtcaacaaccttgaagccgtccaaacgggacccgccatccgtgcctgtctgagttgtaggggctgcctgcatttggcgcacaggcaaaatggccaagcaacctcaaactccccacttcccctctgggcccaggcagcgcggactagagacaggtgccgctgctgcacagaaatctgtggatcaactctatgtctgcaccagggcaggaaccggctcctcagccccatcctggcggctgcacagtgcccagacccctcaacccagtgccctgggcgcgagccaaggaagagcagggcttagagagggagggtgtgttccacacggcgaccctctggccttctgggtccagccctgcagccaccaccgtgggctcagctgcagctggcatttgaaggtggcagcagcggtgccaaccctagaacctggtcggacgccgccactgcgcctaagtcaggctttgggccctgggctgcaggagggcgggaacctgcagcaaagcctcatccctgcagctgtacagggcccagaggtcgcgagcctgagctgccagcattggcaaagttaaccccgaaattcctgagccgaagtattagtgaattgtaaacagatgggaccacacaaagagcttgaaaaggaggtgtcaacaggtttccgtgcagagaagaatttaaagtcatatattaaaatgaaaaacaggaacaaaattgtgtgattcaatgcaaatgagtattaaaatgtggctcatatatagtctaggaatatatagtttaaggtcatttacctcatagagatagaggtgctaaattaagtagtattcatagaagaaacggaacgtttatttaagattagttttgcacaaaagaaagcaccatatttatattgtccagaagaaaattttactcatgaactaattaatataccaatactgcttaaactatttaaaagttataaggtaaccaacattcccaatagtttttagaaaggatatataaaagtgatacaactttacttgtttgatgctgtatagaatattatagataataagaacatattatatgaaagtaaaatttttaaatgttaaaaagcattgtgtcaacccattaaaatattagatcattaggaattccatttatgcctgaaatgcaagtgagagtcatcgaattaggaaattcattaacacaataaattatgttaattgaattaatgagactgtcttgtgttcatgttcatagatggaaaacagataatgccaaaatttcctgaacaattattttaaatcaatttgtatggaattgttgcaaaatatttcttgaaaacatcaaaatagatttgtataaatgaaaattatgacattacatgattaggcagggtcaacattattaagacatcaaaggtactttaattaataagctgattttttggttgcatagtattccatggtgtatatgtacctttgcaaggacatggatgaaggtggagaccagtatccttagtaaaggaatgcatt

SEQ ID NO: 467215 - DNA, 622 bp, Homo sapiens
aaactttcgctgctttctccttcacttccacttcctctcacagagcactgactgctctacactgggcctgtgtcaacggccatgcggaagtagtaacatttctggtagacagaaagtgccagcttgacgtcctgatggcgaaaactggacacctctgatgaagcaaaatgttgacatctgtgctgaagatacatgtggaatgactgcagaacgttatgctgttgcttgtggacttaatcggtgtttacatttaaagactagggcgcccccatcccaggactgggggcctgcccaggaagaaggcccagataccggggcccaagatttctgccccgctgccgacccactcttccacctgctgcctttgtcccggggacacccaccacaccccacgctgaaggggcgatcctcccacagctgtcacctcctcctgcagccccagctcaggcagggcacggcgcctcttcttcgcatcttttatgttcaggtcgatggtcctcgtcttcacatcatcccctgcaagcttccaggcgtggccccgggaggcagctctgtgcatctttctgatatccctatagtggatgacttaagagtctttggtggtagaccagctgagtgaagg

SEQ ID NO: 467216 - DNA, 997 bp, Homo sapiens
tttttctccagccacatccttggcctcttccacagtccttagatttttgaaacatgaatccttcactcctcctggctgcctttttcctgggaattgcctcagctgctctaacacgtgaccacagtttagacgcacaatggaccaagtggaaggcaaagcacaagagattatatgacatgaccaatgaagaattcaggcaggtgatgaatggttttcaacaccagaagcacaggaaggggaaacagttccaggaacgcctgcttcttgagatccccacatctgtggactggagagagaaaggctacatgactcctatgaaggatcagggtcagtgtggctcttgttgggcttttagtgcaactggtgctctggaagggcagatgttctggaaaacaggcaaacttatctcactgaatgagcagaatctggtagactgctctgggcctcaaggcaatgagggctgcaatggtggcttcatggataatcccttccggtatgttcaggagaacggaggcctggactctgaggcatcctatccatatgaaggaaaggttaaaacctgtaggtacaatcccaagtattctgctgctaatgacactggctttgtggacatcccttcacgggagaaggacttggcgaaggcagtggcaactgtggggcccatctctgttgctgttggtgcaagccatgtctccttccagttctataaaaaaggaatttattttgagccacgctgtgaccctgaaggcctggatcatgctatgctggtagttggctacagctatgaaggagcagactcagataacaataaatattggctggtgaagaacagctggggtaaaaactggggcatggatggctacataaagatggccaaagaccggaggaacagctgtggaattgccacagcagccagctaccccactgtgtgagctgatggttggtgatgaggaagaacttgactgaggatggcacatccaaaggaggaatttatctt

SEQ ID NO: 467217 - DNA, 529 bp, Homo sapiens
aataataaagatgaacataaacacctgtgcaattcagtgtttaaagtttgccaaggtatatgtatatatttttcccaacgttgatgctgtgagaagcccaagccatggagaggccccaggcaggtgctctggtcaacagcccaagctaaatgcccagccaacaccagcatctgcaaccagccctgtgcgtgaggctttgcagatgtctagtctcgtcaagccctgcagatgtctagtcccgtcaagccctacagatgtctccagcacagatagagcctacagatgtctccccgcgaaaccacacagccaagtccaggcggaaaatgtgaaagatgtttctaccaagccactgagtttctgggtggtttgttttacagtaatagaggagaaccagaatgtgactggctgctctggttgatattgtctttcccttcctcccggaaaccctccctcattacctccctttccctaacagttccagctccttgaggacccaaagacaaacagccttgccaacgcactagtgcct

SEQ ID NO: 467218 - DNA, 789 bp, Homo sapiens
ttcccttgctcacctggacctgaagtgatgggggaggtattcccaatctggttcactctgcaaatgagggatacaagcttgtttatttctgattggctgatgcaagtcacagtctatttcttaagtccatatgatgaaatgggtacaggtagcagttgtgttgctggtgggctggttcaggttcttgactttgctgcacaaaagaagtcttactttgagagtgagtccaatgtaaaagtaagcaagagaggttactgcaaagtgaatgtacactctgacagccgatcagagtgggctgctgaaaggaatcttcaggcacaagggcctgaatctgacttctcgtggaaagcattgggcagagcttcacagtcccgcctagagctgggctgtaattcaagggacaaagtggaggagcaacaaggaagttgtggggagcaacctttagaacctgggcctggggagggcaggccaaggaagcctgagtttacacgggctcaggtcctggggcagaagccagacacagagcctgggcagccagattcgctccggcctgggttgtggactcacccgaggatttgtgggccttgctccttaccgggagtcgccttctggccttatcttcctcgtggtgaatcctcccgccaataaaatgtgccaacatcacttcctttaatgttctaatagccacttccctgtggtacaaatggattcctggtggttcttgctgccccctcatgtcctgccctaacataatgagggtatgttgcactagttgtattgtgtttcatt

SEQ ID NO: 467219 - DNA, 1866 bp, Homo sapiens
ggacagtgggtgcaggacagtgggtgcagcacaccgagcgtgagccgaagcaggacgaggcatcacctcacccgggaagtgcaaggggtcagggaattccctttactagtcaaagaaaggggtgacagatggcacctggaagatcaggtcactcccaccctaatactgtgcttttccagtggtcttagcaaacggcacaccaggagattatgtcccgtgcatggcccagagggtcctatgcccacggagcctcgctcattgctagcacggcagtctgagatcaaactacaaggcagcagtgaggctgggggaggggcggccgcaatcgctgaggcttgagtaggtaaacaaagcagccaggaagctcaaactgggtggatcccaccacagctcaaggaggcctgcctgtctctgtagactccacctctgggggcacggcatagcgaaacaaaaggcagcagaaacctctgcagacttaagtgtccctgtctgacagctttgaagagaatagtggttctcccagcacacagcttgagatctgagaatggatagactgcctcctcaagtgggtccctgacccccgagtagcctaactgggaggcaccccccagtaggggcagactgacacctcacatggccgggtactcctctgagacaaaacttccagaggaacgatcacgcagcaacatttgctgttcaccagtatctgctgttctgcagactccgctgctgatacccaggcaaacagggtctggagtggacctccagcaaactccaacagacctgcagctgagggtcctgactgttagaagggaaactaacaaacagaaaggacatccacacaaaactccatctgtacatcaccatcatcaaagaccaaagtcacctgacaggtcacaaacatgtcagacaaaagtgaattaaaggctgagttggaacgtaagaagcagcaactggcccaaatcagagaggaaaagaagagaaaagaagaagaaaggaaaaaaaaagaaacagatcagaagaaggaagctgttgctcctgtgcaagaagaatcagatcttgaaaaaagaagaagagaagctgaagcattgctccaaagcatggggctaactccagaatcccccattgtccctcctcctatgtctccatcctccaaatctgtgagcactccaagtgaagctggaagccaagactctggagatggcgccgtgggatctagacgaggacctattaaacttggaatggctaaaatcacgcaagtcgactttcctcctcgagaaattgtcacgtatacaaaggaaactcagactccagttatggctcaacccaaaaaagatgaagaggaagatgatgatctgactgaagaagaaaagcaacaaatcttgcactctgaggaatttttaagtttctttgaccattctacaagaattgtagaaagagctctttctgagcagattaacatcttctttcactatagtgggagagatttggaagacaaagaaggagagattcaagcaggtgctaaactgtcattaaattgacaattttttgacgaacgttggtcaaagcatcgggttgttagttgtttggattggtcatctcagtatccggagttactcgtggcttcctataacaacaatgaagatgcccctcatgagcctgatggtgtggcccttgtatggaatatgaaatacaaaaaaactaccccagagtatgtgtttcactgccagtcagctgtgatgtctgccacatttgcaaaatttcatccaaatcttgttgttggtggtacatattcaggccaaactgtgctttgggataaccgtagcaataaaagaactccagtgcaaagaactccactgtcagcag

SEQ ID NO: 467220 - DNA, 1577 bp, Homo sapiens
gatcatggcgtgaagtccacgttgacgacgttatcagtacttggggagatgatgaaggccacggaccttaggcactctcccttgaaccccactgaggaacttcttgtcaaagtgggaccacatctctctgagatagttgtgcctgatatgccgggatatgtccttgatggccaagaggatgtggttgaaagcatggtggtgcagcttctcatggagcttgggctcctggtgctcactcctcttcaccttcagccactgcaccagggacttgatggtcaggccccggaaaatgactgtgaagaagacgatgacggtggtgctgacaaacaggttcttctccttgaccttgtttctgtccggaagcacgaccacgatgaaggccatggccccatgcaggcctctataggacatgaccacctggtctatgatctccagctgcatcatccaatagcagtacaggagtcaggactggatgacactatggctcggtacatgaaggtgaaggctaatgagcaggttcatggccgagatgcccagggatatgaagatggtattggtgccactggccagcatcttcatggtgtagtgcatggtggtggccgactgctccgagatgttgactttcatgtacttatgacagcagatgccacagaagatgatggccaggacggccgacagcaacagtacgatgatgaacaggacctcattgacatgaacctcctcaaacacaaccaggatggctgctgggtccacagtggtgatcaggctgcccaacaggaggaagtccagcagccctatctgcaggttgcccatgagcctactaagggaaatgacatagagggacagtatggtggtggctgcattgcacatggtgctgatgacctggtacagcaggatggtgcccagtttgccaaagaagagccagttgggcatgaagatgcagatcacaatcatgtactggtcctggacattggcccattcaaaggcggccacgtgggagccctgactcacatcatgtacactactgtgctcctcctcgacaccccctcacccatagcagccacccagcaccagtgccactgctatcagcagcccccggcagcaacatctctttgccaagataaacgccttctgtttgaaaaggatgattttcaaaagggccagaacctccttcctggttctaaaggaagtttgggccagggccccttgagctttggagaaggcatgaaagcattacactatgtgaaagaagccaaccacaaaaggccacacagtatatgatttcactaagagggaatgtgcagaaaaaggcacatctgtagagtcagaaagcagattggtggttgcctagggctgggggtgggaatggaagattgcctgcaaacaggcaagagaaatgttttcagggtaatagaaatgttctaaaactggcttgtgctgacggtttcccaaatctatagatttactgatctaactgtatatttatcatcctggcaaacactacactttttaccgtctccatagttttaccttttccagaacatctcatgtgaactcagagtgagaactcattcatt

SEQ ID NO: 467221 - DNA, 2530 bp, Homo sapiens
ctctacctgggcagcttcctattggggatgctgctgttttaccgcttctgggcgctctttggcttgtacagcttggctgccttcttgttctggttgatcccgagcttgctcaacttgaaggactccaggtgcttcctcatggacctgtcgaagatttcctgctcctgcttctcgtcctcagttggtgtggctgtagcgatgcatgtactccttccccggcttgcacaggtactgctgcagcgtgtggtgcgtgaccgggtcctcccgataccgaacgtctgccacgttcagggactgaacgtccagacagatggcactgatgctctccctcagaagaaccccactgaggaacttcttgtcaaagtgggaccacatctctctgagatagttgtgcctgatatgccgggatatgtccttgatggccaagaggatgtggttgaaagcatggtggtgcagcttctcatggagcttgggctcctggtgctcactcctcttcaccttcagccactgcaccagggacttgatggtcaggccccggaaaatgactgtgaagaagacgatgacggtggtgctgacaaacaggttcttctccttgaccttgtttctgtccggaagcacgaccacgatgaaggccatggccccatgcaggcctctataggacatgaccacctggtctatgatctccagctgcatcatccaatagcagtacaggagtcaggactggatgacactatggctcggtacatgaagggatatgaagatggtattggtgccactggccagcatcttcatggtgtagtgcatggtggtggccgactgctccgagatgttgactttcatgtacttatgacagcagatgccacagaagatgatggccaggacggccgacagcaacagtacgatgatgaacaggacctcattgacatgaacctcctcaaacacaaccaggatggctgctgggtccacagtggtgatcaggctgcccaacaggaggaagtccagcagccctatctgcaggttgcccatgagcctactaagggaaatgacatagagggacagtatggtggtggctgcattgcacatggtgctgatgacctggtacagcaggatggtgcccagtttgccaaagaagagccagttgggcatgaagctgaccacaaggatgcagatcacaatcatgtactggtcctggacattggcccattcaaaggcggccacgtgggagccctgactcacatcatgtacactactgtgctcctcctcgacaccccctcacccatagcagccacccagcaccagtgccactgctatcagcagcccccggcagcaacatctgtgatgctcccccactcaaccctaggcaaccactaatccattttctatctccaaattggtcttttctggacatttcacataaatagaatcatatgtgatttttttgtgactggcttctttcacttagcataatgttttcaaagttcatcatgttctaggatatatcagtacttcattcctttttattgctgaataatagtcccttgtagcaatatatctcatgttgtttatccatccatcagttgatgagcatttgagtcatttccaattttgggctgttacatataatgctaagatgaacattcaactgcaagtttttgtgtaaacatatgttttcctttctctttgaagtagctttgctaggttatgtggtaactcttatgtttagcaaattgtggcactaccaaacttttctaaatggtatggatcattttatagtcccatcaacaatgaatgaggttgccaatttctccacacccttgccaatacttctttctgtctttttgattaaagctatcctagtgggtgtgaagtagtatctcattgtgattgtgatttccatttctttaaaaactaatggtatggagcatcattttaatgtgattattggccatttgcatacattctttggagaaatgcctattcacatattttgtctatttttaattggattttttattgagttgtatgagtttttttattacatattctagatagaaacactaacggatatataaatggcaaatattttctctcagtttgcgggttgtcttttaactttcttgatggcatcttttgagacacaaaagtttttaattttggtaaagtctaatttggctatttttcttttgtcgtacttcaaaagcttggcctatcccaagtagtaaagattgacatatatttttctaagaattgtatagttttagctcttatatttaggtgtattgtccaatttcaatttagttttgtgtatggtgagagttagggtctaactttattcttttgcatgtggataaacagttgttccagtatcatttgtcagaaaaatcattctttcccaattgaattgtcttggatcctggttaaaaatccattttttgtaaatgtgaaggtttatttccagactctttatgctagtgatctacctatgccagtaccaccctatcttaattactgcagctttgtagtaagttcc

SEQ ID NO: 467222 - DNA, 1352 bp, Homo sapiens
gtgtctgaaatttgcaagtctttctcctgaatggtgaaattgtgcacggggctctacctgggcagcttcctattggggatgctgctgttttaccgcttctgggcgctctttggcttgtacagcttggctgccttcttgttctggttgatcctgagcttgctcaacttgaaggactccaggtgcttcctcatggacctgtggaagatttcccggtcccgcttcttgtcctcagttggtgtggctgtagcgatgcatgtactccttccccggcttgcacaggtactgctgcagcgtgtggttcagctcatggaagacattgaggatcccatatggagacttctgggccagcattctcatgagaaccccactgaggaacttcctgtcaaagtgggaccacatctctctgagatagttgtgcctgatatgccgggatatgtccttgatggccaagaggatgtggttgaaagcatggtggtgcagcttctcatggagcttgggctcctggtgctcactcctcttcaccttcagccactgcaccagggacttgatggtcagcccctggaaaatgactgtgaagaagatgatgacggtggtgctgacaaacaggttcttctccttgaccttgtttctgtccggaagcatgaccaggatgaaggccatggccccatgcaggcctctataggacatgaccacctggaggatgaaggccatgttccacgtccagatgagcaggttcatgaccgagatgcccagggatatgaagattgtattgacaccactggccagcatcttcacggtgtagtgcatggtgttggccgactgctccaagatgttggccttcatgtacttatgacagcagatgccacagaagataatggccaggatggccaacagcaacagcttctcagacatgatgatgaacaggacctcattgacatgaacttcctcaaacccaaccagtatggctgctgggtccacagtggtgatcaggctgccgaacaggaggaagtccagcagccctatctgcaggttgcccatgagcctgctaagagagatgccatagaggaacaggatggtggtggctgcattgcacacagtgctgatgacctggtacagcaggatggtgcccagattgccaaagaagagccggttgggcatgaagtagtcggcatctgcatgatgggggacgtcaacatgaaggaccacggtgatgccttgtgggacaggtagaaccaatcttggccagcctgaccacaaggatgcagatcgcaatcagggcagcaccaagacattcatgaggatccacccccatgacccaaacacctcccactaggcccacttccgatactggc

SEQ ID NO: 467223 - DNA, 598 bp, Homo sapiens
caaattcttatgttacccctatatcttcccattgtgatggtattaggaggtggtgcatttgggagggaagagcctgtcttagtcaacttgggctgcgataacaaaataccattgactgggtggcttaaacaacagaaaagtgtttctcacagctttggaggcaagttcaagaacagtacaaacatggtcaggttttacaaaagatcttcaaaatggagcagtgtgaagaagaggcgagaacgacccccaattgaccaaagcctatgcgccctgcatctctgcaatcagtgcctatgttccgccaccatggttaccaagcccaagagaagggttgaaggggatgttaaaggagataaagccatggtgaaggacaaacctcagagaagatctgaaaggttgtctgctaaacctgctcctccaaagccagagcccaagcctaaaagtgccctgtaaagaagggagagaaggtcaggtctatgtcccgctactgcatgtactgcattacctaggggtgtcagcctgcttccctatctgcaaatgaataaaacagtatccatcctagagtggttgtagacaagcactgggttgtatgtaaagc

SEQ ID NO: 467224 - DNA, 1028 bp, Homo sapiens
aaactgggctcaaggcttcaaccggcagacaaggagattctctcccatgcatggctcggtgggtcccacgcccacagagccttgttcactgctagcacagcagtctgagatcagcctgctaggctgcagccaggcagggggagggggcgtagccattgctgaggcttgagtaggtaaacaaagcagccgggaagctcaagctgggtagagcccaccacagctcaacaaggcctactgcctctacactccacctctgtgggcagggcatagctgaacaaaagccagcagacaacttctgcagacttaaacgtccctgtctgacagctctgaagagagcagtggttctcccagcacagcatttgagctctaagaatggaagactgcctcctcaagagggtctctgacccccgtgtagcctaactggggacacctcccagtaggggccgacagacacctcctataggcggctgcccctctgggatgaagcttccagaggaaggatcaggcagcaatatttgctgttctgcaatatttgctgttctgcagcctccactggtgatacccaggcaaacaggcatcaacatcaacaaaaaggtcatctacaccaaaacctcatctgtaggtcaccaacatcaaagaccaaaggtagacaaaaccacaaagatggggagaaaccagagcagaaaagctgaaaaatacaaaaatcagagtgcctcttctcctacaaaggatcgcagctccttgcccgcaacggaacacagctggatggagaatgactttgacaagttgacagaagtaggcttcagaagaacaaacagtgtagagaagaccttaaatgacttgatggagctgaaaaccatggcacaagaacttcatgatgcatgcacaagcttcaatagccgattcaatcaagtggaagaaagggtatcagtgatttaagatcaaattaatgaaataaagcaagaagacaaggttagagaaaaaaagaataaaatgaaatgaacaaagcctccaagaaatatgggact

SEQ ID NO: 467225 - DNA, 1841 bp, Homo sapiens
cctttccctgagcatactggttacccagtgggtcctaggctattctggaagccatctgactctattttgagaggtgacagcgtgctggcagccctcgcttgctctcggcgcctcctcggccttggcgcccactctggccgtgcttgaggagcccttcagcctgccgctgcactatgggagcccctctctgggctggctgaggtcagagccggctccctctgcttgcagtgaggtgtggagggagagtgggagggaaccggggccagcacaagttctgagtgggcgtgggctcggtggccccgcactctgagtggccggctggtgccaccggccctgggcagtgaggggcttagcacccgggccagcagctgcagagggtgtaccgggtcccctagtggtgccggcccgcgggtgctgtgctcgaattctcgccaggccttagctgtctccccgcggggcagggctcgggacctgcagcctgccatgcccgagccttaccccgcggccgtgggctcctgggcagcccaagcctccctgatgagcactgccccctgctctgcggcacctggtgccatagaccgcccaagggctgaggggtacaggcccatggcgcgggactggcaggcagctctgacagcggcacccgtacaggatccactaggtgaagccagcttcactcctgagccagcgaaaccacgagcccaccagaaggaagaaactctagatgtctccaaacatcagaaggaaaaaactctggacacgctgcctttaagaactgtaacacttaccgcgagggtctatggcttcattcttgaagtcaggactacagctattcacttcttcctgagcctgcacccagctgtaactagcagcttccctagccccagcacatttgaggagattcagttcttcaacagccctaattaccacaagggtattgactggtacatggatttcttccctgttccttccaatgccagcactgatttcctatttgaaaaaagtgccacctactttgactctgaagttgtaccacggcggggggctgccctcctgccacgagccaagatcatcacagtgctcaccaaccctgctgacagggcctactcctggtaccaggtctgcctgaagctagggacacacaggctaaagcatcagcgagcccatggagacccagttgctctgaactataccttctatcaggtgatttcagcctcctcccagacccctctggcactacgctccctgcagaaccgctgtcttgtccctggctactattctacccatctacaacgctggctgacttactacccctctggacagttgctgattgtggatgggcaagagctgcgtaccaacccagcagcctcaatggagagcatccagaagttcctgggtatcacaccctttctgaactacacacggaccctcaggtttgatgatgataagggattttggtgccagggacttgaaggtggtaagactcgctgtctaggccggagcaaaggccggaggtatccagatatggacactgagtcccgtcttttccttacggattttttccggaaccataatttggagttgtcgaagctgctgagccggcttggacagccagtgccctcgtggcttcgggaagaactgcagcattccagtctgggctgatgtcccagcctcccataccagcaaaatgccccctgcttccctaaggggcaggtccagagcagggcccacaagggggattagagtggcctggcccctccccctctacctcagtagcccccaggcctgagatggctgagaagggaagggtatccttttcccacagttctgggacaaataaa

SEQ ID NO: 467226 - DNA, 1016 bp, Homo sapiens
gaaaaccactttatcacgggcttcactggagccctcaagagaaacttctggctaacattcgttgagagaccaaactctgcagaagtcaaggacggaagatgtgggagtctggagggtgtgtggccaagagacccaggcctgctgacatttcagaccaccccatgctgctcagtcaggataaaaccctgcagcaggcatgtgcatgtttgatgaaaggaaaagaagaaaaagaggtagtcatactagatgatcctttaatgcaaaacccccgggttcagcggggagttttgggtggagcagaacttccttccatcagctgtgaaggttcagatgtgtcagtcctttctcccttcagtccacctgaaagttctattgagaacccttcgtcctctcctccttacaagtctagtcccattctatacccaccactccctgaggaacttagcccagtgaggactactcatagcggagcctcccatcaacctccaaagggaaatctttgtccacttagagaggtggcaaatggggaagaatgcactgtgagagtacatgtccccttttctatgtctgatttggttctatgtaaagagaagtttggtcatttctctgaagatccaggaaaattcatagatgagtttaagaagttaactctgacctatagtttaacttggcaggatcttcttgttgtgttgtctctgtgttgtacagtgaaagacaatcaacacattctggggacagctaggacccatggagatgaggtattggctcacaacccaaaccataatatatatcaggcaggaggtatagcagttccagatcaagatccagagtggaactactgtaaggtacatggatgtgctttggtcaacaataggctgaggcggacatctgggccaaagtaactcagcaagtttagggtgcaggcgcatactccgcttgttatataacctgtttgtgtaagttcatacttgccttggagccactattgtctgtgaaaggtgtaactgccctgttaa

SEQ ID NO: 467227 - DNA, 1055 bp, Homo sapiens
gctggggcagccctggtcaccgagcctagctttcacgggtttattgtcctctggtgccccggggcaggctcgatcgggcaaggagagtcccaagcaggcgttgagcgggatgaatgggcgtgaagaccctcagtctccccttgtatgcaggcagggaggaacagggagggccagactcccagactgtgtgcaaagcggctgccctgccctggtgctcagctcagggtgcagactcctggagggatgacgatgacaaggatgacgatgatgccggtgcacacaggacgcagggaccgcggcggccatcacagcactgcaccttggaggtgggaaacctggcagggcctgcacattccacgacgggggcagtgaagcccagtgactggggaaatcacagtgggaaccgcctggaggacgcgccacaagctgatggcaaggcagacgcttggcctgtgaaccccatgtcctctgtaactgtgctagtgcgggtgcctgtcatccacacaaggctcagcctcataggctccacgccagcagggaccatcaccgcctccatcagggtccacatttcccccacgtcgcggggcctctgctggcacccagccttctatgctcctgccacgagcacggcctccttggaggatgggagccacagacagggccagatgacgaggagagaaggcacctgctacccacctgcttaccgcggggcccacggcgcggtgtgcggcacctgccacgggccgtcccgccctggtcttcgctgtgtcttctccacctgggaaagctccagcttcaaccctggggctcaaagccagaaggctcctgcccctacaccctcctatgagcctcctccgggccctatttagcaaatggttatgcaggtacattcatgcataaagactcggttctctaagtccctgctctagaaagaagtcatcgtgtccccctctcgcagccgccgcgtctgtttgtaagccctgcaggggccactccggaacgaccccccgggccccgccccgcggccacgcggggacgcgatgctaggaggtgtc

SEQ ID NO: 467228 - DNA, 3586 bp, Homo sapiens
gagggtacacatgctgtcggctggcggagcacacacatgcacgcacgcaggcacacatgcacgtcgcatgtgctctgggtggattttggtcactttgagcacggcgtcacggctcattctggggtctgtctctgcaacttcaaggatagctgtgggcacctgggggagggacagagtcaactgctcagcaatagcagagcccagggccaataggaccccctggggctcgcccacactgtgccgagaggcctgcactgggcactggctctggaaaggcaccgtcagggccacaccagctccagaagatgggaagatctgtattgtacggctgggtgcagtggtgtcggtggaagaggactcacccactgccccagggatgcctggctttgccctgaagtctgttgcaggcatgaacttggctgcgctggaagaagtcccttctctaactgcagctgtgctgtgggccctcggggatgggcctgccgggcatcgctgccctcgggagtgcatctcatgggtgcacctggcaggggtggggacagaggcagtgactggggaaatataccaaagaggtaacggatttatctccggtgggggtgattatgggtaattctaatgttcttttcagatttttttacattttcttaataatatgcgggcggcccaggttagcaaattcaaaagatcaaagttagaacaacaaatccattttcagcatacgtgtgctccatgcaaatttgggacagacgtatactaagcaatgatacattgctgatctgaattcatcttagctggggatcccgagttttatctggcagcctgcctccctgctccccaccaccttggctcccaccagctaggagccttgtaatctctggatgccaaacttcagccaatgggccacatccagtggagaagggacctgggggcacccagtcaatgggccacatccagtggagaagggacctgtgggcacccagtcaatgggccacatccagtggagaaggggcctgggggcacgcagccaatgggccacatccagtgaaggggcctgggggcacgcagccaatgggccacatccagtggagaaggggcctgggggcactcagccaatgggccacatcaagtggagaaggggcctgggggcactcagccaatgggccacatccagtggagaaggagcctgggggcacccagtcaatgggccacatccagtggagaaggcgcctgggggcactcagccaatgggccacatccagtggagaaggggcctgggggcacccagtcaatgggccacatccagtggagaaggggcctgagggcacccagccaatgggccacatccagtggagaaggtgcctggaggcacccagtcaatgggccacatccagtggagaaggggcctgagggcacccagccaatgggccacatccagtggagaagggaccttggggcacccagtcaatgggccccatccagtggagaaggggcctgagggcacccagccaatgggccacatccagtggagaaggcacctgggggcacccagccaatgggccacatccagtggagaaggggcctgagggcacgcagggaggctgtggcagtgggcagaggggcgtagcggtgtctggggtaggcaggattctccagggaaacagaaccattgggatgtgtgtacaaacagtgtacatatagggtatatacagtgtacatagaggtcatataccatgtacatattgggtatctacaatgtacatatagcgtatataccatgtacatcatatagggtatatactatgtacatgtagagtatatacagtgtacgtgtaggacatataccacatacatatagggcatatgctgtgtacatatagggtatatcccgtgtacatagaggtcatataccatgtacatattgggtatctacaatgtacatatagggtatataccatgtacatcatatagggtatatactatgtacatgtagagtatatacagtgtacgtgtaggacatatagcacatacatatagggcatatgctgtgtacatatagggtatatcccgtgtacatataggccatatgccatgtgcatataggacatataccgtggacatatagggcatataccatgtacatatagggtatatattgatattgtgtacatatatagaatattcatagtgtgagtgtgcatatagtacacacatatacagcatatatacagtgtgtgcatatagagtatatatagtgtgtgtgtgtaaagttatagtgtgtgtatatagtgtatgcatatggactatactgtgtgtgtatagtgtatatgtagcatgcatacagagtatatatagtgtatgtacacatataatgtgtatatattatagagatagcatatgtatacatagtgtgcatatagtgtacattaatatagagtatgcatatatttgtgtaatatagtgtgcatatagatatatacagtgtatgtatagtgtatatatagtatacatatatagagattatatacagtgtgcatagtgtatatggtctgtgcatattgcatacctatatattctatacacagtgtatgtatgtgtatacatagtgtgtatatgtagtatacatgtagtgtgtgtatatatatataaaatgtaaatatatacatagggagagcgtgcaagagagatttattttaaagaattggcttatgtgtttgtggcagctgctcatctgacacctgagggccgctggagacccagggacactcctgctgcggctcatgtttggaagctgtccggaggcgggacttcctcttcctccaggggccgccgtccggaggcgggacttcctcttcctcggggacaactgtctttttctcttaaggccttggactgcctggatgaggctataatatggtcagtactctgctctacccaaagtctcctgattgaaatattaacctcatccaagaaacaccctcacagcgacgtctacactggtgtttgaccaaatagctggggaccgtggcctggtcgagctgacacaaaagtaaccatcacagctgctgctatggtctgaatgttgatgtcacccccagattcatttgttagaacttaagccccaaggcgatggcatcactggtgggctttgggagatgaggaggatatgaatgggaccagtagcctcataagagttttgagggtcctggttgcccttccccaccctcccgtccctgccactgggtgaggacacagcaagaagccgccgtcctgggagcagagagcagaaagcagccctcaccagacgctgaatctgctggggcctcggtcctggacgtcccagcctccagaactgagcgatgaaattctggttacaaattgccccctctgaggtattttgttttagcagaaggaacagacgaggatgaccaccgaggcccttctcaggctgccgcgggtctccaggatggggacagtcagctggggccaaccgagctgcatgtggtcaagggcccatgcatgtgaccagggcccgcctcccacgtcacccagtgcaccctcagcatgggacacggacctagacactgcc

SEQ ID NO: 467229 - DNA, 464 bp, Homo sapiens
ccagggccactgcctgggggccatgccgagagcctgcctcttacagactacagagctgggggtgggggctgtgagctgccgtgcacagcacttgcaaagggcatctgtgccccacttcactctccacagacccagccgcgggggaggcagaccctgctctgcaggaggccagagcccctggaaaagcctagaagccaccaaggcgcgagcagagtccaccatggcagtgcttgcaggtcactcatggtgccagcagagacctgccctccgagctggggtcctgtgcagcaggtaccttcccaagcaggggggaccctccgaggagcaggcactctctgagcaggcacagctggcgggggcaggggtgtccctggaggcagtggctttcagtccggtcaggacagtcctgggcatgggccccagcagtgctcacagctcccagcaggaaagctgctgaagcagcc

SEQ ID NO: 467230 - DNA, 1032 bp, Homo sapiens
ccggagacacaggaaggttaagaaacagccggggcacaatgcaggctcctattcttaacctcaaggctttctatgtagcacgtcctcacgggaccacagaacgagagggagctgggggtgtggtggaggagtggcaagtgacagggcagaaacagctgctcgaggaggccccgtgttctcctgggggacctgacttggtcaagcttggaggatgtggggcctgcctgtgcgtgccccatgggcagagagggcgggcgcggttcgtgctggactctagatgtgcagctccaagtgagatgtgggtagatgccattgggattttggcggtgcagccctgcacagcccttctagccctctcaggtctttcttttgtccaaactcttatcttctcttgggtccccagggtcaccaacctctttgcagaaaatccctctgcagccactgaccccacacccccagcccccatgccctcactgcacacgttctcagcccccatgtcctcagcttccaatccctaaaccccacgtcctgaaacccacaccctcagcctccacccccaagaccctacaccctctgactgcgcactcccagaacctgcacctgaccccacaccccctgaccccacccccccgaccccacaccccctgaccctacaccccctgaccccacaccccctgaccccacacccctgaccccacatcctctgcatactcccagaacccacacctgaccccacaccccagaccctacatcctctgtgcactcccagaacctgcacctgaccccacccccccgacctcacaccccctgaccctacatcctctgagtgcgcactcccagaacccgcacctgacccccacaccccctgacaccaccccacagcccccatcttcagcctctcctctgctgtagtccccagcccctggctggcttgcttctcagcacagccctggcccagaagcaggaggacactgtcagcccctccttgctggggggagagtggttggggcacacctgtcccctgcccctctg

SEQ ID NO: 467231 - DNA, 633 bp, Homo sapiens
ctcagaagcatcagggtaacaatgggacaagtgtgggctgtggttcgttctaccttggaactttttcacactgataatgaggaggaaggagagtataacaaagtaacagtagaggttacagaccaggtttatttgccacctaaagctaaagcagaaaaggagggagaggttcatccctacccttctgcaccccctcattattattttgaagaaaacgaccctccagatctttcttttctggaggacactggagggaaagcacatttagttgattataacaaggcctgtgatgatatcagagatactttgttggcacaggcgatggcaggactgagagtggataaaggaaatactctatttcctggagcttgttttaactgtgggaagcatggtcatactaaaaagaatgtaaaaaaagaaatcagcaagtcaggccaccagataggtgaaaaaagaaaactgctgatcctgaaatatgtctaaaatgtaaaaaaggaaaactttgggctaatcagtgtcactctaagtttgataaagaagggaacccgattttgggaaactccctgatgggcccatcccaggccctgttctaaaccagggcatttccagctcaggccattccctcacctccat

SEQ ID NO: 467232 - DNA, 5210 bp, Homo sapiens
tggaatcaacccgaatgggttggaatgaaacggaatggaatgatatggaatcaaccggagtgtaattggaatggaatggaatggaatggaatggaatggaatggaatggaatggaatggaatagcatgcaatcaaagttggtggaatggtatggaatggtatggaatggaatggaataaaaaggcctggaatggaatggaatcaacccgagaggaatggaatggaatggaatggaatggaatggaaatgaagcaaaccgagtggaatggaatggtatggaatggaatggaatggaatggaatggaatggaaacaatgcaatgcaatggtatcaacgggaatggaatgcattggaatggaatggaatggaatcaccctgaaatcaacccaagtggaatggaatgcaatggaatggaagggaatcatcacgagtggaatggaatggaaaggaatgcaatggaatggaatggaatggaatggaatcaacacgagtggagtagaatggaatggaatggaatcaaccgtggtggaatggaatggaatggaatgcaatagaatggaatggaatggaatacaatggaatcaacccgcgtggaatagaatggtatggaatgcaatggaacggagtggaacagaacgtggaattgaatggaagggaatgcattggaaaggaatggaaaggattcaacacaaatggaatggaatggaatggaatggaatacaatggaaaggaatggaatgcaatggaatggaatggaatggaatgaaatggaataaacccgaatggaatggaatggaatggaatggaatggaatggaatggaatgaattggaataaacccgaatggaatggaatggaatggaatttaatggtgtggaatggaataaacaccaaatggaatggaatggaatggaatggaatggaaaggaatggattcaactggaatggaatgaaatggaatggaatggagtggaatggaatggaatgcattggaatcaacaagagtgaaatgcaatggaaaggaatggaatggaatggaatggaatggaatggaatagaatggaatcaacccgagtggagtgaaataaattggaatggaatggaatggaatcaacctgagtggaacggaatggaatggaatggaatggaacggaatggaatgcaatggaatcaactggaatggaatggaatggaatggaatggaatggaacggaatcaacctgagtcaaatagaatggaatggaatggaatggaatggaatggaatggaaactactggaatggaatggaaacaacccaagtggaagggaatgcaatggaatggaatggagtggaatggaatggaatggaatggaatcaacacgagtggactgcaacggaatgaaatggaatggaatgcaatggaatggaatggaatggaatggaatggaatggaacggaacggaacggaattgaatggaatggaatcaacagaagtggaaatggaatggtatagaatgcaacgtaatggaacggaatggaatggaataaaatggaatggaatggaatggaaacaacccgagtggaatggaatggaatggaatgcatggaatggaatggaatggaatggaatggaatggaatggaatggaatggaatcaaccccagttgaatggaatggaatggaatgtaacggaatataatggaatggaacggaatcatcccaagtggaatggaatggtacggaatgcaacagaatggaatggaacagaacggaatgaaatggaatggaatagattgaatgcgagtggaatggaatggaatggaatggattggaatggaatggaatggattggagtggaatggaatggaatcaacacgaatgggatggaacggaatggaatggaatggaatggaatggaatggaatggaaaggaatggaatggaaaggaacagaatggaatcaacacgattggaatggaatggaatggaatggaatccacccgagtggaatggaatggaatggaatgcaatggaattgaacggaatataatggaattaaatggaatcatcccgagtggaatgcaatgtggaattgaatggaatggaatggattggaaaagaatggaatggattggaatggattggaatggaaaggaatggattcaacccgagtggaatgtaatggattggaatggaatggaatggaatggaatcaacacgaatggaatggaacggaatggaatggaatggaatggaatgaatggaatggaatggaatcaaccccagtggaatggaatggaatggaatgcaatagaatggaaagtaatggaatggaatggaattcaatggaatcaacccgagtggaaaggaatggtatggaatgcaatggaatggagtggaatagaatggaatcaacgagagttgaatggaatggaatggaatggaacggaatataatggaatggaacggaatcatcccgagtggaatggaatggtgtggaatgcaatagaatggaatggaacagaacggaatgaaatggaatggaatagattgaatgctagtggaattgaatggaatggaatggattggaatggaatggaatggatcggagtggaatggaatggaatcaacacgaatggaatggagcggaatagaatggaatggaatggaatggaatggaatggaatggaaaggaatggaatcaatccgggtggaatggaatggaattggaatggagtggaatggaatggaatgcaatggaatcaacacgaatggaatggaacggaatggaatggaatggaatggaatggaatggaatggaaaggaatggaatgcaacggaatagaatggaatcaacccgaatgggttggaaggaaatggaatggaatgaaatggaatggaatgatatggaatcaaccggattgtaatgtaaatgaatggaatggaatggaatggaatggaatggaatgctatggaatcaacccgagtggaatggaatggaatggaatggagtgcaatggaatggaatggaatggaataaagaagagtggactgcaaaggaatgaaatggaatggaatgcaatggaatggaatggaatggaatggaatggaataaacccgaatggaatggaatggaatggaatggaatggaatggaatagaatggaagggaatggaatggaatggaatgaattggaataaacccgaatggaatggaatggaatggaatttaatggtgaatggaatcaactggaatggaatgaaatggaatggaaaggagtggaatggaatggaatgcattggaatcaacaagagtgaaatgaaatggaaaagaatggaatggaatggaatggagtggaatggaatagaatggaatcaacccgagtggagtgaaataaattggaatggaatggaatggaatcaacctgagtggaacggaatggaatggaatggaatggaacggaatggaatgcaatggaatcaactggaatggaatggaatggaatggaatggaatggaatggaatggaatggaacggaatcaacctgagtcaaatagaatggaatggaatggaatgggatggaatggaatggaaactactggaatggaatggaaacaaccagagtggaatggaatgcaatggaatggaatggagtggaatggaatggaatggaatggaatcaacacgagtggactgcaacggaatgaaatggaatggaatgcaatggaatggaatggaatggaatggaatggaacggaacggaatggaattgaatggaatggaatcaacccaagtggaaaggaatggaatggaatggaattggaatggaatggaatggaatggagtaaccggagaggaatgggatggaatggagtggaatggaatggaatagaatggaatggaatggaatggaatagaatgaaatggaaaggaacggattggaatcaaccccagttgaatggaatggaatggaatggaacggaatataatggaatggaaaggaatcatcctgagtggaatggaatggtatggaatgcaacagaatggaatggaacaaaacggaatgaaatggaatggaatagattgattgcgagtggaatggaatggaatggaatggattggaatggaatggaacggattggattggaatttaatggaatcaacacgaatgggatggaacgtaatggaatggaatggaatggaatggaatggaatggaatggaacggaatggaatcaacccgattggaatggaatggaatggaatggaatccacccgagtggaatggaatggaatggaatgcaatggaattgaacggaatataatggaattaaatggaatcatcccgagtggaatggaatggtatctaatgcaatttaatgaaatggaacagaatggaatggaatggaatagaaagaatagattgaatccaagtggaattgaatggaatggaatggattggaaaggaatggaatggattggaatggattggaatggaaaggaatggattcaacccgagtggaatgaatggaatggaatggaatggaatggaatcaacaccaatggaatggaacggaatggaatggaatggaatggaatggtattgaatgaaatggaaaggaacggaatagaatcaacccaagtggaatggaatggaatggaatggaagggaatcaacacgagtggaatggaatggaatggaatggaatggaatggaatggaatggaatggaatggaatggaatggaatcaacccgagtggagtagaatggaatggaatggaatcaaccccagtggaatggaatgcaatggaatgcaatagaatgcaatggaatggaatggaatggaattcaatggaatcaacccgagtggaacggaatggtatggaatgcaatggaatggagtggaatggaatggaatcaacgcgagttgaatggaatggaatggaatggaatgcaatagaatggaatggaatggaatggaatggaatggaattcaatggaatcaacccgagtggaatggaatggtatggaatgcaatggaatggagtggaacagaacggaatggaatggaatggaattgattgaatccgagtggaattgaatggaagggaatgcattggaaaggaatggaaaggattcaacccaagtggcatgtaatggattggaatggagtggaatggaatggaatcgaatgcaatggaatggaatggaacggaatggaatggaatcaa

SEQ ID NO: 467233 - DNA, 3282 bp, Homo sapiens
tggaatcaacccgagtggagtgaaataaattggaatggaatggaatggaatcaacctgagtggaacggaatggaatggaatggaatggaacggaatggaatgcaatggaatcaactggaatggaatggaatggaatggaacggaacggaatcaacctgagtcaaatagaatggaatggaatggaatggaatggaatggaaactactggaatggaatggaaacaatccgagtggaatggaatgcaatggaatggaatggagtggaatgcaatggaatggaatggaatggaatcaacaagagtggactacaacggaatgaaatggagtggaatgcaatggaatggaatggaatggaatggaatggaacggaatggaatggaattgaatggaatggaatcaacctaagtggaaaggaatggaatggaatggaatggaatggaatggaatggaatggaatggaatggaatagcatgcaatcaagtttggtggaatggtatggaatggaatggaatttaaccgagtggaaaaatgatatggaatcaaaccgagtggaatggtatgcaatggaacataatggaacggaatggaatggaataaaatggaatggaatggaatggaaacaacccgagtggaatggaatggatggaatggaatggaatgcagtggaatggaatggaatggaatggaatccaccccagttgaatggaatggaatggaatggaacggaatataatggaatggaatggaatcatcccgagtgtaatggaatggtatggaatgcatcagaatggaatggtacagaacggaatgaaaaggaatggaatagattgaatgcgagtggaatggaacggaatggaatggattggaatggaatggaacggattggaaatggaaatgaacggaatggaatcaacccgattggaatgaaatggaatggaatggaatccacccgagtggaatggaatggaatggaatgcaatggaagtgaacggaatataatggaattaaatggaatcatcccgagtggaatgggatgtggaattgaatttaatggaatggattggaaaggaatggtatggattggaatggatttgaatggaaagggttggattcaacccgagtggaatgtaatggattggaatggaatggaatggaatggaatggaatggaatggaatcaacacgaatggaatggaacggaatggaatggaatggaatggaatggtattgaatgaaatggaaaggaacggaatagaatcaacccaagtggaatggaatggaatggaatggaatggaatggaagggaatcaacacgagtggaatgcaatggaatggaatggaatggaatggaatggaatcaacccgaaatggaaaggaatggaatggaatggaattcaatggaatcaacccgagtggaaaggaatgatatggaatgcaatggaatggagtggaatggaatggaatcaacgcgagttgaatggaatggaatggaatggaacggaatataatggaatggaacggaatcatcccgagtggaaaggaatggtatggaatgcaattgaatggaatggaacagaacggaatgaaatgcaatggaatagattgaatgctagtggaattgaatggaatggaatggattggaatggaatggaatggattggagtggaatggaatagaatcaacacgaatgggatggaacggaatggaatggaatggaatggaatggaatggaatggaatgaaatggaatggaaaggaacggaatggaatcaacccgagtggaatggaattgaatggaatggaatccacccgagtggaatggaatggaatggaaggcaatggaattgaacggaatataatggaattaaatggaatcatcccgagtggaatggaatgtggaattgaatggaatggaatggattggaaaggaatggaatggattggaatggattggaatggaaaggaatggattcaacccgagtggaatgtaatggattggaatggaatggaatggaatggaatggaatggaatggaacggaatcaacacgaatggaatggaacggaatggaatggaatggaatggaatggaatggaatggaatggaatgaaatggaaaggaacggaatagaatcaacccaagtggaatggaatggaatggaatggaatggaatcaacacgagtggaatggaaaggaaaggaatgcaatggaatgcaatggaatggaatggaatggaaaggaatggaatggaatggaatggaatcaacccgagtggaaatggaatggaattgaatcaaccccagtggaatggaatggaatggaatgcaatagaatggaaaggaatggaatggaatggaattcaatggaatcaacccgagtggaaaggaatgatatggaatgcaatggaatggagtggaatggaatggaatcaacgcgagttgaatggaatggaatggaatggaacggaatataatggaatggaacggaatcatcccgagtggaatggaatggtatggaatgcaatagaatggaatggaacagaacggaatgaaatgcaatggaatagattgaatgctagtggaattgaatggaatggaatggattggaatggaatggaatggattggagtggaatggaatggaatcaacacgaatgggatggaacggaatggaatggaatggaatggaatggaatggaatggaatgaaatggaatggaaaggaacggaatggaatcaacccgagtggaatggaattgaatggaatggaatccacccgagtggaatggaatggaatggaaggcaatggaattgaacggaatataatggaattaaatggaatcatcccgagtggaatggaatggaatggaatggattggaatggattggaatggaaaggaatggattcaacccgagtggaatgtaatggattggaatggaatggaatggaatggaatggaatggaacggaatcaacacgaatggaatggaacggaatggaatggaatggaatggaatggaatggaatggaatgaaatggaaaggaacggaatagaatcaacccaagtggaatggaatggaatggaatggaatggaatcaacacgagtggaatggaaaggaaaggaatgcaatggaatgcaatggaatggaatggaatggaatggaatggaatggaatggaatggaatcaacccgagtgcagtagaattgaatggaatggaataaaccgcagtggaatggaatagaatggaatgcaatagaatggaatggaatggaatggaatggaattc

SEQ ID NO: 467234 - DNA, 706 bp, Homo sapiens
gctgttagagagttttgagcagagctgctgtgaagaacagaccatggtgggagaagggaaaggaaggaggcctttgagaacactgtggaagcaacccaggcaagaggtggagtggaggtttaataggcagaagaaaagagaaagagaaacagctctctctgtggaaacgaaggtctccaagcggaaaggaccagctggtggcaaatgtgccagattttataggcggagcttggatgtgagtcttcagagaagagtcaaggacagtgccatcacttttggcctgagttataagaatggtgagaccatttgctacaatgacaaggaggacagaggagtgggttttggggggaagtggaaaccaccagcaccagtggagatttcaacaaaagcgagcctgagtcctagcttctctgaagtaaagctgcttgaaaccctcatcctccgttcctctgaaacttgacagccacagctcatcaagcagttgaaaatcatttatatgttcagaaatggacaattcagtattgtaaattttgaaaattaacaaactgttaaaggatcactgtgcacttgaagttgtggcagaaagcaagcatttctgcgcttgtaagagcaatatgtatgcgtgtgtgtttcagatattactcatcaaatacaagcatatgtttataactctccatctatatgcaaatagtttgtggtgtggcgc

SEQ ID NO: 467235 - DNA, 637 bp, Homo sapiens
cgtggctgccacttccactcgccctgccacttcctccacagctggacattggcttgcactagcatggtacccattggccattggcttctaaacccttatggaaagagagctgctctcacatttggtgtctgctgatggcagcctcctcgcgtacttgggctgggtgaatatgggaagtactcatgcacacctgggctccacgagtggctgccacatgtcctgctggctgctggtggccttggcagctctcagaagctgcctgagctctcaggaatgggagccccctcatctcccatctccaaagtcaagcccacctgcacttgcaccagctggctcattgcgcccatcttgtcacacccagggaaaggagtggaggctccaaggagcagggagggcgcaagaggaatcttggtacaagatcgtgcttcctaccccagaacaaaggttacccatgccttgggggacagtggagaacagcggtctccagcctttttggcaccagggacagatttcgtggaagacaatgtttccacggaccagtgggggttgaaggctagtttcaggatgaaactgttccatttcagatcaccaggcactagttagattctcatgagtgcacaacctagatctgtcgcat

SEQ ID NO: 467236 - DNA, 727 bp, Homo sapiens
aaaccatcatctacaccattgaaggattatgcctcaactgccagtgccaccagagatccgccctgatgctcgaagctcctgacggtggcagcagatcctggtctctctctttccactcctcacaatgctggctaaatgaagtgactgctgcagctctgtccaagcacccagatccatggggcaggttcaaaggcagggccactccagacctctcaggaagctgtgttcttcctctcaagctcgaagcctcttcctcctggtatcccagtggaatgatggaaatgacacccagagtcctgcagggagtaggccacaatgacccttattctgagaaagacatgactggaggaatccagttctgcccttggaccaacagctatcatgtgagttttccagcctcttcagggtctgatggtctctgcagggcttcaccatttggcatctctgctacgctcactgatagtaacatttacaagaggaaagcaattctccactggaagaatcttgctgattataaacgttagtgtccaaaggattgacagattgaatagctgtcaggtctccagttgaaaatggcagatgacacattctcccccaacttctaactaaatatttataaagacacagaaatgatgaaaatatagaaaaaagatgaagacaatactgacagtcatcccactgtaaatattaggaatttcccttgaatataggtagatggatatggatc

SEQ ID NO: 467237 - DNA, 1321 bp, Homo sapiens
ggtagttgcaacttttctgcatggatgtcctggaatcatagacttttgcatttgaagagcctttcgtgatggtggctgagaacatcctaggacagcccaagcgctacaaagggttctccatagatgtcctggatgcactggccaaggctctgggctttaaatatgagatttaccaagcccctgatggcaggtacggtcaccagctccataacacctcctggaacgggatgatcggggagctcatcagcaagagagcagacttggccatctctgccatcaccatcaccccagagagggagagcgttgtggacttcagcaagcggtacatggactattcagtggggattctaattaagaagcccgaggagaaaatcagcatcttctccctctttgctccatttgatttcgctgtgtgggcctgcattgcagcagccatccctgtggttggtgtgctgatatttgtgttgaacaggatacaggctgtgagggctcagagtgctgcccagcccaggccgtcagcttctgccactctgcacagcgccatctggattgtctatggagccttcgtacagcaaggtggcgaatcttccgtgaactccatggccatgcgcatcgtgatgggcagctggtggctcttcacgctcattgtgtgctcctcctacacagccaaccttgctgccttcctcacagtgtccaggatggacaaccccataagtgtttgctggtgcatgtgctgtgccggggaagaaactgagtgcacatgttgggtgaattgcctgaggtaccccagcattggttcaactctggttgagcatccactctgcacagacactgcgctgagcatgtctggggagggcaggccatatactgtggtccttgcaaaagaccctccatcgggcagcttgctgtttaatatgggaagtgagagagatgcggaaatgccagcagaacaacctggagtgatgtgtcagaaagtgacagtgcatggagcattccaggttaagaggcagtgcatgtggggtaaacctgggtggggacccacagtgaactctggggaagcctcgggtcgtgggaaagaagagaagatgtggagactgtcagacaaaggataatgacctccagttccatccacattgctgcaaaagtgattttattattttttatggctgagtagtagttcctggtgtatatgtaccacattttctttatctggtcaaagataatgcccgtgttgatgggcatttagattggttccgtatctttgctattgtgagtagtactgtgataaacatgagcatgagtgcacatatctttttgatat

SEQ ID NO: 467238 - DNA, 489 bp, Homo sapiens
gagagctgctctttcaaattcttacaaaggttttggacgcgatggatggggagctggaaggtggcaatggagtgggaaggtagtcttcccttggagtcaggccacccagcggctggactcttctctgacaaaccccagccaaactccccgcagtgtctagacatccctcttcttctttctctgacacatcgttccaccgttactggtctgccggtctgccggtctgttcctgtgctcctctcaatgttcagttgcttgtatctgtgcctgctgaggtcttgggtttatatgggcacaggatggggggtgcatggcaggccagagtggtcttggaaaatgcaacatttgggcgtgaaaacaggagtgcctgtttcacttatgtccgtgggcacaggcctgagggtggagccctcaccagggaccccgcccttctctacccagcacttccctgcccccctcccgtatcagtaattttgagtaataagataa

SEQ ID NO: 467239 - DNA, 1026 bp, Homo sapiens
ataagcatccagggaagcagcagctgtcaaccccccctttaatccctgggatgatctttctaaaacacaacacaaggagagctacagcttttgccctgatgggagtaacagacgccaacccagacatgctgctcagccctgttattaatgaggctcacataagttttaagagcaaggccctaactctcttcaattctatgaaagctaacagaggtaaagaagctgcagaagaaaacttggaagctagcagaggctggttcatgaagttttgggaaagaagctttctctataacacaagagagcaagttgaggaagcaagtgctgatgtagaagctgcagcaagttatccagaagatttagctaagattactgatggaggtggctacatccaacagatttttgagatggagggtgaggaaggagaagaattgggcggcttttcaggtagagggaacggcaattataaagtcactggggcctggaagagttaatttaacacttattataacacacttattataataattttatgccatcgaggtatgcctgttcccagactgtttattcttgtaaataatatatcatgttcttataaaatagtctgaagttttgtaggcatggcaaaatctgactcacaattattttggtttgcagtagtgctctgaaaaccaaattcctctcagaagattgaaatttgaaatctgaaactgtgggggtattctcacccattcctaacagattcctaagatgttcaaaagtgtaaatctataaagctgtgtagctagaaattcagagactcagatttattgatattgattctatctcacaaggaaaggtaatgaaaatgtcattggaggtagctggttggtggagatctctccacccttaaccatgatgtctttcagagaatgaaagctggccaagtttgacagcttccattctgcatctcagagaactgtaataagatgacccatgaaatactggcttgatctttcacttgtgggaattcaaatatttgaagtaata

SEQ ID NO: 467240 - DNA, 993 bp, Homo sapiens
cctgaattgcttttgtaaaggatcaatttccacaaagtcacattgggagaatttgactgaataactggacacgaccacccatccatgttgacacatagaactaaccatcacggtgtccctgggagtagtcaggatttggctgatgctccaccctctccacctccacctccaaagggtaggaggacagcctcacgtttacatttctgcctgatcagatgttcatatactttgaacaagaagatgagtgacttcccacctacttctcctgtgtacttcagaccactaagtgcagcaatgactgtgccacagagctgcacccttgacaatgaggacccgagagagaaacagggtcaccctgcagctatgcatcagaaccactgggtgcttgctaaaatgcaggttacttggcccatccacactcctgaatcagaatatctgcatttgagcaagctcttcagggacctacgtgctcagtcttttgtagtcaagttccctggtccatttcctacctcctttgaaagtatcacatacagacatgtaaatcacatgaccttgctggttcttctattaagtggcagctcccagcttacatggtcctcattgctcccaatcccaagcatccactataacaagtcacaggaggactctggttctgctccagccacatggctgtccttggaccaatccctgtggacagggaagggacttctgggttatctcatcactaaggagcaggcaaggcagtgtgaccacctggcaggagaggaaggacattgcccaaaagcaagtgtcttagatagacaaccagcgacctccattgaattgacttgctctgaattgagccctgaatagccccataatacatgtattagtttatgcctttaaaatcactttctcatccctgtagcattggatctttctgcagttctggatcatgcaatgcactggttgttttttcactccatgttacagatgagaaaacagtagttcagc

SEQ ID NO: 467241 - DNA, 898 bp, Homo sapiens
ttatatcccgcgcctggcttagagggtcccacgcacacggagcctcgctcattgctagcacagcagtctgagatcaaactgcaaggtggcagcaaggctgggggaggggcgcccgccattgctgaggcttgagtaggtaaacaaagcagccggaaagctcgaactgggtggagcccacagcagctcaaggaggcctgcttgcctctgcagactccacctctgggggcagggcatagccgaacaaaaggcagcagaaacctctgcagacttaaatgtccctgtctgacagctttgaagagagtagtggttctcccagcatggagtttgagatctgagaacggacagactgcctcctcaagtgggttcctgacccctgagtagcctatctgggaggcacacctcagtaggggcagactgacacctcacacggccaggtactcctctgagatgaaacctccagtggaaagatcagacagcaacatttgctgttcaccaatattcgctgttctgcagcctctactgctgatacacaggcaagcaggatctggagtggacctccagcaaactccaacagacctgcagctgagggtcctgactgttagaaggaaaactaacaaacagaaaggacatccacaccaaaaccccatctgtacatcaccatcatcaaagaccaaagatgtatggctaactagaataaccaatgcagagaagtccttaaaggacctgatggagctgaaaaccatggcacgagaactacgtgatgaatgcacaagcttcagtagccaatttgatcaactggaagaaagggtatcagtgattgaagatcaaatgaatgaaatgaagcgagaagtttagagaaaaaagaataaaaagaaatgaacaaaccctccaagaaata

SEQ ID NO: 467242 - DNA, 553 bp, Homo sapiens
gccagtacctcatcactcaaagttattaagcagctgcttttggaggcattcagggccacatccgagccagggagagggctcctcaggtttgatgagatccggagtatgcatgtttgggaagaatgctcagtgggatgccatggccgtcctgtctccttgtgttgagggcacaggagaaagggtctgtggttccagtgtcaggggccacagcgtcacttcagagatgaggcaactgaggcctgacaagtcaagcaccttgcccaaggtcacgtggctgccactgtttgtggaggccttcagtgccccaggtgctatgctggaccctaacttattactgaacagaatattcacaatggccttggaagaagcttatagggatcctctggggctttgggcacttgactttgaattagaagagagccagggggagagtggcatcactgtcccttgtcatggacttgctgtttctgctggtgtgatgtcaatatcagccattcctttggattcccaactttgggctgcacctgttgccacatttggcatatgaactgtg

SEQ ID NO: 467243 - DNA, 570 bp, Homo sapiens
acccgattggctaacagctgaaaactttcttaaataggatccctggtacattaggatggtactctaatacaaaatggaatctgaaaagggccagaggagaggctcaggtaaacttctagggaagttcttcatcatcatcatcatcatcatcatcatcatcattatcatcatcatcatcaacaagagctccctcttctctccccaacctcctcctgctactcaaaggtgcacactacttagatctaagggtgcagaaaataatgaaatactagtcaacaaccagcatttgccggatgctagctctctgttggatcctgttggtgggcagttggatgagaggaggaaacaagccacatcttgcaatcacacagacacctctgctgcagcaactctggggtgggaaccatggcattttgaaggctgcattcccttgcctgggaagcccttgatatggggagccttgggccctcctaggtgcttagcattggctcaagagcagttgatagtggtcctagaaaagataccaatatgcatctacctaggaaatttgcagcatgagttaaattaagt

SEQ ID NO: 467244 - DNA, 508 bp, Homo sapiens
ccaggtggtgccaatgctacgggtcagcagcccacccttggagggaagaaatgaatggaatcttaaagaggtcaagtgtctgcagaatgctccacagctctttaataacagaattgagatgcaaaactgggcatttcatgcttctgtccctcttttccccctcagcagtaaccatggagatatgcatagtacaatgcattgcagaatcatgagctggaagcagcctggattcctgagtgactgtgtggaggagagatgtaccacagagtcattcaacccagatggcatgagaccttacccggagctcatcgacacctcagacccattttcaagtgctccagacctgattaaacccaaagggcagtttgccacgtgcttcctctcccaccttaattatttagattgtgtagcatttgcgtaaaatctaatccagatgtttctgattcatttaagtttaaatcaccagaaaatgctcttaagttgctatttgatgttgaagaggttcttc

SEQ ID NO: 467245 - DNA, 796 bp, Homo sapiens
gtctgaatttcagctgttctccccttctttgctgcatgccttgtgaagtatgtctttagcagcactgtgaaaacgatgagtacagtaaattggtaccagaagcagggtgctacagaaaagatacctgaaaatgtggaagtgactttggaactgggaacaggcagagaagagggccaccatcctccaccccagaatgggagatccactgacagcttgcactgtgcacctggaaaagctgcagacacccaatgccagcctgtgaaagcagccaggaggaaggctatgccctgcaaagtgacaggggcagagccacccaagaccataggaacccacctcttgcatcagtgtgacctggatggcaggaccttaccacagaccaacattgctgggcctgaccccatttgcctctgtgtgcaagggagccagtcactgcctgacccagccatgctgcatcatgtggccccatccctggctgaggctgatcaacccagagaggtggcccacatgacccaaggttgtgtaagtctgcactgcccatcttgggaggagacgttcttgctgactttaaagaagcaagcagccctgttgggaaggcccatgggacaagtagctgagggcggccaacagccagcaagaactgaggttctctgtccagcagcctgcaaggaaccagttccttctaacaagcacacaagctgggaaggagacccttccccagccaaacctcagaagagaccagtcacagatgacactttgactgcagctttgtgagaccctacagcacatggcatggtta

SEQ ID NO: 467246 - DNA, 870 bp, Homo sapiens
ttgctccaaccctgatttttcatgcagtggcagtcgccatgtggcatttgtccccacttcccctcctgcagcagctccacttactcacatctgggtccttacagcctcatgaggtgcctgttgtggccactcccatcatcagagccccaggggccacctgtatgacctcagtgctctccaagtcttctgaacaagctgatgtcttcaaaggagatactcagtggataaaaaacatgagatctctgccatttagtcttggagataaccacatgcctatgcaagaaatgatagaaatttcatctatcagatttaagactgttttccgtctatttggaatttccattaagccatatattgaaggtctctcttctccacccactgactgggcctacacaggcagccagtggccctggactgcctacaacacagctgtaatgcagcagcaggcccctcctgttgtagattcagcccagagaagccctctggcagcttgttggccagacatcctttggtagaaatgtggcacttcaatttatcctttcaaatgggaaatggaaatgcagttatgcaagtttttagattattttttgaccaggaaaaaaagcagggaagttcctcaaggaggcattgccaaccaatctatcatcggatatggatggctcccctgaaatgaccttcaaagtcactgctagacctttgaccttgagcctttcctctgtctccttttgtggccacatgtgacacccacataaaataatactacaaaatatgagaatactaacattacatactttgtggggttattgtgagaattaaataaactaacacatgtaaaagatgtttacatcaatgcctggtgtatagtaaatc

SEQ ID NO: 467247 - DNA, 531 bp, Homo sapiens
ctgacagctgaaatgtataaggggtttggacagcaagatagataactcggacgatgactgctccactccagccacagaccacaggaacgaacactgtggccaacacccacggtcaagactttcactattgtacagcagtaatgagaaataagttccctctagagtgtcaacagaggccaaatggaaaacctgaacgtctacctcccctagcagtaatgaggcagtgcctcccccttccccatcagggtgaggtcacagcttccacccacaagtggacctctaccaccctcattgccgggaaggtgctttgcactcagagcctggctggcctctacaaaggcctggtgctactctccttagagatattcccttctccagcatctacttcccaccatttgccaactttaaccacccagggttcaatgagcttactggaaaggcatcctctactcattctttcaggtcaggctgtgcagcaggttccatagtttgcagtcacggtgacacttctggacattctgaaaacttgag

SEQ ID NO: 467248 - DNA, 912 bp, Homo sapiens
aggggcccagacttgggagctcctgaaccagggctgtgactcactctttggggccctgtggttcatggtatctccaaccttcagggcatcactgtgttcccttgggccagccatggaagcagtggccggaccccatgctctctcatacaccccttgccattccacacctgacttgcccttggcagagagtaaggccctaactctcttcaattatgtgaaaactgagagaagtaaggaagctatagaggaaaagtttgaagctagcagagattggttcacaaggtgtaaggaaagaagccatctccgtaatataaaagtacaaggcaaagcaaaaggtgctgttgaagaagctacagtaagttacccagaagatctggctgagatccctgaggaaggtggctacactcgacaacatattttcaatgtagatgaaacagccttcttttggaagaagatgccatctaggtttttcatagctagagaagagaaatcaatggtggcttcaaagcttcaaatgacaagctaactgtcttgttaagagataatgcagctggtaactttaagttgaaaccaatgctcatttgccattctgaaaatcctagggcccttagaaattatgttaaatctacttttcctgtgttctataaatagaacaagaaaacatgatgacagcacatctgtttacagcatgatttattggatattttaagctctctgttgaggcctactgcccagaaaaaaagattcccttcaaaatatgactgctcatgtacaacgtatctggtcacccaagcactctgacagaaatgtataaagagattaatgttgttttcatgactgttaatacaacatccattctgcagcccatggatcgaggagtaatttgaatatttgagtcttattattcaataa

SEQ ID NO: 467249 - DNA, 839 bp, Homo sapiens
ctgctttaggctggccatcatgtctctgtgtggcagccgccgccgccctaatacttttagaggccctcaaaatcacaaactatgctcaactcactctctacagcctaatcgccacacaccagcaaaggcaggctatgctatagtatcttccacaactatcattgaggctaccactctacccacctccactacctctcagcaagccgaattcattgccttaactcgagccctcactcttgcaaaggaattacgtgtcaatatttatactgattctaaatatgacttccatatcctgcaccaccatgctgttatatgggctgaaagaggtttcctcactatgaaagggtcctccatcattaatgcttctttaataaaagctcttctcaaggccgctttacttccaaaggaagctgaagtcatacactgcaagagccaccaaaaggcatcagatcccatcactcagggcaatgcttatgctgataaggtagctaaagaagcagctagcattccaacttctgtccctcacagccagtttttctccttctcattggtcactcccacctactctcccactgaaacttccacctatcaatctcttcccacacaaggcaaatggttcttggaccaagaaaaatatctccttccagcctcacaggcccactctattctattgtcatttcataacctcttccacgtaggttacaagccgctagccggcctcttagaacctctcatttcctttcccatcatggaaatctatccttaaggaaatcacttctcagtgttccatctgctattctactactcctcagggattgttcaggccccttcccttccct

SEQ ID NO: 467250 - DNA, 1921 bp, Homo sapiens
cggcgtgtcccttccgtccggcccgcgccggcggcggggaggcggcgcgcggcccgcagcccgcccatggaggctttcccctgggcgccccgctcgccccgccgcggccgcgcccccccgcccatggcgctcgtgcccagcgcccgctacgtgagcgccccgggcccggcgcacccgcagcccttcagctcctggaacgactacctggggctcgccacgctcatcaccaaagcggtggacggcgagccgcgcttcggctgcgcccgcggtgggaacggcggcggcggctccccgccctcctcctcctcgtcgtcctgctgctccccccacacgggggccgggcctggggcgctggggccggcgctggggccgcccgactacgacgaggacgacgacgacgacagcgacgagccggggtcccggggccgctacctggggagcgcgctggaattgcgcgcgctggagctgtgcgcgggccccgccgaggccgggctgctggaggagcgcttcgccgagctgagcccgttcgcgggtcgtgccgccgccgtgctgctgggctgcgcgcccgccgccgccgccgccgccaccaccaccagcgaggcgacgccgcgcgaggagcgggccccggcgtgggcggccgagccccggctgcacgcggcctccggggcggcggccgcccggctgctgaagcccgagctgcaggtgtgcgtgttctgccggaacaacaaggaggcgatggcgctctacaccacccatatcctcaagggccccgacgggcgagtgctgtgtcccgtgctgcgccgctacacgtgtcccctgtgcggcgccagcggcgacaacgcgcacaccatcaagtactgcccgctctccaaaggtcgccgccgcccctcgcaccgctaggtctgcgcaccatctcgcccccgccgtggggaggcgtgcggctcagcggtcggctcgacatgggacgtcgtcctggtggtttttgaaaagcagccgaccgtgtggagtacttccgtgctgaacgattgggactagacgctgaaatccccatttgtcttcagtttctagtttgcacatccagaacggcgaaggctgggtgtgtattccactaactgaaatatggcaacttagaggcgctgtttatttactgtatacgtcgacctattttagatgcgcatcagtatgaaattgtctcaatcttggatgtttcattttatgaatggaggcactttactaggtctagaatatttttttaaaagcctctgaactgagcttaaaactggcgattttatgaaatgtcggcaaaatgactattttattgtttgaagcgagttaatattctcagttgtctttaaaaatcagttactctaattccaggtgaagcaagccgctggtagcatcacccttatgagaagtgaaggttttgtaaactttccagtattaatttgggcgggtattccccgcttgtggcttgtttctgtcctagctggaggtgtaaaatgcacaatgtgtagcaggtagaatacagctccttatcgttctatgtaccaggtattttattactgaactagcaactagccttttccacctttaaaagttgtgccaagtcataatcatattgtgtataacttggaaatggtgctgtttaaaaaaattgtgtatttatacagtaacagtatgaattcattaatctcacctgtaactttcctacttggcattttctctacacactcaccctcttccagttctttaaaaacgtttatgatattaagatcaaagggaggaagggaagacagcagtattaattcaccctagattactcaatttcagggttcctagtggaggaaagcccattccagctgttgcctgtcaaacaaatagaagatggatctctagctctgagctattcgtgtattaactc

SEQ ID NO: 467251 - DNA, 1120 bp, Homo sapiens
cattggctggctcctggagctgtggcctctatcctgcaaggtggctggtgtttgttgacaatgcaaactgagccacctgcggctcccaccctggacaggactggggtctgtgcaaaaggacattagaccactgctgggtgccccaaacaattggttgcaaggtgctctttataaatctaccggaattcaaagctcagttcattcatcggttaaatgggtggttgtaccagatcgtggctacgaaacttcccagccctgaccgtccagaggactccaaaaatgctggaagggactggagaatgtgccaactcaggggctttccagccttgttttgcagagtggaataatgaggcccacctccccctgcctgaaccaccatcgtcacacaggccatccctctacagtggcacttggaaggcttcacgaatgacaaacgctccacctgcgggtgtggctggccacgatgatgggaaacgcgttagtaatgggccaccatggctgacccccgacctcatcgaccgccgcccctctccccagccaggttctgctgtccaggcagctgcagaggagtttaaagggcagccatggtccctggtcagccagcctgccattaataacgtttgcatctgtgacaatgacaaacctgcagtacttgaggagagtttattaaggtcagtctataaataagaattaaaaattttaaaaaatcggttgacacagatgaacagacagatgaagaaagtgattaggtgaaacaataaatataaaagtggataaggagctcccagagctggcctggaaatcagagcccagcccagtcttcctccgacctcgcctgaagtttagatttcatgaagacactcagaacttgtaggttttgtgaatctaggccctggctaatattttgtcatttaatgcctgttctctcagctaataaaaagaattgcagccatttctctatgtcaagcccataactgagagctggtaaaatttaaatgtctcatctgtcctccagcttgcatgcagatgcccttccccgggagcttggctccaggcctgtgggctagtgacagtcccccggcttgcccagctggctcttgctgtctcgggatggactgcc

SEQ ID NO: 467252 - DNA, 593 bp, Homo sapiens
ttgctcactcatccattcactcattcatgcgtcactctctcattcattcattcactcactcattcatcaactcattcactcactcattcacccgttcctacatctctcagttttcagggcctttccaggccagtgttcctggggtctccacgtttatcatcagattgggtgcaacaaatgggaacgtcgaggcgaacacccatgatctgggctgctcagactctcagatagcaaggccgaagttcatgatattctgctgcgtgattggctgtcacaatggcaatgatgcattacacaatgggagctcaggggaggaaactgagatcggagaaagcataaagtgcctggaaccagcaggtgtcagagccccacctggatccctggcctgccattctgcatgagcttcctgtgctgctgtaacagaagaccaggaatgtggtggcttaaaacaggattattctctcaccattaccaaggccagaagtttgaaatgagtatcaaatcaaggtgtgggtaaggccttgttccctcggagactctggggagaagtcttccttgccgctcccagcttctcgtagctgctggctttcctc

SEQ ID NO: 467253 - DNA, 784 bp, Homo sapiens
ttatttttcaatttacagtaatggagcacctgcccggcactgggtttgggttgggagccagaccccagcccctccctgatgggcttgtagagcccagggctctatctctgtggcctgtgttcctgcttcctaacgactctacccccaagcacataaagtcaaattgcagggcatggagaatcttcctcactgtttcctcccagggaaagctgacgtctctgctcccctcttcctttgacctgactgcctttctacccttctcttggcaagtggctgcccatcccccagtgcccgacccaaacttggcctcctctgtgaagcttttcatagcagcctcagcagaaggaaccatggcctggtcctccaggccctctgtttgccccatgattacggggcttgccttgctgcccccagcacttaattttgtgtctgtctgtctcatttgtttacaaggtcttcaagagcagctgctttgtagccttctgggctttgtaacctttcttacctttgtgactttctgggctgagtgtttcctggaggtgacttgctgagaaatatcagcccactcattgtctgaaagctcaccactagaaatggatccctgaggataagctttgacgccttcatagaatagaacctgatagtcgtaccttagcgtcatcttgtccagcttctcaactagtgaggaaatccctgacccatggcatctggcctctgcctaaacacttccagggatgaggatctcattaccttccaagacagcccgtccgctgaggagttccaa

SEQ ID NO: 467254 - DNA, 673 bp, Homo sapiens
agctctgtctccccagtagccctccataggtcttgttggtgcccagtatgaaatctgtttctgccactcatgaaatcacagaaatctttggacagatgttatttggccccatgcctgctgtgcacaggtaaaatagaacttgaggaccaaggtaatgaagatcctcctcactcaggtctgggcacaaacaccacaacctctgggaagcctttcctgattctaggcaaatgccctcaatggattggaggatgcccacccacattgaggagggtcatctcctttaccgagtcctccagtgcaaatgcagatctcacccagaaacaatgtttagccaagtatctgggaaccccatattcagtcaagttaacacataaacttaaccgtaacagcaaagggaagaaaggtccaatcccagcagagggtcaagtcaagctggaaaaactaagcaaaggccttgaatgccaggttaggcgattcgacttgactctttaggggactcaccaaagggttttatgcaggaaagtaatgtaacatacaggtctttgtttagaaaaggtagagttttccttttggcctgttcatttaggatgttgtaaaaatgggagaaatcagaggagggaagaccaattaggaattgtccaggctagaggtgattttcaaaaacccttcttct

SEQ ID NO: 467255 - DNA, 836 bp, Homo sapiens
gcccagtcccatcgaccacccaagggctgaggagtggggcgcatggcacgggactggcaggcagctccacctgcagcccctttgcgggatccactgggtgaagccagctgcgctcctgagtctggtggggacctcaaggtttgtaaacacaccaatcagcaccctgtgtctagctcagggtttgtgaatgcaccaatcgacactctgtatctagctactctggtggggacttggagaacctttgtgtccacactctgtatctacctaatctggtggggaggtggagaacctttcttcactcctgaagccagcgagaccacgagcccaccaggaggaacgaacaactccagacgcgccgccttaagagctgtaacactcgccgcgaaggtctgcagcttcactcctgagccggcgagaccacgaacccaccagaaggaagaaactccgaacacatctgaacatcagaaggaacaaactccggacacgccgcctttaagaactgtgacactcaccgagagggtccgcggcttcattcttgaacagccagaaccacatgacacgcagagcagtccggagtctgcgactaaccaggtagatgacaccaatgggcttcagtggcacctaaagatctaggagttataggagcctggtgctttcccacaaagtgtcccatttaatcttcctaatcacccctcaggctaggcctcattaccttccacagttcacagatgaggagaccaaggctcagagaaggcctcggtaagaagtgcctttcaccttccaccatgattgtgaggtctccccagccatgtggaactgtgagtccattaaacctc

SEQ ID NO: 467256 - DNA, 873 bp, Homo sapiens
gaggagacaatggatcgtttcctctctgtaattttctgcatggaggtctccctgttgtcccctggccacatcctcctgacctcggaggccaccctgtaccctcgccacgctgcgcctgctccttacttgcacaatgagctgctgttctgggggcttttcctagaggagcacctgatcaagtggaaagaattccggctggtggaaactgcccttggggccccctatctgagcaggatcctaagggctttcgtgggctgccagagctggctctcagaacagcctcaatgttcagacagcacaagggtggttaagagcatctctggcctctaccaactagatgccagtagcacacccctagctgcagtcttgacaaccaaaaatgtccccagacattaccaaatgtcctctggggagcaaaatacctcctgtttgaaaattattggtctagacatctgtattttgtttgcttggggctaaaaacatagtacctttttaaaacatgaacaccaaacaatttgttttactctaatagccctgataattctgtagcagcattctcgttgtaaataaaaaataaaaatgaaaattcaaaattcagacttgaagactagaaaaaagaccatatgtgtgtgtgcatgtgtatgttttgacaaaacctagaacttttccaatggaaatctcaggaaagggcatggactgggagtcggaagacctggatccagtcctaggctgctgcttcttgctggccagtgtcttggtgagtcaagtcccttgagcagtgagattttttgtcattaatgtgaggaagatgttatagtgattcatctctgagggtcctggaaggactgacattcttaataattgaacagaagc

SEQ ID NO: 467257 - DNA, 633 bp, Homo sapiens
ggaatggtgagtggatgtgcagatggatgggtaaagatggatggatggatggatgggttggtgggtggatgggtggatatgtggaaggagagagaagcatatgaaggacgaaggaatagagaagacacaggctttgaactcatgaaccgggttttcattgttgggttccttacttcccagcttggtattgccggcttggtattgccagctgtgatatactggataaagaaaatgtggcacatgtacaccacggaatactatgcagccataaagaatgagttcatgtcctttacaggaacatggatgaagctggaaaccatcattctcagcaaactaacacaggaacagaaaaccaaatgccacatgttctcactcataattctggatgctgggaagttggaagatgaaggtcccagcagactcggtgtcagtcgagggcctgttcctcatagatggaagttggaagatgaaggtcccagcagacttgttgtcggtcgagggcctgttcctcatagatggaaccttctacctgtcttcacatggtgcaagggatggacaagcctccttgcgcctctttataagggcactgatcccactgatgaagcttctgccctcataacctgatcacctcct

SEQ ID NO: 467258 - DNA, 2714 bp, Homo sapiens
cattggcttggggccatgactcagagccatctcgggacaccagccctgacacctgagtcagtctgactctgtggctgtgggactgcccctgtagccatccccaaacccttaggaagtctggagggtgattgggctgttctgacacttgggaccagctctccagcctgccacctaagtcccaggcatggctggaggcccaaggctcctgcacgtgcttcttctctttggtatcacaagagcaaggggtgtcaaacctgatgatgccaccttgacaaccatattgacttggtccaagcacacagactgtttgaggagtgtaatagaatgcagaaatatgcccagaaacgttgactttaagggcacattgtccactgttgacattgctgtcactctctactggcgagtccctatcactgatcctgtactgctgctgacacgaaggtttaatggacccgttgggattggaagaccaagtggtttgattcagtcatttgtgagtttgtccctgctcctggagcctctcactggagacatggaaggcagccctgtggagcagaaagagccctggactgctccttggaacctggcctctcctctctgtgtcactgacttactctgggggtgaccttgacctggtcccttccctcggcccatttgcgaaacagggaagcctagttaaaagatcactcaggtttaggggtgccagacctagcaaataaaaacacaggatgccaagtccaatctgaatttccaatgaacaatgaataattgaatattattcagatgaacaatgaatactttttctagcataaattatgctccttgcaacatcagagacacactttaaatattattatttatccaaaattcaaatttaactgagcatactatatttcactctcctcatgttgcttttacctcaagtagtttctgaatccatactttgagatacatatttttggttttgctatccagtggcttttggtagccacaagcaagggataagtgtgaaatgtctagataattctgaaaatgtatcttccctgacttgtactcaagcccaaacccatgtctttggaaacattgcttggtgaccgtgtcttcagtgcatggtacctggtagatgctccatgagtactggctgaatgaatgaatggatggcacatttcaacctttgtatgaccttcgtgtaatacatgcttccatttaacagagctaccaggtcttcctgacacatgccccatcctttccagagcactctgccttcgttcaagatagttcctgccctacgagccaactttcgtcagacaggggcagcattgcacagtgggtagaatcatgagcactggagccaaatggcttgaggttgattcctgcttctaccattgtgtccttttggagaatttcttttaactctctgtgcttctgttttctcatctatgaaaaggggtaaacaataaaacctactaaggcagttgtgagatgagataatgcatagatgtcattattatttagaattataaaggttcttatgagattccatctgcaaatcctaatcccaaccattatacaagggccacctcctccatgaagcctcaatggtgatcctctgccctactccacaggtaaaaacaatctctccccttagtgctttggatacaaatgaactgtggctatttctctgctgtcctacagattgcacgttatttgtgggaaggatcacctgggtgtttactcattgtctggtgcatagaggaggcccaaggcatctgtgttgattgagtgaagtaataaatcaattaaaacacacatttgctataggaaagaattcccagacaagttagagtatggcatcatgatcctaggaggtgtttttatctgatgctctcaccaactagctgagagatttgtgcaaggaaagagggagacccccaatagaatcagactgcagatggtacctctggggtctgtcatgaagggacacagcttggtaggggtgaaagtaggggatcgagtccaatagatgcaggtgaaaacccagttctattcttttacagctgaagacctccagaaccttccttttaggaatagatgggggagggcttgggtgtggaagagagatgaacaactacaagggcttagcacaaagggtgctgatatggtttggctgtgtccccacccaaatctcatcttgaaatgtaactctcacaattcccacgtgctgtgggaagaacctggtggaaagtgattgaataatgggggtgggtctttcctgcgctgttctcatgatagtgaatgagtctcacaagatctgatggttttaaaaatgggagattccctgcacaagctctctttgcctgctgccatctgtgtaatacgcgacctgctcctccttgacttctgccatgattatgaggcctccctagccatgtggaactgttaagtccattaaacatctttttcttctcaatctcgggtatgtctttatcagcagtgtgaaaacagactaatccaggtgctctacaaatgtttaagtgtctagcatcagcaaggcctctgtgacgctgggcctgggggagctccacaaaaggctcctgttcatgtctgaccacagaatagaaggtgggcctgcagctgagagtcctgattccattaggcaaggacgtcattatccctaaggttaaggaaaacatgaagtcctggcccatgtcctg

SEQ ID NO: 467259 - DNA, 578 bp, Homo sapiens
gcagtgaatcttcctagtgctaggagaccattttcacaacctaatcaatgatcccattattgacttggtgttcccagaggacaggtttaaaactttatcgagcactgtatgtgggggcaattatagggataatggaaaatcatcgacaaatggaggcttctgcattgcaaattaacatctgctccaaaggcacagatctctgcatgattgatgctggaaaggccaagctttcacaggataccctcaattttactcaggcccacaaagcccttggggttgtgcctcgattttactctcgattttactcaggcccacaaagccagtggggctggctgcctcagtggccgcagttcctcaccgatttcagtgcccacgcttactgctctgtgacagaagtttcccacattgaagaggtggagcctgtttcctacctgagaatctggactggcctcaggacttgctttgaccaatagccagtggcaggtgtgagggtgtactcgttctgagcctagctctcaagaggatgttcatagtctgcctgctctctcttgcaccactggtgtgctgcagtagccttc

SEQ ID NO: 467260 - DNA, 843 bp, Homo sapiens
agtgcatcgtcatcaatgcttagagtttttgattcaccttgtttttcagttgatgaaagttgtgaatgaaatgtgtcccaatatcaccagaatttacaacattggaaaaagccaccagggcctgaagctgtatgctgtggagatctcagatcaccctggggagcatgaagtcggtgagcccgagttccactacatcgcgggggcccacggcaatgaggtgctgggccgggagctgctgctgctgctggtgcagttcgtgtgtcaggagtacttggcccggaatgcgcgcatcgtccacctggtggaggagacgcggattcacgtcctcccctccctcaaccccgatggctacgagaaggcctacgaaggggtttatgaaaagtgcaaagcaggcattgagaatgatggtggccttgagaggtggacatgccgaccaactggaggacgtgaagatgaacatcaatattgctatatacacaatgataatggaatccaatagtaacactttatgttggctgaggacttaatcatggcatgtgttagccttgattattacctttaatcttctcatcagtcttctgaggatagttgttttattattctgatacgttctttacattttgtgttccagttatgatatagaatgtatataggttataggtgtgcatagaatatgcatatgtacagaattatgtataaatagaacatatagttagtattatgttgtgttgtgtattgacagtgatatatctcaatacctgggaataaaatggaaaattatattaaaacaagggtacctatcaaatgcaagctttacagtatagaaatgtggtcacatttatt

SEQ ID NO: 467261 - DNA, 1718 bp, Homo sapiens
gagggcagcaactgcatctttgaagctccctggattcatcctgtggtcacttccccagtgccagaatgcataattggcatagacatacttagaagctggcagaacccccacattggctccctggctggtaggaagacagatggatcttggggaatgacagtggattatcataagcttaaccaagtggtgactccaattgcagctgctgtaccagatgtggtttcattccttgagcaaattaacacatctcctggcaactggtatgcagccattgacttggcaaatgcctttttctccattcctgtccataaggcccaccagaagcaatttgtcttcagctggcaaggccagcaatatacctttactgtcctacatcaggggtatattaactctccggctttgtatcataatcttatttggagagatcttgatcgcttttcacttccacaagatatcacattgatccattacattgatgacatgacactgattggatccagtgagcaagacgtagcaaacacactggacttattgtcaaaaactgtgaagatatttgtatcctatgtgagtgttcaccaacaggtgacctcagcagaggaggattttaataatcaagtggataggatgacccattctgtggacatcactcagcatctttccccagccacccctgtaatcgcccaatgggcccgtgaacaaagtagccatgggggcagggatggaggttacgcatgggctcagcaacatgtactcccactcaccaaggctgacctggctatggccactgctgagtacccaatttgccagcagcagagaccaacactaagccctcaatatggcaccattcctcagggtgatcagccagctaccaggcagcaggttgattatattggacctctttcatcatggaaagggcagaggttcgtcctcactggagtacatgcttattgtggatatgggtttgcctatcctgcacgcaatgcttctgccaagactaccatctgtggactcacggaatgccttatccactgtcacggtattctgcacagcattgcctctgaccaaggcactcactttacagctaaagaagtgtggcagtgggctcctgctcatggaattcactggtcttaccatgttccccatcatcctgaagcagttggattgatagaatggtggaatggccttttgaagtcacagttacaacgccaactcagtgacaatactttgcagggctggggcaaagttctccagaaggccatgtatgctctgaatcagcctccaatatatggtactgtttctcccatagccaggattcacaggtccaggaatcaaggggtggaagtggaagtggcaccactcaccatcacccctagtgatccactagcaaaattttcgcttcctgttcccacgacattacgttctgctggcctagaggtcttagctccagagggaggaatgctgccaccaggagacacaacaattccattaaactggaagttaaaattgccacctagatgccacctacctttaagtcaacaggctaagaagggagttacagtgttggctggggtgattgacccagactatcaagatgaaatcagtctaccattccacaaaggaaataagggagagtatgcatggactacgggagatccattaggttgcctcttaactgtgtattactgtgccctgtgattagggtcaatgggaagctacaa

SEQ ID NO: 467262 - DNA, 1364 bp, Homo sapiens
ttgtcaggggaagtggcactcagacgactccgtttgcaggatcttgagtgggaaggcttgggaatgagttcacggtgcctcccctgagtcgttcggtccagaacggaccccaaaaacctggaccctggagaagggaagcgcctaaagctgaatgtcagcggctgccgggccaccagtttgtgtgttaatagagctgctgcccggcctctcctgggctttggctgggagcccgaggccagaggagcaattctgctcggcagcggaggtggcccggcagagggaggagaagcaggagcttggcttgggctgctgctgtcttccactgagacctggcagccaccttgtcggtcatgactgggccacctggctctgctctcttggctggagatctgagcagggtgaggaggaggacccagagcccactgtgcctccttggcctgaagacgagcgccctggaggttctacctggcatccaagtcactcagtgcagctctgttcttggtggccccctgctcaatgccacccatgctcgcagcatgctccttgggctctgcacctgcggtaataaccccgcagtagggggaagctgggaggagcccaagtgctttgcaactctgctaccagttgtctgtttggccttgggccagatgctgcccaccctggcctgtttcaccatctgtgaagacccttctctgtgggacttctggaaagcctctctgagcctcatttacttcctcctgaaagttggagcattggcgacgcataatacccagactaacatgaaggcaggtacacttgaatacctccaggaactctaccagtccaagtccagcccagagaggggcaccaaaagggacaaggcaggcccagggcacgactggaaaatcttgaaagactttatcaaacaccctgctgaaacccagaaattctggatgtatagcaatcttctgatttatgtgtccagtgaccttaacaaaaatggggactgagtgggtttggcatgacttcctcctggtgcccacatgccctttggtcgttgttcttgaactaccagcttagtgatcagttctacagttttactcagaactagcataaaattaacttgcctgacatttctggaatctatctttctcttttttggaaaactgggacattcattgacctccttttgccccttttgttttccatgttttttcaagcattgttgtttcaggttctgcaaacatgtctgctagttcttcccaaagcttcaaagatagcttattcatactaagaagcaaacttgtttaaagcagctagctgtctggcaaacaaaaagaaaaaaaaacattgtgtttggctccacaaacaactttaaacacatt

SEQ ID NO: 467263 - DNA, 1267 bp, Homo sapiens
atttggttttctgttcccacattagtttgctaaggacaatggcctccagctccacccatgctcctgaaaaggacatgatcccattcttttttatggctgcatagtattccatggtgtatgtgtaccacgttttctttacacagtctaccattgatggacgtttaggttgattccatgtctttgctattgtgaatactgcagcaataaacatgcacgtacatgtgtttttatgacagactgatttattttcctttggatatatacccagtattgctggctaaaatggtatgtctgtttttaggtctttgacaaattgccacactgttttccacaatggttgaactaatttacattcccacgaagagtgtaaaagcattcctctttctccataacctcaccagcatctgttattttttgactttttaataacagccattctgactggtatgagacagtatctcattgtggttttggtttgcattctgtaatgatcagtgatgttgaacttttgatgatcccaacatccagatgaaaatgcaaaaaattgacaccttgatttgagccttgtgaggttaccttccaaggtatttaaaattcctaggtattttattattttcatatgcttcgtggctgcatacatgtttcctttagaaaagtgtatgttcatgtcctttacccactttttaatgcggttgcttgttttcatgtaaatatttttctctgtccctttattttgagcctatggctgtcattacatgtgagatggatgtcttgaagacagcatgccaatgggtcttggttctttatccagcttaccactctgtgccttttaactgggggcatttagcccatttacattcaaagttaatattgatatatgtggatttgatcctggtgctagcaggtgctggggtgcctgacaccatgtgcgcattcgccacagtggtggaggcaatgcagctggcagggaaggggggcccctgctggctggtgaccatcacactggtggttgtgttgacatggggagaagagcactggcagatgcagctcagagccttcccgacccttctgttcccatctctgctcttgcttgaagctgctgagaaagcactgctggcctctcggagggctctcctcattccatgaagatgaggagctgctccactgctccagggatggcgcagctagagctacttggggccttgattgaggcatgtggttcccttggaaacagactggcttgtcacctggggtcagcagcacttaa

SEQ ID NO: 467264 - DNA, 1446 bp, Homo sapiens
ccaggacccttgaacctcctctcactccagtagttggttcctgggagagctgatcccctctgagcaggggcctgtcttgctcaggcacatggaaatggttccagagacaggaagggtctttgcaattcgagcttcttctgaaaagggaggacacaggggtgaggcaggaaagcagcagccctgggctctcagagccaggtgttgacagacccctgcttggctcaggcagctgggatctcactcctgctgcatccatggctagtccaatggcacatggcctgtcccaggcttattccttgacccctctggttccctcacatgccaggtcactcccctgacatacaaagtcactccctgcattcactatcctccccaacatgccaaagctactcctttgttactcctctcagcttctattgtctgtcttctggcatgcactgctacatccctagtatcaagttaacttgcctagcattcattgtgaccccctggcaccgactgttatttctggaatgcctggggacagccctggcatgagccggcacttgctctggtgcaggaagaattcccttcttgcacatgcacagacatttgggcttctctgatgccacagcatgggaccccagcaggagcctacatggcatgggcatgtgcagtctggacgcacgtggggtagtccaccgccctggggaacccttggtcaatgcgggacaggagccgatgcatgaatgcatcccccatgggtcgcggtgtggacaactccaagaggcattcaatgtcctgcacagagatacctgggatcaccttccacatcaactgcctgcacacagttccttccttcaggccctgctttggaggctgcaggtggctgacagttatcttctactgtgagcccatgatgctgcatgacgaaatgttttgccaccttttttggtgtattgctgtccatgatgctgaagcatcctttggttcagggctcagaattgtgttcattcacttatttccataccaccgctgtggcttttatcagaccttcatctctgaatcaaggtaccagcttctcacagatctctctgctgccacattaaacctgccaatcccccacaccacttggaggttccccattgtactcaagtgtctagaccaagctcattaacatggcctcaggttgaccagccctggtccatccctcccctatgcctctgcaaatgccctacccaccttcactccctccactcctctgtctggcaaagtgccccgtcttccacacccagtccaacggccccctttcctggagactttcctgaccctctgggctcccacaggtccacagccccacaccacacagctcctctctcctccctcagctacagcagcctcacctttctatcccagactctctgcaccaggcccagcaaacgatacatgctcaagaatttgctgaac

SEQ ID NO: 467265 - DNA, 2588 bp, Homo sapiens
tgcaacactgtgggtttcactgtggatctctttcacatcacagcaggggtgcacacatcaacaggacttagcactggtgacgctaaccttgatcgctgggctaagccctctccgtcagtgtgggaaaatctgagtgagccagagaagggtgagattccccctgcagagcaggcagtactgagcaaatccaggatccaggaactccagttctaatcctggctcttgcctgctttcctgtgtgaccctggggaagtggttttccctctctgagactctccttccccatgtcctctgttcccaacaccctgttcactgtgggacccagggaagcagggacctgggcatttccccagatctaggagccctccttccccaaaaccctccccaccaccacttggctcttgggtttcagcacctggctttagcccagtctatcagccgcaacctcaggctttggagccagagactccccaggcagacaaaggggcggctgcgaggcgggggcctctggggtgccagtccagctgtgaccaggctcccccaggtacaagtcagagggagtggactgaaactgcctgtgaaaaccagaaaatggtattgagtgaggggtacccatggagagattggcagagagatggatggcagcccagatgggcatcggcatcagaagaccccttctggcagctgcccagaggaggtgcttatgggtgcgggtgcacaagacgagggacatcttcagcgcacatcagaatcccccagaggactcagtggaacccagactatgggccctgtccccagagtttcagagtcagtggggcctgagaagttatgtttccaacaagtttccagggcttgctgaggctgctggtgggggaccccactccgagaaccactgccctagactaagtgtcaaagacttgggttctcatcccattccacttccagctgccttggggccccttgctccccctctctgcacctcagtttctccattgggccatgggagccgcacgtgctgcccactgccatgctgccctggaggctcagggagctgctctgctgcctaccaccagaaaggcttttccagggtcccgctggtgtgcatcctggcccgctcgacaggcagacctcagggaacgggtctgcacctgtgctgtaagggaggctgggaaaccgaggagccggaattttctatagcagcagatagacacggaatagcctccaaatacaaaaggagggctcagatctggggcaggaaaaacatcctagtggtcactcctattcactgcagcccacctttggcaagcatccacatgcagaaagctaccatcatcatcatcatcaccattattatcatcaccatcattatcatcaccataatcatcatcaccatcatcatcaccatcattatcatcttcatcatcaccatcttcatcattattatcatcttcatcagcaccatcatccccactctcatcaccaccaccaccaccatcactatcatcaccatcattatcatctttatcaccattaccatcattatcaccaccaccatcatcattattatcatcttcatcaccaccaccatcattgccatcaccatcatcatcattgttatcatcgctaccaccattgatgcctttgcttattctggcccttcctcctggattgcccttcattcctttctgctccatgtatagagaaggttaagtgagcatagatcctactcactgtccatggcccagctcaaattactcatcctccatggcccagtttaaatgcagcctccatgatgtccacagttaaggaatgcaggaagcctaccacttccccctgtctgctgtgtgtgcgtgcgtgtgtgtgtgtgtctttatattcttctctcttgtaccaaactaccaaacttcccagttcaccagcccctgctcatgtaacactgtctttccttcccttcatctcctcccagctcctttaagcagctttctttccctgggttcattgctatatcccagtcctgtctccctggaccctattaactgcctcaccctctatgtcccttccctacctgtgcaccataattcctcttctgtcttagatgatggcacagttcataggccatacatctgggtttgagtctggattctgtcgctttctgggcatatcttcttggatgagttgcccccctttgggcccctgagttgtctctgcatccacagaatatgtaggtgcttgaatggatttctcagcccctttctcactcaagcattctgagtttcagcctaggtaggtaaagggtttgtgccatactcacgtggctctcctcctttcctaaataatagatgttgcatggtggtttgaggactcctttaatttggttctgcatggatcaggtctcctctctacccggaaaggtagtggcagtctctcctctgctctggggtggtgggctgggctggggtgtaaggcagactgcatgtgaggcaccctcggcacccctctcagctgagaggctcagagctcttggcccaagagcctgaggggagggatatttacggtttaataactggcctattgattctcatttatat

SEQ ID NO: 467266 - DNA, 756 bp, Homo sapiens
attaccatcttccccaatccagtgggatccttcaggaatgttaccgggccttgtggcagggctgaccctgctggctgctctctacctcctgcagattgtgccctcaacactctgactcccatgggatgttaacaattgttctggaggatggattggaagtggtggagacccgaagcagagagaccagccaggaaatcacagagagcatgagaggtggtggcggggagagtgtagtgggagaggaaagaggagaagcagtaggaaggcagaatgaatggcagtggagactgctgcgatgtggggacgaggagaaaattgatgcgctcacctgcctcggagcagaaagagagagagtggggaagagggagagggggagccagagagactggcaaacacagagcctgcagattaatgaaaaccaacagcatttgctcacaattggagatgaagtgtgccctcgaggtgtttggagctgtacgtgtggccgtgtatccatggctctgtgtgagtttgtgtgtgcggccgcgtgggagtttgtgacgtgcatgtgtgtggggaccagacagcagctgtggctcctacaatctttctgagcaaatctagtggaccctgtcccttcaagaccttcctctcccaagcagaattttctggttcctctccacccctccccacatgcctccaccccattctttcaggcccctcatgtccatcatgagcagcttctcttcacatccctgccttccaccctctgcctca

SEQ ID NO: 467267 - DNA, 1234 bp, Homo sapiens
ttcctgccaagagttgcacacaaacgcaggcagccctgagcactcacactggctgtggtggcctgaagccacacccacaaggacacacaggggaacacaggcacacagggctcttcccagcaagggtgcctgcaataggggcagcagctcccatccttcccagagctggaagtcaaggagcctcagaacccactcttctgggagcaaagaactggggacaaagtagagagatggagcattgttgtgagtttgagtgggggacagagggggcctttcaggctgctgtctgatttccttccttttgagctcagtcccaggactggagccatttccacagcctcgagctgacatcttgtggccatctccaatgattgcaggcttcacaaggagacactcagtcccctgcagagaagcatagccctgcccaacccagaaagtcgttggcagaacactgcttcccatccctgatgccctgtcctatgcccagctgccaggaaaggcacaggggctgacttgttcctccagcgcggacagctgcctgcactgacatctctgagagggcctttgattaaagagacaagtgactttgcccattctattgatcagaataaattactaggaactaatttatgggcctccccacagccgatgacatggtggattgtgcgctattggtcagtaaattggattgtcaggctagattattggttcgtatacagttatctctcatagcaatatcaggcagcccaggcaatttggccagtgatgcatggggcagtagatcctcgcgcactcttccgtgcttctgccaagccagcaataacaaaaacttattttttgccagggaaacggatatgagtcaggcagcccatcgggaattaggggggctttaccacgccgctgcgatttgtaccactcggctgtttccccgagctctaaagacctgccaggaggtgacaaaggcgagacaatttcgagttcacagtcctgtgtcctcgaagcataacagcatgctatcgaaggggactttcaggggctgtgggttgcaaagtcagcggtcttttcccccaagctcactgggcagtggggagatggggtgaggagaagagccacagagagctgaggcactgctgtgaatttctagaagagatgggcccacagctctgccctcactgggcatggccagaaggggtgagaaggggggtgttggagtgccaacctggccccagggatg

SEQ ID NO: 467268 - DNA, 621 bp, Homo sapiens
ctatagcactatgagatcatgttctcttaaagcaaatgtctcttggggccaaagaggagaaaatagtgaatgcttttggttcccagtgcagtattacagagagcaggataagcagccatccatctgtggacctctgtcttatgccttctccatctctgaaacactgagttttctagtgctttctaggctgggctattgcaatctggaatctacagcagctgctgctcatatcatcattttccagccctcctttaaaaaacgcattaaaaaaaatcttgatggactacagtattgtggaaaagcaacagacctggaccagcgagctcagactccctctccccgactggtcaatgagaaaccctgggtttatgtgccttacccccaaaagagttataaagtttacctcttgttcttgcaacaaactattctgggtctagacttgaattatgctggggaaggaatctgtgttccacatgttgggccagttaaaggttattctgtagaaatctcaaccaacaagtcaaaagatgagtttcctgctcttaatagataatttttattggttttgcaataaacgtatgaaatagaaacaatagcaataaaccagctcaacaagaaatc

SEQ ID NO: 467269 - DNA, 588 bp, Homo sapiens
tgcccacatgctacctctaggctccccattcatctagaataggctgctggtttatttgctggggtctatgccagtatggcgtctcctctctctcaacacaaatttgaaatcaaccctcagtctatcctcaatggagttgtccctgaactaagcctacaggaagcctctgagctgccttttttctctggtttctcacagttatcactggaagaatcacaaaggagctctgttttggagcttggagaggcactctccatcctttcccagccctctctggacctgggagatgaacacaaatggactgcatcaaaggctctcttgtcctctggcttctgtttgtgtttaaccaaaaggagatatcagaagattaaagagcaggaggatgctgtggctgcaccatcatcccaccttatcttttcatttatttatttatttattttttttgtaactccatcctgttactgccttagtcctctgaaaacctccagctagttttcatacgaatgcgtttgaagtcttctccattttgcacttgtgtagaatttttttaaaaattcaagaacaaaactttttattaactgaaagcct

SEQ ID NO: 467270 - DNA, 947 bp, Homo sapiens
aagatagtcatgtttactttcatcattataggagctccgacctccgggcagtgcagggatactcgacggcgcgcgatgtcccggcggctccgcgagcctggcgcgctgagagccccagcagtccgagtcctcgagctcgggcgtcttcgcgccgccgccccgctcagttgcccgggagacgcgggtacacagagaagcggctcccgtcggaggccgagtcgtcgccacgatcgcccccttggtggactcgcaggccgagcggcttccccgcagagctcgaggagggcagacggcggcgggggcgccatgagtcagaggcaggtgctgcaagtgttcgagcaataccagaaggccaggacccagttcgtgcagatggtggcggagctggcgactagaccccaaaacatcgagacgctgcagaacgcgggtgagcccggagcccgaacccccgtcgccccccgcgcactgagtccccgacgcctccgccccgctgccctgcccgtggagctcttggggagccgcagtgtggggaccggagttcgcaaaagcatccattcttttcagcgggtctttgggggtcaggccgagagggtgaagcttccagatggttgtgggaggtgcgcgttgtccctgtttccatcttcattgcacacaggcaagtgtcaggttgaaagtcgaggccctaggaattgcctggagtcattttacgtgaatgggactctaccctaatgagacccattttatccaagtgccattttgcatgccaccctgcctttgatcaccttcgacttcctcacagcaaagcaattccagtggtttagacgtgatttctcgtcttgctttagtgaaaggggaatgatatgcttgaatcttttccaagaaattccaagtgaggaaacagtttgaatgacccacttgagttccttaaaactttatgaatttatgtt

SEQ ID NO: 467271 - DNA, 1485 bp, Homo sapiens
ctggcacagacttctcagattatcaatgagtctgttgttcctctatacccagctatacctaacccttctactctgctttcccaaataccagaggaagcagagtggtttacagtcctggaccttaaggatacctttttctgcatccttgtacatcctgactctcaattcttgtttgcctttgaagatccttcaaacccaatgtctcaactcacctggactgttttaccccaagggttcaggaatagcccccatctatttggccaggcacccaagactattagcccaagacttgagccagttctcatacctggacactgttgtccttcggtacatggatgatttacttttagccgcccattcagaaaccttgtgtcatcaagccacccaggtgctcttaaatttccttgctacctgtggctacaaggtttccaaaccaaaagctcagctctgctcacagcaggttaaatacttagggctaaaattatccaaaggcaccaggaccctcagtgaggaatgtatccaggctatattggcttatccttatcccaaaaccctgaagcaactaagagcgttccttggcataacaggaactgccgaatatggattcccagtaagatggacacctgaagcagaagtggctttccaggccctaaagaaagccctaacccaagccccagtgttaagcttgccaatggggcaagacttttctttatatgtcacagaaaaaacaggaatagctctaggagtcctcacacagggaagagatcttactgtgtggatatcttacgatgtgaatggcttactcactgctaaaggagacttgtgcctgtcagacaactgtttacttaaatatcaggctctattacttgaagggccagtgctgcgactgcgcacttgtgcaactcttaacccagccacatttcttccagacaaagaagaaaagatagaacataactgtcaacaagtaattgctcaaacctatgccgctcagggggaccttttagaggttcccttgactgatcccaacctcaacttgtatactaatggaagttcctttgtagaaaaaggacttcgaaaagcggggtatgcagttgtcagtgataatggagtacttgaaagtaatcccctcactccaggaactagtgctcagctggaatcttttgccaaagaaaccagctctccaaaatcaaacctagaaaaggaaaatttggagtacaaagtggaaaatgagaggctgcttcagatcatttcagagcttgaagaagaaatccagatcaatctaaaagaaaattcaggattagcaaaaatgtccgtcgctagtattgatgaaaagctttcagccctcagccacacttggatcttgaacttacttcttaatccctatctgaccggccatctgaacagcaggaagaaggctgcgaatgtcaagggcagttgtgaaggtcacagtcctgctaggccttgtgtccactatgcctgctagtg

SEQ ID NO: 467272 - DNA, 548 bp, Homo sapiens
cagttaagtgctgcctcagctttctaaatctgcactgtgccatggtggcccttggccacatggacattttggtactgagcagaaagaatctagaaccctggattcctgttccatttttggaactaggtcccctggggccagtgcctgtctcctccttcctgtttctcccaggcgtactgtgtggactgaatgagataatgaatgaatcaaataccagctgtatctgtgtcggtcttccagctgctgccacagtagactctgttctcatgaatttcattctgggagggaggcagacccggagtcagagagcacagtacagagaactttccagacggctggtcttttatcagttgactacccagcccccagcccccagccccgccacagcagccccctgcccagcttatggtggcgtatttggctttcagctgattaccactagtatgtctttgttacggtaaactgactgtgtttattataataaaaaataaaacacagcttgacttgcgttctaaatgtgcttgaaaagaatatgatactgtttggaa

SEQ ID NO: 467273 - DNA, 1902 bp, Homo sapiens
ctgcctagttggtcccagtgttgcaagatcagccaaggggagagaagcctctttgtccccatggcccaagtctccacccagcaccacagctttgaggccacattctgcgaccatgagtgtatcatctgctggggcccagaaagctaaaatgccaaagaaggctttaaaggaagaccaagctgtgaatcttaaagccaggtacagttccactgtgactcttctcagggctgaggtggtgctagtcgtcaaagtctggaaggccatggtaggagtaaccctggtagcttttggatgcattcggcaggaacaccaaattgccagtgatcagaactggaacaacctagtctgtccccactttgctgatgtagcccaacagcaggagggagcctatgataatagaaagaaactctacactgctccttacttcaacaaagtaaacacctgtgtcctcaccacacaggtaaagaaagaaggaattagaagtggcttcacggtccctgttgcccatccagtgcctgtcacctctcttcccaattggcaaatattctgaattgaatgcttatcattcccttggggaaagttttcaataacattcaatttgtcataaaaattgggctattccaattttcaatttcttccaatcagtttgataatttgtgttgtcttttatgtttgggaattttctcatttcattgaattgtctaatttattgatataaagttattcataatatcctcatattatatatataaatgacagtcatgtgtcacttgatgacagggatagattctgagaaatgtgtcattaggcgatttcatcattgtgtgagcatcttagagtgtgcttacaaacctagatggcatagcctaccacacacctaggctatatggtatagcctattgctcctaggctacaaacctgcacagcatgagactataactgaatactgtaagcaattataacacaatggattagaacagattgcattggcagcccggtctttcataaagaggggggtggggaatagagttgggccttcattttctcacaaaaggcacaatgtgaagcgcatctgtgaacattgcataatttgttatgttctacacagaggtgggtttttgttgtacacataccaaagctatttggtgccgtttcaccaatgatctctattcaggtccagaaaagaaattggcctcagaagagtgaaaggaaagtaaatttttctttaaaaattagatacagattatcacttcaaaatgcaggagggaattttacaagtgccggtgtactgattagctttccaatggacatccagccctttattaaacacatgctagctgtggtcaactgtgaccgatgtggtttattactctccagaagggctgaactgaaatcacccatctaatttaattgagaaatgttggatgaacttgaactgtttcatggacatgaatgaccagagaatttatttgatgagacgttaaaggctgaatacggtaactatctctttgatggtttagtacagtcgattcattagttcattagcatgcctttcatatttttcattactacctgagcaacctaaatgaaaaaggcaaaaaataaaagtttttgtacagcgtcattctaaaaaattagcaaccttccctttattggtaaatatttgtgatcatttttaatgtagttaactcttttcaaagtgacatcagctttccagtaaaggaagttcacagtaattaaattgtgtggacattaataagtccactgggatttttcatgtgatagtccctaaattattttcaaaatgttgtcttctgacttcattcattaagacaaaaaaaaaaaaaaagcctttaggaagttggcatgttattcaccaaacaagctcctttgcattttctc

SEQ ID NO: 467274 - DNA, 546 bp, Homo sapiens
cctgactgtttctcactttgttttcatcgtctgatctaaacattatggtggagaagtttcaggcaagagcaaaatttatcaaagacaagacaacactaagcgcatttggctgtcggcacaccctccctgccagcctggcaaatggaaaacaaatacataggaggaaaatggggttggctctggagaagggccggctcacacgtgcagtgtgggtggaggaagtggtgaagggtaacacctaccttatcatggcctggagcaaattcgcatgcagagcagtgactggagcctatcacttgctgcgagaccgtccactgggacgaactgtcgtgggactctgcggagtgaaagcatgccgaaggaatgtaagccattcctgtttacgaattcttgctttccatatcacaatgtggcgcaaagcaccagagaaggcacactacttcattttctccatctgagaaaatagaaatggaccagaaagatcctgtttgacgtccaaattatattttatttcaacttgaataataggcatagaatgagtcctag

SEQ ID NO: 467275 - DNA, 490 bp, Homo sapiens
acccccgagaggccccgagctcaaatactatgctgggagaactactgctgtcttcagagctgtcagacagggatgtttaagtctgcggaagttgtctgctgccttttgttcagctatgccttggccacggagaaaagaagagagaagattcaaattagctcagttagaaatgaaaatggaggcattacaactgacatcgcagatatgcaaaagttaagtttacactactatgaacacctctatgcacataaactagacaatctagaggaaatgaatacattcctggaaacatacaatcatcctagcttgaatcaggaagaaatagaagtcctgaacagaccaataacaaataatgagattgaatcagcaaaaaaacaaaaaaacgccaacaaaaaaaaggccagtgccccatgtattcacagccaaattcttccagacattaaagaatcggtatcaatcctactgaaattattccaaaggaattgagaaa

SEQ ID NO: 467276 - DNA, 787 bp, Homo sapiens
ggcagacctttcaggaaatattaagttagactgaaaattcagaggtcctcatcaaggggatcatactaaaacaaaactgtgatcatagctatcacactgcatagggtatggaccccttccttgtttccccatggcatcagaatgaagtgaaggcagcttgctgtgcacaaaagacctttccctggtcagcttcttcccagtgtcccagcaccacccctgccccactgcacaactgcagcacaacccacccccagtgccatcccacaggaacccttcacctcccagccaccctgcccactcatctctggactcgttgttctccttcaacgctcattctttttctttctttcttttttttttttttgtttttgtttttgaaatggagtctcactctattgcccgagctagagtgcagtggggagctctgggctcactgcaacctctgcctcccaggttcaagcgattctcctgcctcagcctcccgagttgctggggttacaggtgcaccccaccttgcctggctaatttttgtatttttaatagagacaggataaaaataggaaaaaaaaatatacttcaagaaatgttttgcggccttctggaaagtaaaggaaaataactaggggccgaaaagaactagaagtcatgatttcataagcacttgagccagcatgtaacctgagggcatctgcagatgcctgatggcccagtatctgagagtcaagtagagtaaagggtcagaaggaggctgcccacaaaagccaggatcttccactgacaatgacat

SEQ ID NO: 467277 - DNA, 668 bp, Homo sapiens
gtcaacctcaggatcaaaaggaggagggcagtcctgcccagatgctttcctacagggggtttcaccttctttcaacttgtactggtggctcacattgcaattcatttttcccaaatcgttcttttcctgtctgccctccctctccccaccccgaatcagggtttggaaaccctgctatccaggagccaactggaagcatgactcagagctgctttccttactcttctgacctaacactcctttttcccttttgggtgacagtcagacaggagaccaaatctagactgtcagggcagtttctccataaagagatgtgtgtcttcggcaacacagaatgtggaacagtcacatgtaggttatttgatgagtggaagactggagtcaggttcctgtgtgtacagacccttcaccatgaggaaagaaacaggaataaaaactaactgaaataaacctgagaaagtaggtgtgaatgaaatgaaaccaaaagtacaagcattggaaggagttccagttcatgtaccaacagaaaggctgaattgcaggggagggggactggaatggaaagttcaagcagcagcctccatattgcttatctagtgtcccagtaggacatcccatgggttgagttatttttcagctgtacaacctggtacaacttagattgctgt

SEQ ID NO: 467278 - DNA, 1109 bp, Homo sapiens
gatgtggagagcaaggaagatgcttccagaagaggagccagtcaatgaagaggtgccctatgacttgattcctgaatcatctggcaaaatcagccagccatgtggtgatgagggcagaaagttccaggcacagaaagggagaggaaaagcccaggagttgagttgtgtttggttcaccccccacagcacaaactacagagaaggggcctgggacagagagaggaccacagggaaaacactccaagcatggagctctggaggcccaagtggagctgctttccactttgtgtatactagatacactatagcaacaagaatgattcctcgaatgctgagagaatggactctggccttggggaccgtgatcccaccttggacccctgcagctccgagaacccccagctccacccttgcctcacacacatacgctctttgtgaatgaggagaataagacccagaaaacagaagcccaagagcaaaacattttttgaattcttattttttaaattttattaattgataagtaatagttgtatacatttatggggtatggtgggatgttttgatatatgtatacattgtggaatgattaaattaagataattaacatattcatcacctcacatgcttatcattttttttaacttaaaaaaaaaatcttatgtagatggctatggcctgtaggggaatgggtgaaaatgggaaaacagaaagggtattcgacacacaaacccacaaaggacctcacatttagacttcaactttatctttgaaggaggttattcacaagattgctgagatgctttacagacctaggggaaagttaaagttaatcacacagcccgaaaattctactacgtgtttcactatggaaaaatactgtccacaacccctattttagcaattctgtgattatcttatgcatagcacattgataccacattttttaaaagagttaatttgttcagtgtaactgttttaaaaataacacaatttttatagcactgttttaatatttcttctcctttttttatgtataccaagagcctcaagataatggagaagcccaggccccttccatcctctctgaagctttgcacatttgtacc

SEQ ID NO: 467279 - DNA, 875 bp, Homo sapiens
cactgaagacttataggactatagtgacgattataggactattatgatggtacataaagcattcaaccgggtagacacatttgtacccaataaaagctatctgtcaatggagttatgttcccaggaggattatgactccctctgctgtgtcaggcaggttatcaggaaagtgggagaaaaccagcagtcacaagcctcacccagctcctatggaaaagaagtctcctatgagactatccaaaaggccagtctcactcccacggtgtcctgcttaacagcaccgattctgtttccaggcagtgggaaagcagggctaagaacttgtcccaggctacctgcctctcagctgcgaaagcaagcagggcttttgtatctcccctgctgtggagtctgcaaaccggatttatgccctttcccaagttctggccaggagactttgcatttggttggaattgttacaaagttcagctggagctttccttctccctgtggtcttttcccagtacctctggcagctctccccaaaggacctctgtgagacaagtctgaaatagcttcccaggggacgcacagagcccacagatcttttttccgctgcttcctctacccctgtatttcactcgactctctaaattgactcagctctagtcattatttttgattagctcatcttttagtttttctagtcaagatataagtactttacataccacaattatagttttataatattctgtgtttttctgtttacttactattaccagtgagttttacacctttataaaatttcttattgcttattaacatcattttctttcaaaatgaagaaaactccctttagaatttcttgtagaacaggtctagtgttaatgaaa

SEQ ID NO: 467280 - DNA, 695 bp, Homo sapiens
cgcttttgcaggatttcatgttatagaactgccagaatagtgctgacaagctttgttcgggggttcacgtgcatgtttgttacatgggtaaattgcacgtggctgaagtttgctgtatggataatccagtcatccagatgaggagactgaggctctgcgaaatgaccatgccagtaagggcagagccaggattcctagccagaaatgtacaagccaggattcccagccagatcctacagactcattctgttccacccaaggcttccatgaaggaccttggagagagatgtgaatcttcttgggcctttacatccagtcctgagatcaccagatgccaatctgcaatcctggttaaggagagagcatctaatagttcactgaccatccctattagaagaaggaaacttgctatgttctctgctacagacacactgtacagccactcacatcttttctgttgccaagagattttcaccactgctcagtgtgtgcagcatcatgaatctgaaagaaaacaagcgagaggactggcactgatcaccagaggcagaggaagggctgtgctgaggcgccggggcagggccgacctgggcaggtgccagggatgagccaaactaaatctttcctttatcctgatgcttcccctcccaggagcctttggtctgcattactaaatcctctgtaaactgctgtga

SEQ ID NO: 467281 - DNA, 1020 bp, Homo sapiens
ttcccttttctccacatcctcgcccgcatttgttactgcctgacttttgagtataagccattttaactgggagacttctgttctcttcccttatattcccccaaacaaataatctctctctctctctctctctctctctctctctctctgttctgagctgcctggagctatggagctatggatggtatgacagaagctgtcctgtggccaccatcactgagactatactggctgttgaaatcagtggcagagaactgggcttacgatatgacggtctggcccaagatagcattttcactttttaatatcttccacatgaggcttcatcgtttctatctgggccctcagcagtatggatgttgcccactcacattggatgagggcagatcttcaaatgtcagcctcttccagaaataccctcacagatatacccagaaacaatgctttatcatctctgggtaccccttaatccagtcaagtagacatctaaaaattaaccatcacagatggaatgtttcatttatcaactcatctgaaaagctcattgaaaatatttttaatgttgtaaagtataaatggaaatatttatagaaagccttcatcagtgtttctccaaattaaatggcagtagagaatagataaggaatactactttcatcacttctggacagtaccaaataacatgacattcttaaaataagttcatctagaagtcattcaatagcttcttgtaacaaaattttggttgaacaaaagttttttatatgagctaaatattagataatgttaaaaattactgtttgatagatatggatatgatattgtgactatgcagaaaaatatcatttttgaggctacatgtagaaaaatttaggaatgtcatgacatcattttattaatttactttaaaatagttcagcaataatgtatatgccaatacaaattgaaataaaaataattcagctgagaaatgaagcatctatttttaaaagttaatatttgttgtgatggctaatttta

SEQ ID NO: 467282 - DNA, 666 bp, Homo sapiens
gcggggagggtccaggtcacaggaacaccaaattgaacaactatgaagaaaatcaacttcataagaacctatgatcagacacaaatgaacattcataagctcaagactattcaggaaaacatgacctcacaaaacaaactaaatgaggcattagtgaccaatcctggagagacagagatatgtgacctttcagatagagaattaaaaagagctgttttgagaaaactcaatgaaattaaagatagcgcagaaaagaaattcaaacttctatcagatatatttaacaaagatattgaaatttttttaaatcaagcagaaattctagagctgaaaaatgcaattgacatactgaagaatgcaccagactctctttacagtacagttgatcaagcagaagaaatagttaatgagcttgaagacaggctatttgaaaattcagtcagagaagacaaaagaataagaaagaataaagcacatccacgagatgtagaaaatagccccaaaatggcaaatctaagagttattggctttaaagaggaggtagagagagagaaagattgggatggaaagtttatttaaatggataagaacagagaattttccaaacctacagaaagatatcaatatccaagtacaagaaggtaataaaatgccaagcagatttaa

SEQ ID NO: 467283 - DNA, 764 bp, Homo sapiens
agtcttttctttagggaagagaggagttcactcaagtcccgcagtcttttttgttttttataatgatattaggagtaccaatcagctgttttgcagaaggtgccaaaaagctttctttaaatgaagactactacatttctgtattttgtggacagggttggcagtttgagataacttacaagattcctgtttcaagaatactttcttctgtcaatataatggaacacaactcctttactggatcttttttaaatgttggaggaagactgtctgcttattttgaggaccagtctgaaaatatttggcaaaagacaagttatgatctaggaccaatgattggaaagatgagcacccactcttctagaggaataattgacattataaccactgtagcctacgtcctttgcaagaataagtatgctcagaccttacattggcttaaaggatgcttgggtaaatttaatcatgaagatgagctagagatagatttaaaaaatgaactgcaaatcattgaagttaacccacagaagtctattatacagcataggtgcagacacagctttgatcaattcggttttctcttcatgcttgctccagttctagggccttcactgcctcttgggtggttctggttgcaatcagacaatcttcaaggtccactctgggaaataaagtgatacttagctcctaggaagtacccagtttaccttcagaactgtcttaattttaaactatgtaaaagtctccaacctcacctcacctct

SEQ ID NO: 467284 - DNA, 477 bp, Homo sapiens
tggcgaaattatgggagtgaatccactatacctggaaatttggggaagggaagtcatccccctgggttgcacaaaaggcattcagattggaaaagaagtaaaactggctttgttcacatttggtgtgattgtctgcaatgaaaattttaaggaatctaccgaaagtgaaaaaaaaagtgaaaaattgaaccaaattaacctgcttgcaacgctgaggtcaaggagagcggatcccaaggacagcagggatctctatatattgtgcactagggagagagcaccctatgtggaaatgtggggcttgaaaattcagggaccatgttgggcaagaagaggcttacgagtccaaacaggagcagatgatgaagaatcagataaacattaacgcctcaacctacttaagcaactaagattcaattaaacccagttcatacctctttgctctgagtgcttttagaggtgaagacttcatatgag

SEQ ID NO: 467285 - DNA, 4397 bp, Homo sapiens
tcttaaagctccaaaatgatctcctttgactccatgtctcacatccaggtcatgctgatgcaagaggtggacttccatagtcttgggcacctctgccctcgtggctttgcaggttatagcctccctcctggctgctttcacaggctgatgttgtctgcaacttttccctgggcatggtgcaagctgttgatggatctaccattcttgggtctgaaggaccgtggccctcttctcacagctccactagacagtgccccactggggattctgtgtgggggctccaaccccacatttcttttctgcactgccctagcaaaggttctccgggaaagaaggaccttccgggcccataaggcgggaggcaaggagggcccctgggcagccccgcgcttgcgcgccaatcacggccgttatggatttcgatacgttaccaaacggtctcctacaaaggcagaaaccgtttaaatatttcagaaggattgattttcattttgcaaatataatactggttcattttctttctcttcctccatccattctactattgaacataaaacgtgtcaatagtattgtagttcagcatgtatctcaggatattaaaagggcagtgtgactcagctagaaaaggatgaactttccccaaagataaagtgacctatgcgactctgttgggtacaagtgacacagaaagtcatctcaaactagctgaaacacaaaagcgcaggaaggcggaagggaaggcggagaccggcaagagaggggagaaggcccggggaagacgctcgggaccaagatgcggggcccgggtgcgagcagctgaacctctcggcccccaggcgtggtgacctgggtggcgacgctcgtggaggccgaggagcttctggaccggcgcttcgggggaccaagtggagaggctgctggagttgtcgcctgagtcctcccttagttcttcgcgccggcctcgcccacggctccgggtcccagccgccactgcagtctccgcagcaccgagcggggctccaccgactcgcgacctccagcctccgcctcaagggcagggagcgcggctgggtctctggaaagccatttttaaatcactgcctctgctgcccccatgtgaggtcggagtgtcctcccccgtctttgctttcaggttctttcaggttcctttgggcaaacccgcagctaagagtccagcttgtgaacttgaacctgaacttgctgaagaagctcccggcggccccctgctgtctgcggcctttgtttgagggagaggctggggtcacccggttgggccgcatttccggggccgtcacctgtcgggctgccaggccgcgcgtaccttgtcccatcgggggctctgctctgccccctgcgctgatgacgcgggtggaagggaggtatcaggggcactctggggagctgtacctggcgggcaccccccagctgctctccgtggggtacgacaccgagacctggttgggctgcaaggagaccgactgggattcccgggctggtggccggggagacgaaggcggggggtgagaggcaggaacccaggaggccccaggcccagcgctgtggggctgctgttgtcgttctgcgtggaggtctggccaaactggcttttgccccgagtgaggaattcctgctcttttttggttttggtaagaggtcgctattcacagagggggcggggttcgtcccctccaggcgagtacggggctggcgggcgcagtgctgcctttctgctctgtctcttgatcccgcttaggatctttgtggctcctctgagtcttcttagagaggccgtgaaagatgggaaaggcaggttgctgaaacgctgctgctcggggctggcagagaccctggtatagggaaggcgcaccactgtgggtcagatcagctgacagtgggggttttaggtgatggggtaaccttacagttcggatctcttagaacccagaagcaggtaggcgatcgctgcttcatcacacttcacagggagtcctggatctttcctgtccgtaacccatggacgccatgattcagtatggcggaggtccggggcttaagttcctgttcatgcttcctaatcattcatggatccatcacaatgtgctctgaagggcctctcttgctgggattgagaaggatacattttttgagcaggtttttatactcaatggacatgtagaagggaatatattctactcagttcccctcctgcagctccttgaaattctgtccatcaaaagcagggatctgctgaccagaggtgactgccacagaaggtatccagtttgtaaaagctgaatttgttgctgaagccagaatttgcaatcttgatgtttgtgttaacatccaagagcgtgttttctgcctttaaatctctgtggacaatacgtttctggtgacagcttgcacagcagacacttttggtagaatttgcttcagtcctttttttttctttcctgctgccatgagcaggtattcacaaacttctcctcctggctagtgtgcttcatgacaaagcaaagagattcctcaatatcgatcacagcaaatgtttcactatgttggggtgatccgagccttcatggttcctactttgtggatggtgtctggaggagatctgctgagtctcatcaatgaacttcacagctgctgctttcccagttaagaggtcccaggccaaccttaccttagccaggttgcccttgacgatggtctcaaggatcctagctgccagtaagggtcccttctcagcagagatggctgagaggccctgtggcatgtgagacttactgctgggcttggagtcaaggtgtcccaggtcagcttaatttcgggaaaaactggtaagacgcttggttcaaatcacttgaaaagaaaatcacttgcatagttcacctgaagaatggatctctataatggaattaaagcacaatgctggacaaaaagtaagaaaaagcaacaaactgaaaggaaaaattgagtaaaaagaataaagaactagaactggcaacctcagccaagccagggaattacatacatcttggaattccaaagcaatgcttccttatgagggcataggaagaaataaatctaataacaaggctgggattaattcacgtggttttctcacattttggtctcaagaactttttactctaaaactaattattgaggaccccaaagagctttttatgtgggttatagttatcagtatttactttattggaaattaaaacctgtaggatgtttcagtggtcttttctagtttgaagggtttaataatttttggcttttaaagagcccataatcaattaaaatattttattttcctttaaattgtaaatgattggtgtcataatgatgctacaacttaactggcattacaatactatacaaatacgttctattgtataagtcacaataaggtacattattaactctataacatttaggggaagatagctgttatcatattatttaaagttttgcctagtttctttgtagtagacttatcttttccaggagccagagaacccgctatatcagtttcagtatctttaaatgtagagattgcagctgtgtgttgagaaagcacgtttcacttagcatgggatggggacttcgaggtactggatatgtcactggcacctcaggggaggaaaccaagatgcccctatatgattttaaacatggtttattaaagcgtgatacagaaaagtgcacaaattgtccacctacagcttggtgactgttcacaaattgaactcatctaactagcctccagaataagaaacaggcctttacacacccccaccagcctcccaatccccttttcagtcaccttctctgcagtgataaccactattctatattctgacagcatagtttcacttgttttttaacttcacataaatgggatcagacagtattgaatcctttgtgtctgcttccttcactcaatattttcctgagatttttctatattgtttattctaaatgcccattgtacgactgtaacacaatttgtttatccattttactgttcttgggcatttgggtagttctcactgtggatgctaagaagagtgttgctataaacattcaggtcttttggtaagcatatacctggctttctgttggctatttatacctagaaatagagttgctggcttataaggtatgcatatttttagttttagtagacattgcagtttgtaccaattcacccacccaccaatgtgaatatctaatattgcctgcctgtctgtacgtgtgtactggtatagcattgtggttttaatttgcattttccagtgcctaatgaaataaagcaccttttaatatgcttattggacatattttttttctgtgttgtgcct

SEQ ID NO: 467286 - DNA, 711 bp, Homo sapiens
gttacttattggtctgttcagattttggatttcttcctgattcaatcttgggcctgctgtaacctctccctggttactgcctatgttcgctcaagaccccagcattctacagtcatcaagtggcaaagccagccaggcctgcgtccttcccatgaaggcggtgagggctcctaaaccctggatgggcccagaagtattgtctgggaatcagggactcgagtcaaaaaccttagaaatttacaagaaagaagcagatcctggcaaagtcagttttaatgaagagaagatggaggaaaaagcagtgcctgagcgggcaccgaaggcactcgagggccctgtgctctttggcaagtattggcattcacgggaagaaaggaggaagtggagcagccaccactgtccatgggatgacaagtgtgaggacaaaagccagtgtaacaaagaagggcagaatggacaggcacgtgattctgccttggaaggtcataaagacaaaaggttggccttccctggagcaaaacatagaaatatgtcccctggggccgtgtcatatgccagtcctgtaagcagcatgggggacagtgatggtctacttagcaacatcaacctattcatagtttcttgagcacgctatggcatttcatgattctgagcctttgatcattctgtacggtccctgtagatccactttcttctttcatctttgtttaa

SEQ ID NO: 467287 - DNA, 1470 bp, Homo sapiens
gttttgatacgcaaattccctcgctggagtcaatgtggtgtaggagatagagggtaactggactttatgatgacattcagtgttgtggaaaaaccagtggcagacaggaacatatatttttgtgaatcatgtcagactctgttgtcaaacttgttactatcacatgtatcccgccaggtggttccagggactgtgggacaagtccccttatctgtgcagtctgtgctgaccattagctggagcccttccagactacaatttttcccagtgggcactgagagagaggtgtttcatgtcatatctgactgtgcagctgctgagataggggtgtcctgttctgagcttcaggccagggcaatctacatattcccatctcaggctcaggtcagggagccctggccatatctacacatagagcccagcagtacctcttgggcagcaggcattcaacctctccctagtgaggatggacctgtgtagcgggagaagagattttggaatgggactcatttcctctcagctctctctctccagttctgtatcagatgggaagcttctaggaggccaattgtgttttcagatacaaatatcttctgtaaggcactagccctgactcaactctaaaagggatagaaacataagcaaatactgaaatgaacattaggagagctgcttacactgagagtagtatgactttggaattttcatgcataaaattattgctagtaacagcgtgtcagagaaacagagtgagtgtttgtcatgtggtcactgaatttggcagcagtcctggttctgtgaggctctggctcaactgattaggtattcaggatctggcccagtgtgtccttggataaatacagccatgaaccacacaggacagagcaacaataaggaaacagccaacacattgtgtaagagagagagagagagagtgtgtgtgtgtctgtgtctacaaataggaaaaaaacaatggaaactagagagggaaactcatttctaatgggcaggatgcctacttgtagaaatgaaacttaagcattggagaaataaaacttaaccactatcaacattccagaaccagctctgtgttcgacgaactagcagagtgaacttgatttcacttaaacactgagtttcctcatcaggtatagaaaaaggttggccttgaacagtggtttacaaccttgggctgcaaggttgtaaaattccttggaagtcttttaaaaatgcagatgcctgagccaatctccagcccaatcaatcagaatctctggaagtgaagcccaggcatgagtattatcactatttcatgaactttttgaagtttcttgataaagataactccaacataccggttttcagaacttagctcaatggcttggttcccagggtggagagagaccgcttcttggctgctcactgccatcccctccccagctgcctgaaatgaaagggcacagagatgac

SEQ ID NO: 467288 - DNA, 569 bp, Homo sapiens
tttggcgtttaccgacacctgtcttccaattcttataataaatatgctacagatgaacagcacattgaacaaatcattacaggccgctcctagaccttcagctgatagacaatggagagttctaggagggtgcgtggctagaggcagaggacagggcagccaaggcaatgggaagacactcatcgtgggtaggactagtagttacttactaaggagtgtggaagtacatttgattcttgttattcataatgagaaagctcttgtggtagtggcagaaaacaaagacaaagagcaggaaagacatccccgggaatttgtggttgcagactggctttcatatggatctgcatcttgggttcatacaacccatacctgccgggggacattgagcaatgaacttgacttgaggttttcaccagctgcaaacaccagagctgtctgccagaagcaaaggcttataagaaagcattaatcaggaaagatgagactcgtgtaggaggatagggcaggttgctttgtcctgtgagtcatcttgaccatgttgtgttagaacagcctgaagatatttc

SEQ ID NO: 467289 - DNA, 586 bp, Homo sapiens
tctcctctggaaacagcctccatgacatactcagaaataatcatttatttacctgttctttatttcactcgtgtccatgtgaagagaccaccaaacaggctttgtgtgagcaataaagcttttaatcagctgggtgcaggcgggctgagtccgaaaagagagtcagcaaagggagatggggtggggctgttttataagatttgggagggtcagcatagtcctgccagcaaagattatttattcactttaagagttaagagtggcagtttggggatagcaccaggagatatcagctgtgatgacttggagaaacagtctgctaagccgagaagatctgggaaagagtcagtcagagagccttgggccagagttccaggggctctggaagtggctgccagctttatttcatgttgggagcagattgggtaatacaataaaatgcatattgagaataagacggctttctgacctttcagggtctagggcggtaaagcatctcagggttgctgccaaacgagccatgaactgggctgggtttttcatatttgattaaaaacagcctaaacactaactgattttgggagac

SEQ ID NO: 467290 - DNA, 603 bp, Homo sapiens
gcaacaggacattggaaaaagaagctctctttaaaaaggaggactttgatgagcagggctctgtctgaggaaaagtgatttgtagtaggaggaatgctttgtatgaagaacattgctttgcaggagaagcagggctttgaggagcagaacttcacaggaagaatagggcttgctgaaggagcaggactgtatgacagcaaagtcgtgaaggaggaaaaggcctttggaggagaggcttttgtagtggaggtgcttcctgaggagcagttgggctttgaagagggagcaggttctgtagggatgagcattattctctatttgattgctagtggcaaatcctggcactgcaaagtccacggcaagggttggggtgccaagtggggttgtacatggcttccagcaaaatactacctgcatgttccccagccacacgaagagcagagtgactcccaagcttctcatgcctggcctgagtgcaagacccctctttccctttccaaaccagtgaaaagataagtgctgagcctgtgtggacaacacacttctaagacctaaagcaactgtgacctctttttgcaaatgtagggtatggcagacattagc

SEQ ID NO: 467291 - DNA, 2999 bp, Homo sapiens
agccgtggccctttgggaagcccagacctgggagttccctgagtcagggctgtgactccctctttaggtccctgtggttctggcatctctaagcttccaggcatcgctgtgttccctggtgccagccgtggaaggtgcttgcagtgcacctggtccagctgcagccttgcagagagctggtgtcagcacctggagctgcccatcccactgcagcagccggcatgtctaactgcactgtggccagacccagtgctcgctcacacacctcttgctgccccatgcctggctcacccctggcaggcatgggatccaggctggtagcataagccaagcgcaaccttccaggccaagtgtgtggaacgaacccagagccagagaaacacaattctacaggtatcatgggaaatatgtgctttattccctataaaaacgtattagttattgtgatggttaatattgagtgtcaccttcattggattgaaggatgcaagtggactggaaaacgagacctaccctcaatcagctgccagcaaggactcaataaaagcagggagaagaacatggaaagactagactggtttaatcttgtggcctacatatttctcccatgctggatgcttcctgccctcgaacatcaaactccaacttcttcagctgtgagactccgactggagtccttgctcctcagcttgcagatggcctacctgcaagtgggacctcaccttatgatcgtagaaagagctgaaattgtggaaaatcagacacaagctcttatcatgtgcgtggctgacctgcaatgaaaggtgcacacacacccttgccaggtgtctgctgttaaggcttaaagagtctgtcctaacagtcttaaggtctgtgttgatgttaatggtaataagacatgtccaactctcccttcccatcatagcctgaactcgttttacaggttaactttaggatacccttggcaaagaggaaatgccattcagatggttggggagcttagaattttattttttgtttacagtaggtgtttaaataaagagaatggataaaatcacttaggaaaggtatttagaaagaagacaatactaacactaattcttaaaatcaagagtacatacatacatacatgtgtatcaaccctcaatgcgcaaaatatattaccatctataaacactcaggcatactcataagttttcctttaggcctattcgtgagaatcactgaattatttagttgcttcttaagtatgcttttctttcttttaaattagggatcttcaaagaaattggtctgatatggtttgactcttgtccccacccaaatctcatctgaaattgtaatccccacatgtcaagggagggacctagtgggcggtgatttgatcatggacgtggttcccccatgctgttctcatgatagtgagtgacttctcacgaaatctgatggtttaaaggttgtatgatccccctgccccctcatgacaccatgtaggatgcaccttgcttctcctttgccttccactgtgattgtaaatttcctgaggcctacccagccatgcagaactgtgagtcaattaaaactcttttctttctaagtgacagtctcaggtagttcttaatagcagtgtgaaacaaactaatacagaaaattggtattgagagaagtgggacatttctataaagatacctgaaaatgtggaagtgacattggaactgggtaacaggcagacattgggtaacaggacatgacattggaactggataattggatcagtttgaaggcctcagaagaagacaggaagatgtgaaggtttggaatttcctagagacttgttgaatggctttgaccaaaatgctagtgatatggacaatgaacatctaggctgaggtggtcttagatgaagatgaggaacatattgggaactggtctaaaggtcacacttgctatgctttagcaaagacaatggtggcattgtgcccctctcctagagatctgtgaaactttgaacttgagagagatgatttagggtgtttggcagaagaaatttctaagcagcaaagcattcaagatgtgacttggctttttctgaaagcatacagtcatatgcattcacacagagatgatctgaaattgtaacttatgtttaaaagagaagcagagcataaaagtttggaaaatttgcagcctgaccatgtgatagaaaagaaaaacccattttctggggagaaattcaagctggctgcagcttaatttgcctaagttaagagaagccaaatattaatcaccaagacaatggggaaaatgtctccagggcatgtcagagatcttcacagcagccccttccatcacaggcctggaggcctaagaggaaaaaatggttgtgtgggccaggtccaggaccccactgctctgtgcagccttgagaattggtgccctgcatctcagccactccagttccagctgtggctaaaaggggccaaggtgcagcttgggccatagcttgagagggtgccagccccaagctttaatggcttacacgtggtgttgggcctgcaggtgtgtagaaggcaagaactgagctttagaagcatctgcttagatttcagaggatgtatggaaacaagtgaatgcctaggcagaagtctgctgcaggggtggagccctcatggagaacctctactaaggcaatgcagaaatgaaatgtggtgttggagcccccacacagagcccccacaggggcactgcctagttgagctgtgagaagagggtcaccatcctccagactgcagaatggtagttccattgacagcttgcaccgtgcacctggaaaagccacaggcactcagcaccagcccatgaaagcagctgcaggggctgtgccctgcagagccacaggggcagagctgcccaaatcatatgcaaatttctaaacctggcttgagtttcttcccagaaaatggatttttctcaaggccttgagagcccaccttttgcat

SEQ ID NO: 467292 - DNA, 3109 bp, Homo sapiens
gccagggctgtgactccctctttggggccctatggttcctgaagtctccaagcttcgtggtgccactgcattccttagttccagctgtggaagctgctggcagtgcacttggtccagccacagcctcatagacagccagcacccgcgctggcacctggagctgcctgccccactgcagcatacttgactgtggggtgtcctggcctcctcctttgtagctctcaggtgtcacatgtgggtcctgccctaccatcccctctccctgtctagaaatgaggcctgctgagcttggagccgccccactccctgctctcaagccgtctgctcctgggttagcctgtggctggcctggcctgattctacaccgacgtgggtgtttctccactgctggggcagcggtcggccatcctggggcctgggtcagctctcagctgtggccattgtgcctgtgcttcccccaggtcctggtggtgactccaaccctgccctcagatatcccaagagcaggctgactgtcttccccattcccacctttccagtagctgctgcaagaagggacagaccctgctgcagagaacttgccacggcgtttcatgctgcggctgttggggccaggctgcacgctccattctggggaagagtgaggattcctgatcatcggtcttaacaggggactgtccagtgggtacctggataggctgccaggagtagggtggagtggggttagagtagtgcctgctgccctccccgcagcaaccctagtctcccttccttcaccctcttgacgcctctctaagtctgacttgcccgtgtaccatgggtcagagcccgccacttcccaggcctcccagtgcttccctgggcagattctgggatcattcagtggtgactgccctgctagggtgtcagctgtcagatcccttcacaaccccccaactcaactctgccctgaagcactcacggtgggctcccaactgtcactgtctccagggccaagggccaaacttcacctgcctcaccaacaacaatctcaggatcgattgccactggtctgccccagagctgggccagggctccagccccgggctcctcttcattaggatggcagcagctacaccacgacagtgtaacagccccgtggtgctgacacttgccctttctagcaagcaggctcctggtggcacacataagtgcatcttgtggggcagtgagtgcactgtcgtgcttccacccaaggcggtgctcctgccgtccgacaatttcatcatcactttccaccactgcacgtttgggagggagcaggtcagcctggtggagctgcagtacctgccctggagacacgtgaagctggacccgctctctgacttgcagagcatcctgacctggagcatcagtcctgccttggagctgatgaccacacttctcagctatgagctgggcttcaagaggcaggagagcaagtctggtgctcaaggagacactgggtggggtggcagccacagaacttctgctgatgtcaaagacaaggttcctggaggtgctggctccctctgcgggctgaggacccggctgacttggatgggggcccacggggcaggtgtgctgctgagccaggactgtgctggcaccccacgaggagccttggagccctgcatccaggaggccactgcactgctcacttgtggcccagtgggtccttggaaatctgtggtcctggaggaggagcaagagggcactgggaccagcctctggggcaacctgagctcagatgatgtgctgccagcagggtgtaaggagtggagggcacagccgcttgcctatctgccacaggaggactgggcccccatgtgccccaccaggccagctcccccagactcagagggcagcagtaacagcagtgactactgagcctcgagctgctacgggggatgccacccctcatccctcccaggaaacacacagagccctgggcccatcccagccctggcctgtggccttttctgtgaccatcagggcttggagacccagcaaggagatgcctgggtgctggctggtcactgccagaggtccgggctgcatgaggacctccagggcacgttgctcccttccgtcctcagcaaggcttggtcctggacgttctaagtccctgacttgccatatgcatcatgtccattttgggaaaatggacttaagtctctggaacccttgtctgggactgaacctcctgagaatgggccctagtagtggttggaggtcctctctggatggaggctcaggggcagcttcagggaggaaggatccctctgctcagtgcctgtggggagaacctctaccctcagcatcctgcccacaggtttctcctgctgtcccttttctttatccctggcctctctgagaagaaggttatggtctctcagctgttccgccctcatccccttaaagggccagccagggcccagtggacacaggaaactgagagttgaggctggagctcccagacagtcagtgctggaagtgaccatccagcagtgatggtggcctgtgaagggtcctgcttctgtcctcagcctctcatggggtgggcttggggaggagctgtggtctggagagagcggcagatggagcacaacatgcctgcatttgtttcctagggctgccgtaacaaagtgccacaaaatgggtagcttagaatcacagaaatttgttgtctcacagttccaaagaccagaagttggaaataaagatgttggcagtgttcccgactacatgttctgaggctcccacgaaacagaagttgatacaaggccaagtttgttttttaaatattttctctcagtctgtggcttgttttttgattctcttaactggatatttcacagagtagtcattttaaattttaataaagtccacattatcattttttatcttatgaactggcttttggtattgtatctaaagactcatcaccaatccaaagtcatatggattttcttcaataacttttacaattttatatttgaaaatttaagtctacagtctatcttgaattattttttaggggtgagctatgaagtttgtacctacgttcatttttttccctatggtttcc

SEQ ID NO: 467293 - DNA, 1370 bp, Homo sapiens
ccgtggtgaagacaaaggtttcgttcgaccctgcgtgtgatttgctgatttcggttggagaccttgttgaccgcggcgcggaaaacgtcgagtgcctggagctgattactatgccttggttccgggctgtgcgaggtaaccatgagcagatgatgattgatgggctatcggagtatggaaacgttaaccactggctggaaaacggcggcgtgtggttcttcagtcttgattatgaaaaagaggtgctggctaaggctctggttcataaatcggccagcctgccattcgtcatcgagctggttaccgctgaacgtaaaatcgttatctgccacgctgactacccgcataacgaatatgcgttcgacaagccggtcccgaaagacatggtcatctggaatcgtgaacgggttagcgacgctcaggacggcattgtctcgccgatagctggtgctgatctgtttatcttcggccacacccctgcgcgccagcccctgaagtatgccaaccagatgtacatcgatactggtgccgtgttctgcggaaacctcacgctgtgcaaagtatgcggtgaatacttcgtgccgaaattccacgacatccggatccggtggtgcagcccggagcatggcgcaatcctcgcaatggaagaacgcaagaaggacaacgtgaaagccgcggctaagcgcatcaaggagcaaaaagaggctgaaaaggacgggcgcaaacgccgcaaggagcggctggcagagctcaggccagacggatactacaaggctcaggctcagaaagctttcaacgcctttatccgtgcgcgcgacgccgatttgccatgcatcagctgcggcgagaccaatccgcctgatctgcatggtggccagtgggattgcggccatttcaagacagtaggtgcttaccctgaactgcgctttgaagaacgcaacgcccataagcagtgcaaatcctgtaatgccggagctggcaagtacaccgccaaagaggcgaccgtggcgcagcaatacgaagctgggttggtcgctcgttacggtcagggatacgtcaactggctcaatggtccccacgaaatgaccaactaccgccgtgaagacttcatccggatccgggatgagtaccgcgacaagctcaaagcactgaaacagcgggaggcagcatgaaaccaatgatattcgatctcaagctacctcattgggcttttctgcttgagtgtccgttctgtggcggcggcgcagaacttttttctgatggtgatggtgtctacgccggttgttcaacaaagcaatgcttgattaagccgataactgacacctatccaacaaagcgcgatgcaattcgcgcctggaatcggagtcttc

SEQ ID NO: 467294 - DNA, 4672 bp, Homo sapiens
tgagggacaggcaggggatctttcctgtccccgtgtcctcatcacatgcacaggttacagtcactgacacgacgcccatcccaggctgcagggcccactagcgaccgcatcccttatcgaggcaaccgaaggaaacccagggccccagaaacagcgaggagaccctcacccagccgggatacagccaccgtgaaagccatctcactcagcgagaaaccgagcaaagggcgcattccttaccttcctggtgagcggcacctcgatgggcacggggaccacctcggccagcaggcagccgtagaaagccgccatgaaggcagccggatcattgttggggaacaccagtgccacctgtgggacaggccagagcgggtcagcattaacgtggggtcctggcttcctaagacgccacggaagagcttggttctaggtgagagggcacgcttcagtgagaaccagatcctatgtaaaatgcatttcagtaagctgtgttttaataagcatcacacacccggccttgaattcatatagaagacaaacgtgaacagtcgtctatgatactgtcaccagagtacaactgcctttattttctgcatactaccttccatacccacacgtttccacatagatgaagttatatcctactgtttctcactaagctttgtaaatacttccttgtatttctatacagtcttcataactgtcctgggacagcatgtgcaggactcagctcagatcccatggcagtgtttggctctgggatctcaggcacaattgtggcctctctgagccttagtgttcttctctgaaaagtgagaataatgatagagctgatgtcttaatgcggtggtcaagagtgttaatagacaaccctatttctggattcccactaagccctgtgaactctgcttctattttaacacaggttacttgtacatgtggggtagcattagcgttactcttccttctggacaagtttggtacattttcatcagcacatgaatcctgtgattttacacgtgtggtagcattagcattactcttccttatggacaagtttggtacgtgttcatcagcacatgaatcctgtgattttacatgtggggtagcattagcattactcttccttatggacaagtttggtatgtgttcatcagcacatgaatcctgtgattttacacgtgtggtagcattagcattactcttctttatggacaagtttggtaatcctgtgattttacacgtgtggtagcattagcattactcttccttatgaacaagtttggtatgtgttcctcaccacatgaatcctgtgattttacacgtgtggcagcattagcattactcttccttatggacaagtttggtacattttcatcagtacatgaatcctatgattttacacgtgtggcagcattagcattactcttccttatggacaagtttggtatgtgttcatcagcacatgaatcctgtgattttacacgtgtggtagcattagcattactcttccttatggacaagtttggtatgtgttcatcagcacatgaatcctgtgattttacacgtgtggtagcattagcattactcttccttatggacaagtttggtatgtgttcatcagcacatgaatcctgtgattttacatgtgtggtagcattagcattactcttccttatggacaagtttggtacattttcatcagcccatgaatcctatgattttacatgtggggtagcattagcattactcttccttacggacaagtttggtatgtgttcatcagcacatgaatcctatgattttacatgtgtggtagcattagcattactcttccttatggacaagtttcgtacattttcatcagcacatgaatcctgtgattttacatgtgtggtagcattagcgttactattccttatggacaagtttcgtatgtgttcatcagcacatgaatcctgtgattttacatgtgtggtagcattagcattactcttccttatggacaagtttggtacattttcatcagcacatgaatcctattttacatgtgtggtagcattagcattactcttccttatggacaagtttggtacattttcatcagcacatgaatcctatgattttacatgtgtggtagcattagcattactcttccttatggacaagtttggtatgtgttcctcagcacatgaatcctgtgattttacacgtgtggcagcattagcattactcttccttatggacaagtttggtacattttcatcagcacatgaatcctatgattttacacgtgtggcagcattagcattactcttccttatggacaagtttggtacattttcatcagcacatgaatcctgtgattttacacgtgtggtagcattagcgttactcttccttatggacaagtttggtatgtgttcctcagcacataaatcctgtgattttacatgtgtggtagcattagcattactcttccttatggacaagtttggtatgtgttcatcagcacatgaatcctgtgattttacacgtgtggtagcattagcattactcttccttctggacaagtttggtacattttcatcagcccatgaatcctgtgattctacatgtgtggtagtattagcattactcttccttatggacaagtttggtacattttcatcagcacatgaatcctgtgattttacacgtgtggtagcattagcattactcttccttatggacaagtttggtatgtgttcatcagcacatgaatcatgtgattttacatgtgtggtagcattagcattactcttccttatggacaagtttggtacgttttcatcagcacatgaatcctgtgattttacacgtgtggtagcattagcattactcttccttatggacaagtttggtatgtgttcatcagcacatgaatcctgtgattttacacgtgtggtagcattagcattactcttccttatggacaagtttggtatgtgttcctcagcacatgaatcctgtgattttacatgtgtggtagcattagcattactcttccttatggacaagtttggtacattttcatcagcacatgaatcctatgattttacatgagtggtagcattagcattactcttccttatggacaagtttggtatgtgttcatcagcacatgaatcctatgattttacatgtgtggtagcattagcattactcttccttatggacaagtttggtatgtgttcctcagcacatgaatcctgtgattttacatgtgtggtagcattagcattactcttccttatggacaagtttggtatgtgttcatcagcacatgaatcctgtgattttacatgtgtggtagcattagcattactcttccttatggacaagtttggtacattttcatcagcacatgaatcctgtgattttacatgtgtggtagcattagcattactcttccttatggacaagtttggtacattttcatcagcacatgaatcctgtgattttacacatgtggtagcattagcattactcttccttatggacaagtttggtatgtgttcctcagcacatgaatcctgtgattttacatgtgtggtagcattagcattactcttccttatggacaagtttggtacattttcatcagcacatgaatcctatgattttacatgagtggtagcattagcattactcttccttatggacaagtttggtatgtgttcagcacatgaatcctatgattttacatgtgtggtagcattagcattactcttccttatggacaagtttggtatgtgttcctcagcacatgaatcctgtgattttacatgtgtggtagcattagcattactcttccttatggacaagtttggtatgtgttcatcagcacatgaatcctgtgattttacatgtgtggtagcattagcattactcttccttatggacaagtttggtacgttttcatcagcacatgaatcctgtgattttacacgtgtggtagcattagcattactcttccttatggacaagtttggtatgtgttcatcagcacatgaatcctgtgattttacatgtgtggtagcattagcattactcttccttatggacaagtttggtatgtgttcatcagcacatgaatcctgtgattttacacgtgtggtagcattagcattactcttccttatggacaagtttggtacattttcatcagcccatgaatcctgtgattctacatgtgtggtagtattagcattactcttccttatggacaagtttggtacgttttcatcagcacatgaatcctgtgattttacacgtgtggtggcattagcattactcttccttatggacaagtttggtatgtgttcctcagcacatgaatcctgtgattttacacgtgtggtggcattagcattactcttccttatggacaagtttggtatgtgttcctcagcacatgaatcctatgattttacatgtgtggtagcattagcattactcttccttatggacaagtttggtacattttcatcagcacatgaatcctatgattttacatgtgtggtagcattagcattactcttccttatggacaagtttggtatgtgttcatcagcacgtgaatcctatgatttagcacatgtgcatcatttttgcattacttcattctgga

SEQ ID NO: 467295 - DNA, 613 bp, Homo sapiens
tgctgtgaagagccagactggggcagatgctgtcactatgagctccggcagctggatggtgacagaggactcacctcttctgatccaccggcccagggctgctgaccacagaggagagaatatgaatgtgcacacgcacaagaaagacggcctacagaggaagaccaccattgtgaaagtcagttgtcgaacaggggtattagccatttctgcttggttttctgcccctgtttctgatgccctttttattcttggagccatggtggagcaggggccacagaatagaagtacatcagtaaacttgagacttagcagcagaatggagggagtgaagatagagacaaagacaaacagcttaacaggagcctttcacccgatcaggtccttgtgtgtgtgtctcagtgcatgtgtgagtgtgctgtgcatacatgcatgtgtgttttgcaagtgtgtgaatagtgtctgcacatgtgaatatgagtttgtacatgtgcgagcttgcctgtgtcatgtgttgcatgggtgagtgtgatgtgggtacaagtataagtgcatatatgcatgagagtatgagtttgtgcaagtgtgttgtgtatatatgctgttgtgtgtt

SEQ ID NO: 467296 - DNA, 894 bp, Homo sapiens
ttgcccggctgcttagagcgagttccggtttctccacacgctcagggccgcccctggatccggtttctccacacgctcagggccgcccctgggttccggcttctccacacgctcagggccgcccctgggttccggcttctccacacgctcagggccgcgcctgggttccggcttctccacacgctcagggccgcgcctgggttccggcttctccacacgctcagggccgcgcctgggttccggcttctccacacgctcagggccgcgcctgggttccagcttctccacacgctcagggccgtgcctggtttccggtttctccacacacgcagggctgctcctgtcacacttcatggtggaaagtgacggaaaccaagttggaccatttcagcaagcgaagattgaagtaggagagaggtgcctgaggaactggagggttgggtggaggtgcagcccagtgacagggagggtctggaagcaaagcccagaagatcctcaggagtccccttgtcaccttgcttctctgccctgtgcacacttctgtgcagatggatcagctctctgtgctcattccacctgggagaatgctgcagccccacggtcattagacctcctctgtcagacggctgcccatcacaagctaatgggcctgaggcatgggcttggtcacccagaggcaggaggctgtgccctccatgaggccagcagtgtcgcatctcaaaagccaagaagagagcacacaccctctcctctctggcatgggctgagcagagcgatgcctccagagagggcatgtggaagggacggggaaaacctgcaaacgtgacccagctaagtgcgaggtcaccatcagtgatgagcaggggggctttgatatgacgccatgggaagggc

SEQ ID NO: 467297 - DNA, 590 bp, Homo sapiens
tctggaagcaggaggcacagggctgccttgaggaaatgggaactcgggaagatggtgaaacagtcgcagaagccaccgagagagaaggctggtaggaaacaccgacaggtgctgtcgccaggaagtctgtatggggaacgattagtgggcggcagacggaggacgtggagaggccggaggagacttgctgtgtttacctggacaaatttgttggtggttgtggttgagctggatgggtcggaacaagaagccttggacctggttcccttggtgaccaacgtggtcctggaggagcactacctgatcgtcggagtggtggtcgtggtggacatcggcgtcatccccatcaactcccgtggggagaagcagcgcatgcacctgcgagacgggtttttggcagaccagctagaccccatctatagatgtagacattgttctccgtgtccactgaagcgtgcagacacagggcaacactcaccagaatacagccatttgtggtgagagtggaggaggaagaggaggaggaagaggacttctcacagcagccacgattggcatgggggtgaaatgtgaatttaccactgaatttc

SEQ ID NO: 467298 - DNA, 582 bp, Homo sapiens
gcagcaaatgcggcagttaggaaatgactccttgtgctaagcaacctctccacagaagcagtgtgactgcttctgtccaggtggacagaccattccttgtgcgaggggccgtggagaatgcagaacacaacttcacagtagcaaatcctatactcacccacctgcgctggaacacacacacaccggcgctggaatgcacgcatgcacggcccaaaggaggccccacgggagcagttctcctggttacctggtttgtacttgaccggtcacgatcttgggcaaaagatgcagcttttggttgtcaaatggataaagacaatttggggtggaacagtcaagtactcgtacttcctgacacgcaaaggttccctacgatacagctgatagaaagcatttgcacacaggactcacgctgtttgtccccaaattaccaataatctgtacacttgcagcaaaatgtgaacaaatatatttagatatatttaaaagaattaaaaaaaacatttcacaaaacatttgttgccataggaattatttttagcaataaatgcccacatcaaaatttaaacatttttcaaagta

SEQ ID NO: 467299 - DNA, 1000 bp, Homo sapiens
tgttctgctcggacctgttcctgagagctggaggttggtcaagaagcatgaaatcattcaaatggttctatgaactcaggtcaatgaaggagaaaacagtggagaaaactagtcctggtcctgtccctattagttatgtcctgaaatttgatgatttttctcctttggctgcaagctacaaaattcttaactccttgcaatgtaggatctttggctatgaaatgaaaaatagtagatccactgacagcttgcaccatgtgtctggaaaagccacagacactcagtgccaacccatgaaagcagccgggagggaggctgtactctgcaaagccacaagggcagagctgcacaaggccatgggaacccacctcttgcatcagcatgacctggatgtgagacatggagtcaagggagatcattttggagctttaagatttgactgccccgccggattttggacttgcgtgggcccttaagagtaacttaggaatctacttatcagggattgcaaactcaaatgcctaccagaatcaaattattaatttccaaacagcctagctattaggcaacatttgattgaaaacattgcacgtgtaaaaggaaaaagaattgctatcacaacaattcaattatttggtagatacatttataaaagacagctgcatttgaaaaagttgacaatagatggtcagattaaagaggacacatgaatggatctttctagaaagatacattcatttatacacagaaggtaaccaacaatggaatgtttcttatgaaaaccgcattttcaaaatatgtagaattttaaaatatactgtgtaaaaatggctttgtcaactgtgaatgcagttcagtgttcatggcttgtgttggcgattaagtttggaggctgaggagaaaagcaactaaagcatctccgacattgtttggtgaaatgtattaactttggtgacctcctcaaggcagaccaatctcatcctcagtaggtaactatacc

SEQ ID NO: 467300 - DNA, 714 bp, Homo sapiens
cccatacacctcacgggccaagcagtcacgttataagggagggaggcccagtaaaacatgggggggtccctgccgtaccctcctttgtttctgatggtccagcctcttctggtctgtggcttctgagagctttgcttgtgccgcgttctgcatgttggcgatattcgaatgcttcttcgccagctgcactatgatgcatgtcttgctactctcttcaggttcccttggtcaatgggaaaacactgtccatccttttcctccctaaagcttaaccatctaatcagccctctctcccaccctgtaattgcatgctgctccagccagtctcttgccttcagcgttcttgagatggatggaaaccaggcaaagatgccagcaaatgcctgtggatgctctttggctctcctaagaacacttgttgttctctatggtctggaagcagcaccagggcctgtgatgtcagggctctgtaaacatccagccaggaaaaagggaacccacacagaatcccacgggcatctgagcctggagcagtctcagctgggagccactttgagagcccagataccagggatctacagacacagctgcagctgctccaaggaggaagaggcaagactgggcgctcccatgcaccctcgggaaggtgcttgccactctgctataagctgctgtggagactgagacacgagtgaactgccctcccccatgctg

SEQ ID NO: 467301 - DNA, 693 bp, Homo sapiens
gcctcacagatatgaataccagacttggatgaggcactgggctttttactggtccaacaacttgattctactatgcactaaaatcaaagaggaaaggaaaaattcacttgaatgtataaccaatatcccaaatgcactgcagtttaccagtgggctaaaaactgaaagattaaaggaaaataaaatttttcttgtgcagctgaagaaaaatatatttcttacaaagcactcaaaagaaatgtatttcagaaatgattttcagcatctgctttgtgcaaagcaccatgctaggtgctatgtaggacaggagatgaaagcaacacagttctctccctcgcacaatctaacaatccaattggaaaggaaaattccactagcccaagatagaatgcagaatggaatacttcaggtgggacagccaggtttaggtggctataggatacaaatcaataggaaacagaataaaatagatgaaaatcctgtgtagaatatgttatatgggggtataactgtagtgtatattgtgtatgcctgattggcttcatttctgagtgctttcatgataccaaggctctgtacaagttccttggttgcagataggtttaacagtggttatctcagatgttgcttgttgtagcaatctaattttgtttggtggtgtagttcagactgcaggccagtaggtgacatata

SEQ ID NO: 467302 - DNA, 569 bp, Homo sapiens
tgcttcagagctagggtcagagatggggatgccaccttctctaggaacctcgcgagtgcctggagtcaagttccaattcaaggttttctacattgcttcacaaattagtacagcatttgtgataactgcagatggcagaggaggaacatctgcaatacttaacaattcatatttcttttatatttgtatatataacttaaaagtgcaaggtgaagcaggaagtgctgatgcagaggctgtaacaagttatccagaagatctggctaagataactgatgaatgtggctacactaaacaacacattttcaatgtagacgaaacagtcctatattggaagaagatacctaggacttttataactggagaaaagaaaaatcgccacagccacgccaatcttcagcaacatcaccctgatcagtcagcagccattaacgtggaggcaacacctttcaccaataagaagattatgactcgctgaaggctcaagtgatcattagcattttttagcagtaaagtattactaattaaggtatttgcatttttataaataatgatattgcacacttagt

SEQ ID NO: 467303 - DNA, 550 bp, Homo sapiens
agatcctccagaccagccctttggccagatgagtgattcagatgagagcaagaacaaatccaaatagcacatttacccacagaatcccaaaggcaccaactcccaggatgggggaaaaaaaggatgttctgacctcctgctgcaccagcaactgtgctgtgcaggactccttgaatattccagagcaaatgcaggatccatgtagcctcgctcccctcaatttctcaacagcacttcccctcactaggctctctgatggtgttgctcagtgtcccagtgaaagactgaagagccttgggcagtggacagtggacagtgagggtggctgcctctcagaggggcgccagtggcattctcaagggccacactctcacctgctcacttatggagtgtggggctcccgagttctccataggagagcttgctctttctgtgcgtatttcttgctttaggtcatctgatgaaaacttgcctctctccttatttagaagagcctgttagggctcaaactcatgacaataaatattaatcaaaatttccaaaccaaagg

SEQ ID NO: 467304 - DNA, 543 bp, Homo sapiens
aagttaaggcactagttcctgtggcctggagttgagtggtgagtgatgagcagaccacctagcacacagggaggtttgcaacaggtaagcaggaagtgggactgtgaatataatgacatttttctgcccttctggatccaaatagtgtgtaacttggcataccatgtctgttcaaatgacagcaactcgctgtcctttaagaacaaatacatcttctcagctgactccaaagccacatatgtttgtgtgagcaaaaaacaggcccagttggcaaataaaaatcacaaagaaatcacggtatacaatgactcaaaatcacaaaagtcagaaaaagaaccaaacagaaatctaaaactgaagatttcaattaatgaaatgaaaaatacaatcaagagcttcaacaatggactagatcaaacagaagaaagaatttccgaacctgaagacagattttctgaaataacccagtcagacaaaaaaagaaaaaaaaaagaataaaaaataataaagaaaatgtacgtgacatacaggataccatgaatc

SEQ ID NO: 467305 - DNA, 1684 bp, Homo sapiens
ccgagcagaaaaatcttcccagttatgttgggagtgttttaccccaacatacaagtgggctgtacaggaagcatagtggcatctgcttctggggaagcctcagggagcttccaaacatggcataaggcaaaaagaaagcaggcacatcatataacgaaaataggaaaagagagagaggagaaaggtgccacacgctttgaaatgaccagatttcatgagaactcactattgcaaggacagcatcaaggggatggtgctaactattcgattgagcagagaaagacttcataccgtgatgcttatctgacagtctgggacaacccagaggaaattcccattagtggaattggctttggcaaggatggtctggctctggatgacaaggtgctcacttactattgcagtgtgaatgaatacaaagatgaacaaccattgtacatgtatggaagatttgatggagagagtacatctttgcggggaacagaattgccctttggtgcccttatcctgctacttgttttgaatgggggacttgttgttacgtagcttattacaaaagaaaatagcaatatattttctaggcgaaaagaaacattttgcaaaataagaaaaaacaaatagttaatttagagttagattatacttaaaaaggcagtgaaacagataaaagaaatacaaatggccaataaacaattcaaaaaaccttatttaacttcactagtaatcaaagaaatgcagattcaaactgttatcggcagcaaatgtatagggcatttcagtccaaaagcaattaggagaggcacagcagggtggatctccacacctgggaggattataggggccctgaacaggtgttggaaaacagagttacaaatatggaaagggagaaaactagaatacattctggtgttgaattagaattacagtatcaatgtgaacttgtgttttcaatgtacgtacatagaaatcgaaagacgtttacattatggctcaaaaacttcttacaaaagcatatgtaccctgactgagcgattctaatgggaatttatgttatgtaattaaaattatatgcaaagatgttgccatactaatacttattggaatgtcacttctatttgcaaaatcccaaattaatgacaataatgtattgtttacataataaacacaagtattaaaaatgatggtgtggaaatatgtatatttataaaaagatgttcatggcccaatactaaatggaaaaagtaggtcataatatgaacccattttttgttaaaatacatatttatacaaacaagtaaatgtatagaaaagaatctgaaaaaacatctccaaaatataattgtggttaacttggcattaagactatagtgatttttaagtttttctcattctttttgtttacctgtatttttaaaattatgcatgaagaatgtagtacttaggcaattaaagttttttaaagctctattaactcatatgtatcagatattgaatgtcatgacttggtaggttttaaataatttttgtcatgttattggtgtacattttcccttagagtcaacagaacccaatgttatattagttttcctttcacattctcttgctcaacttagaaagcctgtaactttcttaaagaaaagcattcagcttgtctcaaggcatttccataagttgatttaatcac

SEQ ID NO: 467306 - DNA, 499 bp, Homo sapiens
aggagatatacctaatgctaaatgacgagttaacggtgtctggtgagagctgctctctgcttccaagatgccgctgtaatgctgcatcctttagagaagagatgaagactcaacattatcaaaagacatactattcaggtgaaaaagggaataaatctgaagtgacagaattcacatataattcagacatacattctagcttactgaagggaaacatgtcaggtaaagctttcatctttctcccatgctggatacttcccgcccttgaacatcagactccagattctttggcctttggactcttggacttaacaccagtggtttgccagggactctcaggcctgcggccacagactgaaagctgcactagttttgaggctttggtgaactgtgcaaaatgtccatcttccagagcagaaaaaaggaaaggaaacacaaaggatagtgtaaagtttcaggggcaatatgtgtgaaattgctgattgaaattgctgattgc

SEQ ID NO: 467307 - DNA, 569 bp, Homo sapiens
tagagctgcccaagaccgtgggagcctaccccttccatcagcataccctggatagtgaggccctatgcaggtggacagactacttcaaaacccactggaaaacttggccctgggacataacaggaacaaaaagcatgtggtaccaggttggccgcagagggatagagcaacaagcaggctcttggagtccctgattccagaacttgcctcttggacagcatttctggacctgcctggggccagacgggagttcactggtctgaaggaagcacgggtacaaacaagctcagacagtgaagactgcaataaatacctaattctgcaatgcccagacacaaacaaacatctgaaagtattaagacaatccaggaaaataggccctcaccaagtgaatgaaataagacaccaggggccaatcctggagaaacagatatatgaccttccagacaaagaattcaaaatagctgttttgaggaaactcaaagaaattcaaggttcagaaatcaaagatgaataaacctcaaaagctaaaaggaggatgtcaaatgttcccagtataaaaaaatgat

SEQ ID NO: 467308 - DNA, 553 bp, Homo sapiens
tgaccaagctggtcttggcacgtccttgtggcagtatttaaagaaaaggcgttgttatcatgacggatgacagctccatgcgtgttactgcccctggaggcctctcagtgggagaagatgtggaggtggaagacagtgatattgttgattctgacccttatcattctgaagccaaaattcagcaaagaaacaacaacaacaaaagaaaacttcaggccaatatatttgatgaaccgaggtgcagaaacctcagcaaaatactagcaaaccaaatccaacagcatatcaaaagcctaatccactatgatcaagtaggctttattcctaggatggaaggctggttcagcatacacaaatcaataattgtgatttatcacataaacagtactaaaaacaaaaactacctgaacatcttaatacatttagaaaagcattttgataaaattcaacattcttttatgtaaaaaccctttacaaactaggcattgaaggaacatatctcaaaataataaagagctgtctgtgacaaacccacagccaacattatagtgaa

SEQ ID NO: 467309 - DNA, 689 bp, Homo sapiens
gtttatagctggtgaaggacctggtcagaggtaattgaataatgggagcaattcccccatgctgttctcatgatagtgagtgggttctcatgagatctgatggttttataagaggccttttcccctttgcttgccacttctctgtcctaccatcatgtaataatgccagagatatcacaaaagtatccagaaatattgtccacttaatttctctgacagtgactgtgttttctctgtgtttctattatccacctaatgggtgtgttcagtccgttgatgggtcacagtcaaatgatcacaaccaaggaagatttaacaaggaaattttattacttgcaacaagtaaggagaacatgggggataatttccaaagcaatgcctctccaaacagcaataaaaacagagcttttattgggctgcttggctgcatcattgtatgtagaggtggagtaaaggcagcacaggtgcagtaatcaataatgcttctgtacatccatgtacagaaaaaggcaaagaagcttctccctggaaaacaacattacctttggaaaggatttattgaaaatcatgaagttatattatttagaaaataaaagtttgtattaaaaaattatacaaccaaaatatcaatagttacatacatttgctttgacatgttgttcttaatggttgcttcacatgaaataatt

SEQ ID NO: 467310 - DNA, 1178 bp, Homo sapiens
ctaagtaaaacatccctgtgggctggatgtggcagattggcagggcagcataaacccagatggagaaagtggtatatgtgtggtgtgctcagtgggctgagagaccgactgatgatggagaatatcagagaattaaaagctgacagtttgtcaaccaaaactgagctcttctgtggcagccatgagaatgtctcagttcagctgcaaggattgcgactgaataagggcccagctgctggatctgaaatccatggctccaggggcgccattcccttaggctgctcccagccaatgacagtgcagcagggattctggggacacctggtggcagaacagagtaagtgcaagcaggggaactgccagacacttataaaaccatcagatctcatgagaactcactcactatcacaagaacagcaggcgggaaaccacccccatgatccaattacctcacctggtcctgcccttgacacgtggggattatggggattacaactcaagatgagatttgggtggggacataaagcctaaccatatcattatccctctgaattgttgggtacattcttcaatgaccaggggctttgggacatggagaagaatactcctagctatttgtactttgtttaatgctcagattattaagcctcatatatctaatatttgaaagctaaattttcttgaacatttaagaattaaatttaattaattacatttccccaaacaattttaaactgtaattacaaatatatttattagtatggttgatttctaagacatttcaaacacttcagatggtaaataaaacatacaaatgataataaaatgtattattatacctaaattatttttgagacatcagaataacaggctaaatttattatgtttgtagttgtttttataccttttttgggttatagttatttttattttaataatatcttgagttttcataacaatttttttgatacattcccaggattgcagtaatcttaccagactcaaaagaaaaatactccaaggttgtaagatgtggcttatcaaagattattcattagagcacaggacttgagggcttcttaggtgagtcaaatttgatccctggtcatgggggctgaacttcttgtttacagtaaagctccacttatcatctcagtaaaacttttcagatcattttt

SEQ ID NO: 467311 - DNA, 951 bp, Homo sapiens
cctttcctggtgttcaccctgtagcagtttcaggtgaggaagaagatttacatgcagcagttcattaagatcaatggcaaggtctgaactgatataacctaccctgctggattcatggatgtcatcagcattgacaagatgggagagaatttctgtctgatctatgacaccaagagttgctttgatgtacatcttattacacctgaagtggccaagtacaagttgtgcagagtgagaaaaatctttgtgggcacaaaaggaatccctcatctggtgactcatgatgctcacaccatccactaccttgatcccctcatcaaggtgaatgacaccattcagattgatttggagactggcaagattactgatttcatcaagtttgatgctggtaagctatgtatggtgactggaggtgctaacctggaaagaattggtgtgatcaccaacagagagaggcaccctggatcattcgacgtggttcatgtgaaagatgccaatggcaacagctttgccgctcgactttccaacatttttgttattggcaagggcaacaaaccatggatttctcttccccgaggaaagggtatccgcctcaccattgctgaagagagagacaaaagactggcggccaaacagagcagtgggtgaaattgtccctgggtgacatgttagatctttgtacataattaaaaataacatggcatgattaatagccaaaaaaaaaaaagacataggtgatcttcagcctgacagctaagtcctcctgcatctatgttcagaatgcttcagttatgtacttgtttaattaaatagaataggaatggcttttctcagttaggcaatgataaaactttctactattaggaaagtagagtatagtaacatcacgtatttaaatggaaaaatcagtataagctttggctttaaaaaagatgtatattttctagctct

SEQ ID NO: 467312 - DNA, 988 bp, Homo sapiens
aaaaaaaattccttgaggattcatgatgagaaggaagaagcagcagaagaagcaaaagaggaagaggaagaagaggaagaggaggaagaagaggaggaagaagaaggaggaggaggaggagaagaaggagaagaaggagaaggagaagaaggagaaggagaaggagaaggaggagaaggagaagaagaagaagaagaagaagaagaagaagaagaagaagaagaagaagaagaagaagaagaagaagaagaaggaagaagaagaagcagaagaagaagaagaagaagaagaagaagaagaagaagaagaagaagaagaagaagaagaagaagaagaaaaccgaaagaagaagaagaagaaggagaaggagaaggagaaggagaaggagaaggagaaggagaaggagaagaagaaggaagaagaagaagaagaagaagaagaagaagaagaagaagaagaagaagaagaagaagaagaagaagaagaagaagaagaaggagaaagtatccaatgtgggttgcatctgagactctgggagaaatctagaccgaccagtggggtcattctaacaatggtggacaatgattttccttcaaacagtagtaggacagcctttagcaaagacactgtgaggctgcaagaagcaatgaggtgggtgcgagggaggaactgttgagtctctaactcctgctctgcctggcatggaagcagatgtgcatgtgtaggaggatgcttggtatttaataagttgggtatttaataacttttttaaaaaggtaaaacatcatcataatgagactccgacctggagtctggtaaattctgatagttctcccaagccccaaacccctgaagtcttcccagccactgccatatgccattggcttgttaacagttgcagcctcttctcagtcacaagtttttgtttgtttttgctttttcacttttgctaacatttaaaaacttttaaaataaaaatttccaaaca

SEQ ID NO: 467313 - DNA, 936 bp, Homo sapiens
ttccaagatctgcaggacactgttcctgagaacgctcgctcccaggaacttctagtgtgcaaatttccatcatctcagcgtctgttttctggaaactcaaccatcatgttgtaacacgatgatagggagagacactgaccttcagcgcctcggctccagcgccatggcgccctccaggaagttcttcgttgtggggaactggaagatgaacgggcgaaagcagagtctgcgggagctcgtccgcactctgaacgcggccaaggtgccggccgacaccgaggtggtttgtactccgcctactgcctatatcgacttcgcccggcagaagctagatcccaagattgctgtggctgcgcagaactgctacaaagtgactaatggggcttttactggggagatcagccctggcatgatcaaagactgcagagccacgtgggtggtcctggggcactcagagagaaggcatgtctttggggagtcagatgagctgattgggcagaaagtggcccatgctctggcagaggcactcggagtaatcgcctgcactggggagaagctagatgaaagggaagctggcatcactgagaaggttgttttcgagcagacaaaggtcatcgcagataacgtgaaggactggagcaaggtcgtcctggcctatgagcctgtgtgggccattggtactggcaagactgcaacaccccaacaggaccaggaagtacacgacaagctccgaggatggcttaagtccaacgtctctgatgcggtggctcagagcacccgtatcatttatggaggctctgtgactggggcaacctgcaaggagctggccagccagcctggcgtggatggcttccttgtgggtggtgcttccctcaagcccgaattcgtggacatcatcaatgccaaacaatgagccccatccatcttccctaccct

SEQ ID NO: 467314 - DNA, 605 bp, Homo sapiens
gtgccgcctctcccataaggggtttgagcacacacagtggagccacacctctgttgcacatcctgtgttgggggagtcaggaactttcctgtttcaacaggtcctctgagttcccttggtcaatgggaaaacactgtccatccttttcctccctaaagcttaaccatctaatcagccctctctcccaccctgtaattgcatgctgctccagccagtctcttgccttcagcgttcttgagatggatggaaaccaggcaaagatgccagcaaatgcctgtggatgctctttggctctcctaagaacacttgttgttctctatggtctggaagcagcaccagggcctgtgatgtcagggctctgtaaacatccagccaggaaaaagggaacccacacagaatcccacgggcatctgagcctggagcagtctcagctgggagccactttgagagcccagataccagggatctacagacacagctgcagctgctccaaggaggaagaggcaagactgggcgctcccatgcaccctcgggaaggtgcttgccactctgctataagctgctgtggagactgagacacgagtgaactgccctcccccatgctg

SEQ ID NO: 467315 - DNA, 512 bp, Homo sapiens
ggacattcaggttacgtaaaaatgatacaaggctcagtcctcagaggaacgtttcatgtcaggccactaacttttggtgtggtttatgatacaaccggagctaacagatccaaacacaacagtggtgaaggctgggctttcagtgaacccatcaccaaaacagtgaacaccgtacccaacagaggcttccctcacccggtcctcattaagtctgtgcagtccagctcctgggatattgttgaatctgccttaggtaaacatttcctgcaatgttctgaaagaacagaaagctgccattccacagaacttacagaacaggctctgcagctgttacttgccagcttgctggtcaatattttccagctgccagcaagaactgacatggctctgcaagcaacagagagggaaggaaaatatgagagaaccatttcagtaccaatagggtctcagcaactgattggatatgggcagcaaggaaagccaggagtggattgattttgaggtattgaacc

SEQ ID NO: 467316 - DNA, 573 bp, Homo sapiens
caagtatttttttttttttgcctctgaccttctagttgaagcaaaattagttatcatcaagtgaatttatgatcgtggctgccaagccaccatttgccgggtccattacaatatcccccctaagcatttcaaatccatcaatagataacgaagacattgtagaaccctgttatgacaccaggttggatgaagttctcatcttcaaatttctccccatagatggacttgccaccagtgccattatggcgtgtgaagtcacgaccctgatacataaaccctggaataattctgtgaaagcaggaacccttataactaaatcctttctctccagtgctcagagcacgaaaattttctgctgtctttgggaacttgtctgcaaacagctaaaaggagacgcggcccaagggctcgccgtcgatggcaatgtcgaagaacacgggttgcccctgccgtcctgtgaagccttgcaggcccatgttcccttccacaagcttcaccctccatattagggaactctgtggtttcctttactcacccttcacatttctgttcaattgctttccttggtaactt

SEQ ID NO: 467317 - DNA, 1912 bp, Homo sapiens
agtctctcctcctgccgcccaagatgccgaaaggaaagaaggccaaagggaagaaggtggctccggcccctgctgtcgtgaagaagcaggaggccaagaaagtggtgaatcccccgtttgagaaaaagcctaagaattttgtcattggacgggacatccagcccaaaagagacctcacccgctttgtgaaatggccccgctacatcaggttgcagaggcagagagccatcctctgtaagcagctgaaagtgccttctgcgattaaccagttcacccaggccctgggccaccaaacatctactcacaagtacagaccagagacaaagcaagagaagaagcagaggctgttggccctggctgagaagaaagctgctggcaaaggggacgtccccactaagaaaccatctgtctttcaagcaggagttaataccgtcaccaccttggtggagaacaagaaagcccagccgatggtgattgcacaagacatggatcccattgaggtggttgtcttcttgcctgccctgtgtcgtaaaatgggggtcccttactccattatcaaggggaaggcaagactgggccatctagtccacaggaagacctgcaccactgtcgccttcacacaggttaactcggaaggcaaaggcgctttggctaagctggtggaaactatcaggaccaattacaacgacagatacgatgagatccgccatcactggggcggcaatgtcctgggtcccaagtctgtggttcgcatcgccaagctcaaaaaggcaaaggctaaagaatttgccattaaactgggttaaatatacactgttgagttttctgtacataaaaataattaaaataatacaaattttccttcaagaaaattactgtaataaaacattgtgagactagcagaaggataaataaacagattaagggaacagaacgaacagacatcagaaacaaatcagcacatctagtcacctaaatatgatagagctacacttttaaactgtgaataaaggattgattattcaataaatgttaaacatttaaagaactgattttgatcagtaactgaggttacccccaagactctgcggtgctgggggtctggagtggtgtaggtgggagtggggtgaggtgtggatacaactccagcagaaagaggccaacaggctgggatgaagaatcaggccagaatcagggcttccagagcagctgaaattgaggaggtggggaggaattccagaaagaagagaccaacagagggagaacccccaaatctgtatataactcctctcgaattcttggctgactcctaagctgcaccagtacagggcaagactccaaggaatccagaggaaagcaagcactgacaagaggtttcaacagctgcccagtgctagagaaacagtgcagagctcagatcccatcaagtaatattaacttcttgtttgtcatacacaatcacaaatattttttcctggcttgtcatttaaattttaactctgcttattgcattttttcccataaacaagatttacagttttatgcatacaaacttgtcaatatttttcagtgtggctttgttttgctgaaatgcttgggcagtctatgaaattatgaaaatagactctataatttcttgattggtaggtttggttttgtttatattattgtttttgttattttgttatggctgattttttaaaactattaaatctttgctctaagttaatatccgagattttggcgaaagtgatatctcttataaaaatagatcagaatcagctctttaagtgtttaacaacatttattgaatgatcaattcacattagatgatcttgggaggtggacgtgggggatcaaaatgatgtgcttgtgattaaacttcctccaagaacaaaaaaaattctcaagc

SEQ ID NO: 467318 - DNA, 654 bp, Homo sapiens
gtgtgaaatcgtaggcttctggtccttggggagaagctgtgaagtttttgctaccagaactaggattctaggaggcttttagatgaccaggaagaggctgagactcctggtggggactcctgctgggaagtttctggaccacagccctcttggtatgaagagagcagaggacaggaccaggctagagcatctgcactctggagctggaaatggggcccagctctgggcctccactctcagtgtcaaatgtaggggcagccccaagcattggaagtcgccctgcaccctggcagctgcttcttgggctctgtctcccatgccgtgctctctgccccaacctcctaggaaggcccagcagcttcccaccaggccttcagcaaagactgctcctgtccctccagtgaaacactgccccaaaagtcacttgcccactcaggctgtgccgtgggggcagctgccacactctggggttccttggtctcccaaggagtccccaccctcacagagtgttggtcagctcttctggctctgaggaattgcagtttacctaaggaaatgggaaggccagagttgcagccaggtgccggggcttaggggtctggatggacagatttccatcctgcttcatttgtcttttacacttctcctctctgc

SEQ ID NO: 467319 - DNA, 1083 bp, Homo sapiens
gcatggtaatcccagcactttggcaggccgaggaagcccttgagtgaagggtagacggtggggctttgagggtcacagggcaagtgctgggcccagcatggccacggactgacttcaggaactcggacagatcacttctccctgcgcctccacctccccaccaccgccgtttgcacagccaggttcgggaactcctggccagcaggctgccaagcccccagctctgacggtctgagtgtctggtggaaagctgcaaagcccttggcccgccagcatgtctgacctgatgttttttgcccacttcaattcctggcatgttgtaatgatgagagatctggttatcctgggatgggacctggttcagtctttgacatcgtggccaacagtcacaagtaccccgaacatctcattccttccaaaatggggttgtcgcctgcgtgccttccttcttcctatgaccctggaaaagattgctccggaaggtgcccactatgtggatgggaagcatcagaggcaagactccaggcacatcagcgtgtctgtggacgtggacatgtggctgccatcttctgcctcttggtcagtgcatattagtggacagcacttagtagctgtggaggaagatgcagagtcagaagatgaagaggaggagagtgcgaaactcttaagtatatctggaaagcaatctgtccctggaggtggtagcaaggttccacagaaacaagtaaaacttgctgctgatgaagatgatgatgatcatgatgaagatgatggtgatgatgaagatgaagatgatgaagaagatgatgatgaagatgaagatggtggtgatgatgaagaagatgatgatgaagatgacgaggaaactgaagaaaaagtgccagtgaagaaatctatacgagatacttcagccaaaaatgcacaaaagtcaaatcagaatggaaaagactcaaaacctggctgcctgaagatctcagaacagcatctataggagatgcgcatccgatcctaggaaggatttctgatgctattttatctttagggacttgttactgggcttctgtctgccaagacaacagaaac

SEQ ID NO: 467320 - DNA, 1044 bp, Homo sapiens
gagtctggaggcatcggggttgaggagcagctctcccttgacgtttcagagatagcccatgacccacgaagatgggcccattgcaggatatgagggcccctgatccatggaacaggcaggcgaggcctctgagccagacactgctagtgaggacggatggatcctcccagggcaagcctgagaaaccaaattcttctgaagaggtccttctctatcttcttttcaacaatcaagtgtacagtaatggaactttgcaaaattccaaactggaggataagactgctcctcctccttccctgttctggctctatcttgccattgccccttgggctactcttgtcctgcttgtgggcacccttgtgtccgagctctgtcaccttttgttctttggacaggagcagcttccagacaagccattgtcccattgcgaatacaagcagtggggctgcccggcccaccctccccgggcagagccggacctgaatccagatccccttccaccgagttcccagcaagcgctgctcagtcacggtcaaatggacgatggctgcataatgagaaataactcagcccatcccgggaggggaccccacgatgccagaggcgtgtgaagatggtggaggacatggaggagactgtcacttggcagggcctgggagtaaagaagatcggctggggctttgggctgtgtcctgggtcaactgggtggtagaggtgggtacgattccaggccgggtggtgaggtgtgaacggagcagaagagctgaagctcctccccagcctgtctgtggagcagctgccctactctgagccccactgtttcagccccgccagtcacagtcacaaccttcctgcgctccgctgttccgaggatgcgcctctgtctctctttggtctgaggggtcctctcgggccagggcttgcctgacttatcaccggggtacagtgagaggcccagcccacactagcgctcctgtagttaatcataatgataacgccagtgccctgcgtcagcttcctatcatgcgaggaacaaattaccac

SEQ ID NO: 467321 - DNA, 1163 bp, Homo sapiens
ggccattttcacttcttttgtggtggaatgtcatcagttaaggtgggacagggcatattcacttcttttgtgattcttcagttacttcaggccatcagggcatattcgtgcaagtcacaggggatgcgatggcttggcttgggctcagaggcctgacactccccatttagaaagtagtgacttgctgtttgggaaagggccatggataatgggtgtttttaacttttggctgctactaaccaagctctcatatcctctgttaattttaaaacttcagcaagggctgcctgtgtttcttgttattgctggggatgcttggacagcattttaccctttggattctgggagcacagagcagggcggcagctgcacagcccttttaagaaggatatatgatccaggttaccacagacctcaccacttctcttactatgtcttaaacactacattcatctacattactcataatgctaagaaggcatttgagtctggaacccctggcctagaccttccaaaccaagactgggatggggaccatctcatgttggcacaactctatatacatcactgtactcaaaaaggctgttcctcctggaatcaggaatccaggaacaggaagcacaaagcccaattctgttaggggggatgaggagagaaaattacctttttattattttgctaatgattttgttctagaggaaaaaaaaaaccacagaataatttctatatgaaacttttagcatcattcagtagttttactgctaagaagcaattagttttacataaagataagtccattgaatttttcatcattcacctgtcgggtggccagttataaatgagagatttactataacatgtgacacaaaattccatagtaaaatagatttctcagagtttattaaacattatgcttagatctgtcacatcttgcaatgaactctgaaaatgcctttgtcattttccctgatggtaaactgatgaaaatccataggtgcttctgctttcatcaaaacctgtcccttggaaggagttggcatcaggcatttttatgttaatgtaaatggaagtttcggtgttagcatttgtggacattttgaatctcacctctcattttgtatcaaaagatggatggtcctctggaaagcatttgggaaaaataa

SEQ ID NO: 467322 - DNA, 1642 bp, Homo sapiens
ttgaagagaaagggggagaaccccccactatccagtttgttatgtcctctaatgcagcagtccccaacctttctggcaccagagactggttttgtggaagacgatttttccacagactgggaggcggggatggtttcaggatgaaactgtttcatctcagatgatcaggcattattagttagagtcgcataaggagcgggcaacctcgatccctcgcatgcgcagttcacaatgcgggggggtgggggggtggggggggggacgcactcctgtgagaatccaatgctgccactgatctgacgggaggtggagctcaggcggtaattccgcaggcctgccgctcacttcctgctgtgcgacctggatcctaatgggccacggacagcccgtgaaagcagctgcaggggtcgtaccctgcagagccacaggggcaaagctgcccaaggccttgggagcccacctcttggatcagcatgccctaaatttaagacatggaatcaaagaagattattttggagctttaaaatttgatgactgccctcttgggcttacatggcagctctccaagctgattaccagcaatatcttcattgctgcaccatatctcctggttgaaaatgacaggggcaggtcatgcaggaacagcattgccctctctttcacttatattgaccagctccctgtgagcaccattccttcaggtttcaatgaaatgaaaagaagcttctcccacactagaaggttagggtaccctgagttcaagtatgtaggtcacctgctaacttggagtttggtacaagacagctaaatcttagcattctttcacatattaagacaaaggaaacacagagacatagacatggatctgggaaatacaccttttgctactcgttcagttttagcaaggaggtttcttgcatggctaagcaaaacttaaacttcctctgagaattacaggaattacaggacctgacaaagctatgaagattaaaacctataggaagaaaatctgaaccagaaacagtatggcagaattgggatctgactcacagagggaagaacttataattcttcacaggtcacatagaagcatgagaatttgggttcaagcaagtaaattctaaatcagaatccatacataaagtgtttgcaatgtccagttatatctccatgatattttctttgtggaagttgattgttcttccttacaataaattgcttgaattgtctgtctattcatttagctatttcttttcttgtctttgcgatatttttttttaaagtgttttgtactttgctacatacccaaatgctcatggccatatacgttttggattagctaaagcagaccctattaatctgtgagacacagacccctacggaagtggttgaaagcttatttctaaaggcatttgaatccttatggacactaagcattatctgttcacaaaataagtaacatctcaaacattctattctaaacagttctatttttcaaatatttcaatacaattgtggctattaaaacaaataattatataacaacattactgaattagtattatctttctgtcagtactgtatgtattttctcaatagactaatattgcttggtgtctgtgaaacattgagtatcaaataa

SEQ ID NO: 467323 - DNA, 765 bp, Homo sapiens
agaggtttgagcagcagagcacggaagaagcgagccacacccccatcacatgccctttccgaactatgagtgagaacatgtggtgtttggttttcggtccttgtgatgctgtgggtctgttggagtttgctggaggtccactccagaacttgtttttctgggtatcaccagtggaggatgcagaacagcaaatattgcagaacagcaaatattgctgcctgctccttcttctggaagcttggtcccagaggggcacccacctgtatgaggtctatgctctgcccccagaggtggagtctacagaggcagccagccttgctgagctgcagtgtgctctgcccagttccagcttcccggggtgcttcttttacctactcaagcctcagcaatggcgaacgcccctccccctgccaggctgctgcctcacaggtcgatctcagactgctgcgctagcagtgagcaaggctctgtgggtgtgggtaccacatccacagtataatctcctggtgtgaatttgctaagaccgttggaaaagcacagtatttgggcaggagtgctttccattttctctcatgaagagtgtttgattctgggttatctgtgagtccatttattggatacttttgcataatatagtaaatatgagttcaagaattactgacattaacaattgtaaattgttcaaaatcaagaaccatcttcagtccagattcccattagatatcattttcttgctttgtatacactgtcatttttatttttgca

SEQ ID NO: 467324 - DNA, 1509 bp, Homo sapiens
gcaaacgctatccctttgaataaaggcagccttgcaaacagccagtctaagccatgataacaggagcagagagtcagcaagttcaagttcaatgtgggctttgtggggagcatgctgaactgccctcagacaactgcaaacatcagctctttttgcctgatggccttcaaattggaatatcagttctctgtgtgtgtcccataccaatggcccactctgcagatgttgaacataacagccttcataattgtggcaacatctgccttccggaccacacaattactgctgctatcactaaggtctttgagatggaaggtatttctccaaacagcaatatttggagctcctgtacagaaagaaaaaaaaaagacagtgaaaaatttatcttgaaattcatggtaaaaggaggattggaaccgatgaatcacaattatttatggttcctactttaccaagcactttgtacctacattggctgacaacaacaatgacatacaaaggtaaaagtagaaaatatagtatatgaaaaaggagtattaaggaaaattatgtttaaaggcctaaatatgaaaactttagagaaatcattgaacagaaatgtcacagcatgagggtggaccccaatggagggtgatatggcatagtcaatagctcttgggctgagcgtcttgcccttcataaggggcttcctttcaagtgggtggtctttacagattttttttgtaaagaagccagaaatcttttacgatgtgatatctcctgattgttaatatcactaacttattttaaaaattgaaaaatcagtagaaactcagtctttgtggtcagagaaatcaggaaaagaagcccctcagggtaagtggatgaataattcaaatgaggagagaatcttaattaatgtggctttgcactaagttttgaaatcaagaagtatgagtcctccgacgctgttatccttttttcgagattttttggttattctgtgttcttggcctttccacacgaattttaagatcaacatgtcaatttatgcaaaaaagccagcaggaattttggtatggattacgctgaatctgcatatcaatatggaagtgttgacatcttaacaattgtaaaccttccaatccatgaacatggaatgtctatttatttatgtcttctttaatttttcaatgatattttgtagttttcagtgtaaaaatcttgcacttcttttgttaaatttattcccaagcattttattcatttagatgtcattgataaagaaaattgttttggttttttttttagatagttcactattaatacatagatatacagttgattttgtatattaatcatttcctgcaatctttttggactcattcatttgttttcaagtgatttcaaacatattttgatttttcattcttagttgaatacattaaaagtctttttaaaactgcaaagaaatgttaaatcactcagtaatatattttaactaataataatttatgcacattgtaaact

SEQ ID NO: 467325 - DNA, 536 bp, Homo sapiens
tgcctgccagacctggctccactatcctcaaccagtgcctgaacatgccattttcaggcctagagatcaccccacctcatccaccacaattggcagcagaacactcctctcagaggcctgacgatgggcccaccttgcctgctgctaccaccacagtgggcacccacctgcatgcaccacctgctggcctggagactgacacacccagcccattgcagccactgctaacaccagcatgggccactcgagaatcagaaggctgtcccaccacaactactgccactgcccatgctatgcccactgtcccactcacttgctcatcacttgctcatcatttgctcatccacccaaggacctgcccactcaccttgctcatcaaagatgatgtacaggacaagtgtgtaaaatattcctttttgaagactttgccatcaaaccagagagtatagcaagctgtgtgctgaaaagttaaagtcttgtctaattctgaaagggcaatatcaaggtcagttttttctattggtgcaggctacttc

SEQ ID NO: 467326 - DNA, 849 bp, Homo sapiens
tttaccggaatgagggcaaggaacacctggaccgcccagggtggaaaatcgcataaaggcattcttaagccacatagcattttatttgacaagactattgcagtaggagggggggactattgtaagaggacaacacacagaccacaagatctgcaagagtctcaagagagacctcggatgtgtgatcatgaagggcggctgctccatatgccaatgctggctcaggttaaaggtcacgcaaatagtctcggtttccttggcccactagcaagagaacttccttattcatcggggatgcagttcaacccacaacagctaataagtggtgggcctggtgttctgaacactcatcagtcagctgcagagtggagtgtccatgccccagggaccagtaaagatgacccattggaagtgtgtgagcctcctgatccaccaagaccatatggtgtttttcataaaagagagagatcattcccttgactttggacttcgcttattgaacccctggacagaatcaaggttgctaagagaccacctgtgctgaatacactttgttctggcaagagcagaaaactgagaagccgtgttacctaccactacctgggattaattcagggagcgggataattctggatatgactggtaaaaactggatattaatttctactactactcccaaaagtctagaagatgaaattgtgggaagacttctaaaaattttgtttgttatctttgttgacttaatttctattatatatgttgtgataacttcttagaaagctgacttcctttccatgtacatttcaaactgaattacagtgaataaaaatttgtattttaacttgttga

SEQ ID NO: 467327 - DNA, 478 bp, Homo sapiens
gaaaacgggccatgatgaagatggcggttttctgtgcgtggacgagtcagcttccgggtgtgactggagcagggcttgtcgtcttcttcagagtcactttgcaggggctggcgaagctgctcccatctacataccgctcacagtctactgatgccacgcttccactcaaatggagtgagcaagttcccaagactagtcttaccaagtttcaaatgtccggactccaagtaccagttccttcccagtgtttagcctctgtgttgatcctccatggaggcctgccacacactgctctggcgatgtgtcccactggggcaaatgcctaccaaggagcgctctcaggatccgcgtcacttgggctggtaggagtctgctgcagggatgttccacagggcaggcttaagtcgcctaaggagctgcctcgaccatccaccaatcacctcgcttcccagtcagggaaccaagaaatgtagcagga

SEQ ID NO: 467328 - DNA, 843 bp, Homo sapiens
aaacaacagcagccacaggttaaccttgttaaaaaatgtgtggtaacatctgggttggtttgttgccatggaaaagggtggtaatttccaagtgttgccattgcaatgtaagctgacatggtactggaggaaagaggaaacaatctctgaagaatcactatttcaggtaggaaaggctgaggaatatatcagcgtttgggggtatctgcagattagtgggagtaaaagagtggtttttcaaagagaagagaaagaagaggaagctgcctcttttcacagaaagtgtcaaggtgatcacaaatttcatatggaaattcaagagatccagaatatccaaaatgatcttgaaaagaataaatttggtggactcacacttcccgatttcaaaacttactgcaaagttacagtcattgaaatcagcctataccaaaatttagcaaaagtatcttgggagtgggagatgggaaataaaagcaaacctacagattaatttcattttacttatataaaaactttcaataaaatgttagcaaatagaatttagtagtaaaaaaaattataaaataggattcatctcagggatgcaaggaaatttatcaataaaatttaccacattggcagttcaaagtaaaaatacaataatagtgggagatatagaacttatttgtaagataactcattttctatttcctcctgtattagttttgttaaattttgttttttaaggaatttgtccatttcatctattttttaacagctttattgagatgtaattcacatgtcataaaattcacctatttaaagtatacaattcagtgtttttttagtatattctcagagttg

SEQ ID NO: 467329 - DNA, 817 bp, Homo sapiens
ctgaaactgtgaaggtgacagcagtcggttggaggcctcttggtgatctgcaaggcgttctcagatggctgtctctgagggcctggtccctcctttagcttgtcaaaggacacagagatgggtcactggagctggctctccttgggatacaatccagtcccctcagctagggcatttgtatcactgccctcgggtggagctcaacagtgaccccatggttaggccatctggaaacaggctgctgacacccgggacttctgtgctgccaggaagaacaaggcaggaggatgcgtccctgcacccaggctgccctccaaacctgtggaatgcagcccctggtcatagaggaggcccaactgttgctgacacgtatgggaatccagaggctgggctccccttcatacagccagggccccactcagacctgagccaacccatcatatgccagatgggacagagtgctcacatgggccacttgccggaccctctgacacttttaggaagcagctgctggcggtgcgtgtgtttgcccggaagggtgatccagggcttcatcaggcaaagcattggggatggaagttccggcgactctcatggcctcgcctggacttatggcaaatttcagcaagttgatgagaaaaatagagggaaaatgaagatataaacataaaatggagccagcagagactaatacagaaagtacatccttactttagtgggtcacaggattggctctaagcttcctagcacccaatgagatgaaagaaactgaattagttacataatgtaacactgttgtccatgaaataaaacaagc

SEQ ID NO: 467330 - DNA, 796 bp, Homo sapiens
aagcaaggacagtctaaaggccagaaaacagcagaatgttcttaaacaaatgtagatgtaagatgtcgagaaaatggaaaggaaggatgatggctgtctctgagggcctggtccctcctttagcttgtcaaaggacacagagatgggtcactggagctggctctccttgggatacaatccagtcccctcagctagggcatttgtatcactgccctcgggtggagctcaacagtgaccccatggttaggccatctggaaacaggctgctgacacccgggacttctgtgctgccaggaggaacaaggcaggaggatgcgtccctgcacccaggctgccctccaaacctgtggaatgcagcccctggtcatagaggaggcccaactgttgctgacacgtatgggaatccagaggctgggctccccttcatacagccagggccccactcagacctgagccaacccatcatatgccagatgggacagagtgctcacatgggccacttgccggaccctctgacacttttaggaagcagctgctggcggtgcgtgtatttgcccggaagggtgatccagggcttcatcaggcaaagcattggggatggaagttccggcgactctcatggcctcgcctgcaaaacagtttctgctggcttccgtccaccaaatcctctcttagataattttcctctgccctcaatcccctagattgaagagattatctaaagcctttctcttctccattcattgctctaggtcagactcaaatatttttactatttcccatttggacaatttac

SEQ ID NO: 467331 - DNA, 1874 bp, Homo sapiens
attagttcaccattaagtttgttgaagatcaggtgattgtaggtatgcagtcttattcctggttgcagcaacggcagtatatcacggaggggtgggacagggtgtgttcaggccagcatcaatggcatggcacagtggggtgcacaagctcacccacattgacaggggttgagaagcaaggtcctcctgtgcacgtgtgcaccggcaaagcagtgagagaggagtatggtgagcattgggagatgggcatccctggccatgctccactgcagactttcccacaccaaaccctatgggctctacacagactgaagccctgcccctactacctgtctagcagctctccccgccagctcaagtgtcaatggatgttgtgtattccctgctgccaggattctagagttccatgggttgctccccagctgcttaactcctcccttctccaggagtcaatgagggtcaaaaatgagtcctggtaatcccacagctatctgctagaattgcatggcctgctatttgctgaagggaaggagtaaagacaattctcaggacctgctagtttgctggctgctgcgttcacttccagtgtcaactagccttagggtatcacatcttcttatatatttttatctattagtatcattcttctatttgaataggttttatcatacctggtgttcattttggaaaatactttgaaacaattctttttcaccaggataaatacgaataaatatgtgctgacaaagcttggtttttcattataactaacataatttacagtttcaggatattattgcatatcagcctttcaaaatgttccaggaagtctcatgtgttataaaattattattcagtaattgcaccttcaagtggctggagtagcaaaatacattccctaagatattaggtataggatttgaaaccgataacagcgattttttgacatgtgcttaaaatacaggaggcttattttgatcataaaaatgttaagatatgtaagtatatttaatcctattgctttcctattttacttgtcagcttcagaaatgttcccttaaaaaattagcttaatagtattatctttataaataaaattctttatactttcatatttacaatttaaactgttctattttgttctcaatgacaaggttattacgaatgccattaataagtatgctatttcattataatttcatcaataattactatttttaacattttccaggcctgtcttcaagttatcttcaacctgaataaatttattaaaatttatatttaaaaaagtaaatatttatacttatttaaagataaaagtagtaaaaattaccaggaatgtaattaattatttgtttaatcttttttatatttccttaatccatatttaatactcctttggtatgctgtgttgaaagtagctactttcttttcagagaggtatacattttaagtacccttcagtccattttaattcatgaaagaactaggcaacttgaaaaaataggtaagcccttgttattcatattgccattctattctacaattctgctttccattctttggtctttggagttgtcactttaaaatacaggcttaaggaagtgaataactgtatctttcaattctgtttttactcatcaatattattcagttatatagtgtatatgcctaaacttattttattatgattattagttctaactaaaatgtggaaaagatatttttgtcttaataattgctttggagaagcaatatttcacccttatctacatgctcttctttttttccttttcattacctaaaatgtgactgtattagttcattttcatgctgctgataaagatatacctgagactgggaagaaaaaaagg

SEQ ID NO: 467332 - DNA, 831 bp, Homo sapiens
ctggagctgtgagaagagggtcaccatcctccagaaaccagaatggtagagccactgacagcttgcaccatgtgcctgaaagggatgcagacactcaacaccatcagctgtgggggcagaaccctgcaaaatcacagcggtgaagctactcaagacctcaggagcctaccccttgcatcagtgtatcctggatacaagagccagctgcagccaatgtggctgggtgtatacttgatccttgttttctcggagaaacctgctgcctctggcaatgggttgattcatgaagtgaacaatgatttcagctccctgctcagccctaagggagaatgggtgctccagatgcccagagatctgtctgggcatacagtggagagggctcctctgcaccaggatctctgcacaggaagggcagggtggcttaggctgctgaaccgggtgctccgaatgcctggagatctacttgggtgtgaagcagagagggccactctgcaacatgatctatgcacaggaagggtggagaagctcaggctgcagaaccaggtgagtgggtgctccaaattcctggagattggccttggcatggaatggatagggcctgccctccttcaatctcagcccatgaagagtggggtggctcaggctgctagcccatgcaagtgggtgcttcaaatgcctgaatttctgcctgagggtagagcagagagggtcctgcttcaccaggggagcagcctggggcattcagcaatggcacatgcagacctgttgcaggtctccaaactgcccctggctataagtctcaccatccagaggatactgtagctgtggcag

SEQ ID NO: 467333 - DNA, 2445 bp, Homo sapiens
tggggtttaccccgaaactgcatcacaacttgtattttaacaagatcctgaggtgtaggaagtatatgataaggagcagcaaaaggatatactctggatacactcccagaccccagcagggaaggagggaagccattctcaatcctacctcatagaggaacctcatagacatgtgccaggaaatgaccttcaggcctcacaagaaaaagcatcagaggatttacaccagatcattgcatctggacaatgaaatgctggacccctcatccatgatgattgctcccttgtctctccctaagcacgaacccaccgggaggaacgagcaactgcagacgcgccgccttaagagctccagcaagaccacgaacccaccagaaggaagaaactccgaacacatccgaacatcagtagggacaaactccggacacgcagcctttaagaactgtaacattcaccgcgaggctaaaatccgggttcttgtcacagaaccaggaataattaggcacgtggacacattgaaagaatgtcagcaaagctgttgcaaagacattgaatcacttctctatgcttttcagtttttaattggacaaactcaatgatgtgccagttaatgaatagctcatattgctgcagctaccagaggacccaaagcctcaatataaaaaatatctcatctcctatcttgtaatatttgttttatcaccaagcactcatccttccatggcagcatggaaggatgggatatgtttctgtggcaaattgatcacaaaatttatcatacatactgggatacttttgtaaaaggctgatgaaaatgatttgaatatattctcctaaattgtaagccatggatttccaagtaaatgcaaagtactaaaatataaagaaacaaatagaaacaaaattttaaaaggacaaaaaagtatctacttttgttttcacaaggatgatgatgatgatgtttataattatagtgataatgattgagtcagttaatccgtgtatctgtggtgtttaagtatgatggttctgaagacaggctgttggggtttgaaacctaactctactttttactagctctgtgacttttctcaagttaattaaagcctgtatgcctcagtttccttatctgtaaagtgaagaataagcatactttctttacgtgataatggtgaagattaaatgagttaataccttaaagtcttaggaactgtgactatcacatattaagtattaaaaaattcaacactattatgaggagtaatatgaaattatttaatgacgtgctatgctagctgaacttcagtgttcatcatttattagtgatacatatggttggaatatgcctgatgttgaattttcttataaccacactctaagataagaagttaagtacaaatgttttatttggagatgatcaaggaagcacaggtgttagataaagtaatacagcgattggaaaaaggccaataacctgtgttaatgagtatttatcactctcagctcagtcctgcttgggatcctctgggaatcaaagcagaatatatctcaaaattgccacccacacccacccataactggaaggctgggacatttgtccactaacttttactccactgtggtttaaggttgcctctaggagcattatccctcccttcatttctacaatgctagtgatcaacttttttgaattgaacttaactggagtcagtaaaaagctcgtccaatttatccagaatgcctgagaaattgaaattttttttcatactataaagaagttacataaagaacatttgaaacacaagcaattccaaatatgtattttgaccaaattactttgcccatgaagcagctccacataggtacaatattgagtgtgtacatagaaaatgttagtaatcactagtgctaaagaagagaacagatatggagatagtcgttctgcagtaatatcatactttttttttctaaaatgtataaggctgcgtaatcctttgtctccaacaaacactaaaactcttttaaagtactggctatttttatttggcctcatccatttatgtttttggtttgtttgtttcatcttctctaatagatcataagctactttagtgaaaaaacgaggtttctttcactatgtcatggtagaacttagcaagtgcctagcaagctgtgtttaagtcagtgagtaaagaaggatggaaatagcatggaatgcaaataaaaaaactagcatttaaaaataatactttacatttattgagtgctttatatatgttatatattttatttttatcttataatttcatcatattaatcttaggtaagcattattagctctattttataggtgagataattgaggcttgaaatgggtaatgtgctcaagttttcatagctagaaaatatcaaagcctacactttaaaatgtatatttttaaaaaa

SEQ ID NO: 467334 - DNA, 750 bp, Homo sapiens
cctggattgccaagttccccattgggagtgcatatcccagaggcagtttctcttcctcttatgctctggggacttgcagtattccacttggctcacagtgtaagctgcagcctgctgcttccttcaaaaggactgtggtttctttcagttttccctctatctagtaaacacactcatatcaatatgttagaaaccatcaacacaaaacacattactgacagcagaatttcagtgcctcgggaacagacacaagtggatggacatcaagaggaacacgctggcagatgccagcaggccatcgatggtggaacaaagcggactccgagggaaattcggcctaggacaggaaggaaccctgggatacagaaagccctctgtccttgcaataaggcagaaggtctaattgagcttattaacacaagctacctgcagatgggaaagctgaaagagcacactgtaacacacgctcactggggcttcagaagctgtaaacacaaccctagacgctgcacccccaaattgcctgtcatcaaatcaaagcagtttgtacataagaagattgccttacaacaagtgaaaatttaaagcattatcttttgtttaaataacttagtagaagagctagtttttatgtaattatttgtacaatcaataaatgtttttaaaatacatatttaagttttaaaggcaaggagtgggaaaataagctagatttaatttagtcttgtagtcttttactttcagatttaa

SEQ ID NO: 467335 - DNA, 6410 bp, Homo sapiens
agaaaggagtcactttgagatctgcaagtacttgcagtaagaagccagtgatgtgtctgagagtagtaaatgccaaggatctgtgtctcagcccacttgggctattaccacaagaacaccataaacaataacaaacctttacttctcacagttctggaggctaaatccaaaatcaagattctggcagatctggtgtttgaaacatcaaggaagccagtacagctgaagcagtgtgaagagtcggggaacgtgcaagatgagtcagataaatcaggtgaactggcaggacattgtaaagacattaagtcttactttaaaacgcataagattaccaaggaagaggccataggtagagtaaaaacaaagggaaaaggtataactaaccatatggagaagtttgattttaaaagaaacaataaagaaagactaacaataccaaccactggggcagtagttggcagaagatggagagttatgaaagtggaaaaggatacaagttcttgaacaaataagaaaggagatttaaagaacaagtgaaagatacgttctcagaaaggggcatagggagcttctcggtggtaaacaaggaaaggaagattatatgaacacaggtgcagagaggtggagagaggttttggtgagagctaaggtaatttcttttcagatggctcccattccttcaatgaacatctcatctgctttatatactcatgtgtaaaaaatatgttttacaaatgtaataaaagcaagctaaatatttggaggcttacctgttggaaaagaagactggaaagaaggtagtgaaggcttgagaagaaattttgaagtggttggcttaaaatagaagaataaataaactataggaaagtagtaatgatgggtatctctaagcactatgaggttaatgttagcacatttagcaataaatctgtcagttctagtctctctacatatgcaaattcagaaacttaattcaaaaggaaaaatgtctttacaacttaggtatttcagctataaattacaacaagaagatttcagtcttatatgctatgaaatagaattttatatataatttttaatataattatatattatataattttataatataacatataattgtgtgtataattatataattttatatataattatatactatgtaattatgtataattatgtaattttatatgtaattatgtactatacaattatacataattatataccctataattatatactatacaattatatataactatataccctagaattataaatagaatataattatataccctagaattatatatagaatataattatataccctagaattatatatagaatataattatataccctagaattatatatagaatataattatataccctagaattatatatagaatataattatataccctagaattataaatagaatataattatataccctagaattataaatagaatataattatataccctagaattatatacagaatataattatataccctagaattatatacagaatataattatataccctagaactatatacagaatataattatataccctagaactatatacagaatataattatataccctagaactatatacagaatataattatataccctagaactatatacagaatataattatataccctagaactatatacagaatataattatataccctagaactatatatagaatataattattaccctagaattatatatagaatataattatataccctagaattataaatagaatataattatataccctagaattataaatagaatataattatataccctagaattataaatagaatataattatataccctagaattataaatagaatataattatataccctagaattataaatagaatataattatataccctagaattataaatagaatataattatataccctagaattataaatagaatataattatataccctagaattataaatagaatataattatataccctataattataaatagaatataattatataccctataattataaatagaatataattatataccctataattataaatagaatataattatataccctataattataaatagaatataattatataccctataattataaatagaatataattatataccctataattatatatagaatataattatataccctataattatatatagaatataattatataccctataattataaatggaatataattatataccctataattatatatggaatataattatataccctataattatatatggaatataattatataccctataattatatatggaatataattatataccctataattatatatggaatataattatataccctataattatatatggaatataattatataccctataattatatatggaatataattatataccctataattatatatggaatataattatataccctataattatatatggaatataattatataccctataattatatatggaatataattatataccctataattatatatggaatataattatataccctataattatatatggaatataattatataccctataattatatatggaatataattatataccctataattatatatagaatataattatataccctataattatatatagaatataattatataccctataattatatatagaatataattatataccctataattatatatagaatataattatataccctataattatatatagaatataattatataccctataattatatatagaatataattatataccctataattatatatagaatataattatataccctataattatatatagaatataattatataccctataattatatatagaatataattatataccctataattatatatagaatataattatataccctataattatatatagaatataattatataccctataattatatatagaatataattatataccctataattatatatagaatataattatataccctattattatatatagaatataattatataccctattattatatatagattataattatataccctattattatatatagattataattatataccctattattatatatagaatataattatataccctaaaattataaatagaatataattatataccctataattatatatagaatataattatataatatataactttatatatttttataatatataaaattatattttaataattttatatattttataatatactataatatataatgatatatacttttataatataatatataatgatatacaattttgtaatataatatatcattatatatataatttttgctatttattgcttgtctgcctaactctggtctttcaaataaccacatataccatgaatctcagctgatcatcatttctttggcaatcctttcactaactctgtcacgtgttctgttccttctcatatcccccttctattattatatatttctctttatgggcttaatttatgttgtctctaaaacatagtcaatagaatgaataaaacatgttaaggaaccctaaaccagtcaagatttatttccaatgattactcaagttgaattaattatcatgcctattgtgaataatttataaaccaagaatgaatagatcattaattcggatgagttcctgtaggtttgtaaatcattattcatgagtgataattatataaagaaagggctttgcacctcattggtgcattatcacaaaattctccagcagcagttgagaaagagctctaaccagaaacaagagtaaatagatgaccaagggcctaccacagagatataaatttgtttatttctgatctcagagcaagaccatggatattcatttgaaaagaattgtaaactcctacaaaacaaagctctctttttgacatctctgaaatcttgctccatctcctttgcccagtatagctctttgtacttaaaagctactcaatagttttgttcacttgattttttaaatttgattggttggtgattgcaatcatgtcaataaagcaagaaaagagaagaatgcttaagccaaggagtgcaatgcctcccagcatagaaatattttaaaatattgaatacagatttcatctacatgcatatttaatcaaatttgactctgttggtgtgccctagtctagtatcaggtggtgtgcaatccagctaatcaggcaacaggtttgaaaacgcaataaaggctatgttaactataaagcaaaactaccaaattttctcgcataattttaaagcaacaacttttcatctttataacctgctaacagtttaacagcattcacaattacacttatgcggaataaacacaatgattgcctacaaggttatcataatgttaggatatagcaactattttccaaacaaaataaaaacaactacattcaacaatgcgatggtttaatattatcatgcaatggtttaatattatcataatgatgcaaatttcttaaattaattgaatgccatttattcagaatggaaaacaaaaatacattttatgcaagcaatatttttacatatactggcatcgagtattattctttgtttacctgtaagtgtgaaaaattttaaggtactttgaggagcttataaataaaaaacaatgtgtgaaatatatttagtttcatttctgagttaagtgcatttattgaatgtcaacactatggtgagtagtaactttataattgtgtttaatctggaaacatttattgattactttctctgcacaaggcagaagttttggagccacaaaattaaaccagataagttcatctttcaagttgcctgtattatattagaggagacaaatgaatatacaatctttcatatacgtatgccttatcaatcattgaaaatagccttgtctattttaaaacaaaaattagactatttaaaaagttgaatattcataaattattttttctgataatgaaagagaactttaaatggttttcttaaagcaaatcatttatcaaaggaatcaaaattttaaatggctcaaaatttcattcagaactaatgacaggctttactaaagtcattttataccatgatcgcaagcgatttattttccactgttatcttctgggacttccctacatataccccggaaacattagaaattcagtctctgttctctgcatgcatactatgctctgctactttgtttgacactttgcttagtctccttctaataattaaggtgtttttaagcactcataaaaatccagtcaatttttcaatagtatatcaatgaaggattttatgatcttataattcatttctcaaaatcctagtaatgtttttttaaagtctctcccagggcacttattttgtaaagttaaagcattttgtactgtgttttttgtttgtgttttcatacctatcttagtgggtgtgaagtcacatctcattgtgattttgatttgaatgtccctcatgactataaataggaggggattcccctctttttatttttgaagagtcacgcttctggctaaaattctaggtgtgactttcaggtctggccaagggcaattacaaggcatggtgtgtagccaatgcatcgcagtctttgaagggaattacgggccaggattgaggcccctctttccaaccatgctatcctacatacctgctttcttagcctaggagctttcatctggaggtgtgtctatccagggctttcagcagatgccttcctcaggtgcctctgtcaagatttccttatggggagacagaaaggacattgaagacacttttctttaccccactctgactgaagtactcagaactttttaactcttagctttttaccttcaccttcctctaccattctcatcaacttggtccctgtgacccataaaatccttgttctggagctcctttgctgtgagacaacccctacatctgtgctgatcctctactgacacattgttccatgaggaaaatgcaacactgaagagaatcagagttttctctggtttagccttttgcttatactactgcaataagtgattaaaggcttaattgctcctttcattttgccttgttgtcttggttactctgatacctggtaacacaagattctccagttcagccgagctttgatgaaactttttacctttcttgagtcttcaaatacttgcaagtgaccaccttgtgtcaaacactttacttggtattacgtggcagtaaggaactaagaatatagtatcagaaacactcaaataaatcaatgtttgcagg

SEQ ID NO: 467336 - DNA, 2208 bp, Homo sapiens
gttttggtccacaggccatagttttccaacccttgggttgaagggttggtaatctgctcaagtttcatgtgggacctagatgacaatgggctctgtatggggagagactacagcataagctgttctggacttaaaatatattattcagaatatctaaaagtgctgtatcttgttgcagatatccacgactgttacagatgcttcgtggaggttcaaaaagactacagatcaaggccagtcctgaatctaaaattgcagagcagaatactttccccctgtgaggaagaattctcagaagagataggaaaacccgcggaattctcagaagagataggaaaaccattcaaaaatcctcatatagaggattatgagaaagcagagctcttccaggtgtgttcctgtgctggacaaaaccagctgcttgatgcagctgctagaataaaactggctgataaagcagtattggtgacagtgggtacttccttgccttaattggatagaattccaagtgggcattgcacttttaagttagaaaattatcaggcactaccacttccaaactgtttaccttgagactaggcaagtgaaattgggcaagaaatacaaattattttagaatggaagagatgacatttccaaacatggacttaagctacaaaatataaggttgaagaaatattaaatatataacatctaatgtttatgtttcattaaatttgtttatcttaaactgtgcttcttacttttgttaatgattgttcttgtggagacatctgcccagaactctgctacaaatacagagtgttggcaggagaatatgaataaataaaatttaaaagaaaaattatttattcaaaagtgaaaatgataaattcttttaaatacaactcaaatcaaatttttcatgtgcaaacaagctgttttatgttttgtgctgttcatagggcaatgataacaatgttatataacaaggttatataaactgtctaacaaggttactttaaaatgtattatcctggatgtgctttagggatgcagtatattaccaaatcactttaacacaaaaatttgaatttttgaaaatgtttaaaatatttttctatttataaatgattaatattgtagtagaaatagaaaactagaataatagcatagtgccttataagtcggtgagtgaaatgattaatatcagaaagggggcttgaatagacagtgaagttgtagaatagctctggaagagaatggaagatgtagtacaacaagaacacaagaaaggattgataaggagcaaaagactttccttgaattgatgacgatgtattgcaaatgttatcaatccgtgtctcaactttactgggaaatagagtttgctacaatgatgtcttcacatttaatagcaaacagtttgagaaatgcaatacatttatcatagcatggctgtacgttttatctaaacatttccaataccaacggatagtttcataaaaacagggtccctcttgccacgagaagtaaatttcagaatattcctgctaagcaattagcactgacagttggctttactcctttcacttggacacattgtgtaaaagcttttctgaaaagacttggttgtggttgattgttcacagttttaaggacagaattatttagctggattgtttaggactagggcaaattataggtttgagaatactgtccatttatgacagttctttatggtaccttgtgatatacttcactaaagacattttagtttttctataaaatattcattttgataaaataacatatcagcttttcaaatttccagttatgtgtatgataatcagtaaatctcataacctccatttttgcatatttgcttttatttttgcatgaagataagcagactataaaataaatatgaatccatattcttgcagtataacaggagggggtcctgctatcatgaactattttctctcttgatttcattttttgtatacatttttttccagcattttaacatgtctcttctcaactcatattgatactaaacaaataaataaaaagctatgtcaaagttcttttttccataaggaaaaagaatacctaaaaataaatgcataaaccgaacactagattttgctgtagctatttttcaaaatgaagtagttatactaacttaatggctttaataaactagttttttggagggttgtttct

SEQ ID NO: 467337 - DNA, 626 bp, Homo sapiens
tctcccacagtgcagcggcgggctgaagggctcctcaagtcgcctaagtgggagcccaggcaggggaggcgccgagagcaagcgagggctggcacctcacaatgttgtcagtggacctacctatcttcttgagacagttctcttattcctccatttccagaaaactgacaatttctacgtgtctggtagacaacacagagatgaagagagggccaccttgccttctgccaggggaggatgatacaaacctttggttctggtttgcttccacctgtaaggagctgtgggaagaggttcgagggagaactgagcatttcagtggatcaaagacatgtcttttacactcactggctgctgagcccaaaacagaaaagacgctgccacagggagatagtgcagaagccacgatagaattcacaaataacttgccagttttgaagaagataattgatgaaacagcaatagaattgaagtgtacctgcagtagaattgtagatgagagaaaaggtataagggatagaaataacatgtttggcacgaaggggtatgccttacagcagagagttggagataagtatttattatttgtcaacatgtaggtatgttggtcctcacactcttgcctt

SEQ ID NO: 467338 - DNA, 819 bp, Homo sapiens
cctgtccaaatggaccaatcaggtctctgtaaaacagaccaatgggatctctgcaaaatggaccaatcagcaggatgtggcttcacttctaagccaaaaagaccacgaacccaccagaaggaagaaactccaaacacatccgaatatcagaaggaagaaactccggacacgtcgcctttaagaactgtaacactcaccacgagggtccgtggcttcattcttcaagtcagtgagaccaagaactcaccaattccggacacagaagtttattgggcagtgctcttagaaacagccatcttaaggggaggaagctgggaaggattcgttagtgacattctgtcccagtgcatcagcaagacaatggggcttaataatatattgccaggtgtaacatatcaccgagcactggggcgaggaaagaagtcactttaatcaattattagtgctatgtttcatcaaggtgtcaccagttggctctcaagaacacaaacctgtgtaggagaggttataatattgttactttcattagtagtatctttgaattccaggtgattaaaaaaaattgttaaggactcttcaaaaatttctgtactcacagagaaatgtttagctatacacaggggccaggtccaaccaatcacaaaacctcattaacaggtccttatgtgtgactttccctgttgtctcagatttctatatgaaactggaaaatgaggatagcagacaatatttgcctacacattctgaaaaatataatgtaatgtaatgtaaagctaattaggctttgtggatagatgtttcaaaactttaaagtaaaac

SEQ ID NO: 467339 - DNA, 2297 bp, Homo sapiens
agatgatattatattaagtgaaataagtcgggcacagaaagataagttaatctcatagaagtagagaatagaatggtagctaagggtataagctccaaaccctcatggcttatatgtggtgttgggcctgtgtatgcacagaagtcaagaattaaggtttgggaacttctgcctagatttgacaggatgtatggagatgtctggatgtccaggcagaagttcgctgcaggggtgaatcctccctctgttaggacagtgtggaagggaaatgtggggtcagagcccccaaacaaaatctccactggggcactgtctagtagagctgtgagaagaggaccaccatcctccagaccccagaatggtagatccactgacagcttgcactgtccacctggaaaagccacagatgctcaatgccagcctgtgaaagcagccaggagaaaggctataccctgcaaagccactggggcagagcttccccagactgtgggagcccaccccttgcatcagcatgacctggatgtgagacatgaagtcaaaggcgattattttagagctttaggatttcccataatccccatgtgtcgtgggaataactcgaggagatgtaactgaaccatggaggaggttaccttcatgctattttcatgatactgtcagacctggattttagagtcaatatttgccctattctcttctccctctgtcctttatccctcacaggtatttttctccaacataatccttacatgaaaaattctatcttagcatctgcttcttgagtgcctgaaccaatttaatttaacagtcagtaaattttatttcaacaatgtttttattatttctcaaatttcatttaaaaatccccttctttccatggaaaaaaataaagcactacaaaaatagcaaaatcaatgtataaaccaatgaaaccaatgtaacaacacttgggatggtagaagaaaaggaaatgcggaaaacttaaaatttggggtgctaggaatcttttctaaataagatacattttatatacctttttatgtaggagaaaaatacatgcgcacatatacataattccatattcaatttcaaagtatttgtgctgcagtatatttgtctctaactgttattctttcaaatataagggaccaaatgactgaaatcatcattggtcttcaatgtgaataataacctgtatttgactccaactcttacttgcagatttattttatatgtctacataataaagatgatcttattctctcatttatatctacagtcttcagaataactgatctatattgtgactttcaatgttaataaactgcacgctaatgaaaagacaatgttacattgatattctccataacaattgcaggtacatacagtggcattaaataatggtaatacaaacaatgaagaaactgctcacttaaacattcaaacatcaaaatatcttttacatgacttagtttcaatataatcaatttccattacttttttcatatgttaataagtataatgtaaaattatacagctgaactataagtatctttgactcactcttcatgaagcttttatgagtcttaatattaatgctatacagacagttgactaaatatcttaaataattcaacttttcaactggccttttaggtcatatttgattaaagataactgtttcaaaagtgacagattttttttctttttttggggggaaggaaatatgtatcaaagacctctgatattgaaatattaaagatctgagacatcattctaagagcatactgtttaaaaaagaatggttcaaaattctccaaaactatgaatagaaaatgattattgaaagtactggttacctaacaacaacaacagttaaaaaaaccaaaacactgcagataaagcctaggactataactgacatcctgtctaacagactattaatggttatattttaatattaatttattctttgaaatgcagagactggtattttgaaataactactcagaggttactcataataatattaaacaagtatgttttttggggggggttcttttcaacacaatctttttttccttttgggttgttcatatacttattttcatatattttgttcttttccagccccagaattctcagttttaacaatttctgaattcattagcctcattttttattccctcctctctttatttgacttagatctcttagtccacagttttcacaccatattccatttttctctttttggtcttttgcctttttgtgtttgtgctgcatctgtgtggcgg

SEQ ID NO: 467340 - DNA, 571 bp, Homo sapiens
tggcttatatccaaaaaatagacaataacaaatattgacaaagatgtggagaaaagggatactttgtacactgttggttgaatgcaaggaatctgtggtagagagaattctgaaatgccatcctgccaaggtttctaccctctggttaggtgccccattctctctcttctggagtgtgggtgggaacacgaatacaatgcattccgcttccttctcaggggattgattggaaaagaatgggaatgtgcaacttgtaatggtgacgtgtgggaggaccctgatgatgttggagacactgagtttgtaaactctgatgaaccttttttgctagaagaaatagcttccccatccccaatagtggcaacatcccctccccaacccatgctgccatcagcctttacacatttgtttgaggagataaactctgcactgcctgagacaacagtgatggcctccaccaaggaaactaaagtactggtggggccctagaggtaaggttcagagtgtgacccatgaggaggtatgctacactagaaaagaactgcttgagttttctaatttatatgagcat

SEQ ID NO: 467341 - DNA, 514 bp, Homo sapiens
tttataatctccttagtgagcattggagtcacttggagagttgttaagatggactctgcagactatagcagtttgagtccctgggaagttgctaaaagcaccaatgatggtgtaaagccaggaaaggctgcaactctttctatgccccaaaaccaactgcgaagagaagattactccatgaactttggaggccatattgctacaagaagaagcttggagtcaatgaatcctatttctgtacttcctctttcaaaaatcaccctcaacagaaatcttccaaaagaaagctatgaatgctctaatagctatgattctaagtctgctcaagtgatcttgtacatggtgaaaaccctcacgcctcaaggtattgtctccaaagaaattgtctccaaagaaactgttccgacttcgaaggcatattttattaacctcaagatggaatatgtgaactgtagacttgggagcatttgtttgacacttcagtgaattcttatatacaggtactgccacgtgg

SEQ ID NO: 467342 - DNA, 3473 bp, Homo sapiens
gcacacgcttctcagacagttctcctctgttccaaggctggctgagactggacagccagtgagaatggacagacgtcttgtccagaagatatttgcacacagagctgtgctgtgcttggtcccagcacaccagggaccttgttccttgacactcctcatccggcactctgtagcctccaaatctcctggaagatgttgaggctctcgggcccctgggcctctatacctgccaaagtctccccaccttattcccccgcagccttttccacacctcctacctgcatttccgtgacccagtctggaaattcaaaccacacaagcctttgcctgtgctataaaaggagctccccgctggccccaccccctaaccacataaaacccccgatcggggaagaggttccccgatccctcaagccattgggtgtctggactggctgtgggcctccgtgctcctcctcagagcggtccctgtgtcagctgctcccaccccacatagagaggcagctggcaggtcctcctctctatgaccccttgcaggtcctgggtgtggagtcaggtgtcttcaagaacagaggcagtgggtctgaggcagctccccacttctggcatcagggctggcagctcctgggcactctgccctgctaaaccactggaaccaggtgacctctgactgtgaaggacagccaggccatctcaacacactgagtggacttggattctcaggctccagacactgcctcttgagacagcactctggctttgctagttggaaagtgcactggcagcctggggtttgttcttgatccacggatttgttcctgtttgtgtagtactaaagtcattgaaactagctgagtgtaacacagtgattttttaatgtctccttatcacatttttacatgtgtttattgcttagttcctgagggatgtattttttcccctttcatataaatacttgtgttgcctctttttgaagggagtttccttttattagactcagcggtttaatggaatcaactcttcagtgctcaaaactatttcaaaaagcgtaagcctcttttgttcccatccttgccctccagatgattctgattctattagaccaagagccgccagcctccacctgtaagttcagtacagagaacatgctttcaatagatcgcacaggttatttcatggatgtctattagaggaggatcacagtctcttttggatattttacatctagaagaaaaagcatttcccagtaggaattcatacccattatatggtccggggcttccccacatccttcctccttacagaagtgaggtggcatccggtactgctgaggctctgctttgaaaacccctggtgggttcactctggaggataaacaagagcccccactgttcacatccaaaatctttgggggaaccatagctctataggattagatatctgtgaaggtggaattctgtcaagggtttcccaaaagaaagattaggacatttggattagagcattcccaagctctatttgcttttgataagaagatttggcttatttatttatttatttatttatttatttgaatgcagtccccaagtccattgtatcattcttatacctttgcatcctcatagcttagctcccacatatcagtgagaacatgtggtgtttggtttccaattcttgagttacttcactaacattaatagtctccagtctcatccaggttgctgcaaatgccgttaattcattcctttttatggctgagtagtattccgttgtatatatatacaacagttcctttatccactcattaattgatggacatttgggttggttctatgattttgcaattgcgaactgtgctgctataaacatgcgtgtgcaagttcctttcttgtataatgacttcttttcctcagggtagatacccagtgatgggattgctggatcaaatggtagttctacttttaattctctaaggaatctccacactgttttccatagtggctgtactagtttacattccaccagcagtgtagaagtgttccctgatcaccgcatccacaccaacatctgctgttttttgatttttttgattatggccatccttgcaggagaaaggtggtattgtatcgtggttttgatttgcatttccctgatcactagtgatgttgagcattttttcatatgtttgttggccatttgtatatcttcttttgagaactgtctattcctaaaatcttttttaatgaagagtaatgcatattcattacagaaaagaaatgaagagcaagttgtctatagtgccaccctacaaacagaccattgttattattttagcatactccatttaaacagctttctctgtgtgtacaagtttatattacatgttttcatttagacatttcagtttttaaaaaaatattctaattagcacctttgacagtttaaaaaatgtgtttttcatcatttcacattatttccttcagatctttctttatcaggttactggtgaatccttagctgtggatggtggaggcagttttgttctgggcccttttgcatccacgttaatcttcatgagtttttctactcctaatgtactaatcagcttcagtccatgcttcttgatttcagaatacttgcttattttttatatgctaattccagagagttctcagttaagtggttccaaattcattcttgaatctataaaagttttctaactcagatccataggcattataaatgtattcctatttttctagctctacatattccattttaatactttagctattgtgcaactgttggaaatttaggaagtgtggtttcctttttgataacactttcttcaagataatttcctgcaactttcctgggatggggagaaattgaatataccgctttggtttttgaagaaagaatatctctgttggactggaagatgcctggaagattctccctaattactcaaaagtttctttatctctgttttcccccttttcttcagttttccattttccatttcatcctacctaaagtatatgcggtaacaaattctttgttcctgggatttgctgcattttggtgctcagtgttttacaagtactgtggaacatctataagagaaaatagagacatttattgagctccttccttgcatgattctcagcacttcctcgaggtgtttaaaatgtaatctttaccccagacgtctaaggtagacattatcctcccattttattagtaataaattaaacctcactggtgtatgcagaggaagagtctggatggagaacccagttggttctgattccttgatgagttcttgcatttttgtcagattgaatctttaaactatccttggattccttgagccaatgggttcctctctttgtccagcctggtttacgtgggtttctgtcatttgtaacctgaggaatcctgactaagatgtacttgtttaatcttccatt

SEQ ID NO: 467343 - DNA, 726 bp, Homo sapiens
tgaagtcaggcattttggcggtatggtatggcatattgttcctgggctagaaacgtgtatagtgtgtgactgtgctgaatactgtaggcaattgcagcacaatggactccgtgaggtactcagggcaggtgtggtggatgaggaattcaggcagaatagatccatagatatatccactgttattaagccagtgtttggggcatccagcactagaatcccggttctccagttcttggtctactgctccgattacgggacagctaccacagtagaagagatcaaattgcccttaaaaatctccagtctgatgtcacagaggcaaaatctgacttcaccaagagactccgggcctgaaatcccacaagatggagaaaggaagttatttggggtcctgagatttactcatcaatatttaaattcctttctatgtgaaagcaccaagctcactgtctcaagatgtaaagatgcatggctataattaatttgttccctcggagcaggagtcagagccctaggtttggggaggaaaatgaatgcaaagagcagtggatcactgagagctgtccttgggtggagatgccagttaggaggagagagattgagtcagggaagggcatgggggcgattctgctgagctccactgctacacttttttaagaaagatatcaactgaggatatttgtcacctgtttttcacaccgagctggcaaatttcagcattttcct

SEQ ID NO: 467344 - DNA, 513 bp, Homo sapiens
ctctctggcaaggaaagggtcatagccccatgagggcattactgcaaacaaagtactgcagtctatgtttggagcattctattgaccttaggtggtacaagggttttatcagagagtgtgaaaaagatgttcttaaccagagaggtgcatcagacatgggtgggagaaagcctgatcatcttgttttccctaatgacacaccagagcttggtgtctggtctgcatggcctgggaagctgatctgctgcttccttcctgaaaattgccctcatgtggctgagctggtggtcatgtcagaaatggaaaatgtgctttatggctggtctttgggacaaggcattctggtttgtgtggcccaacttggggaggaggttttatggctggtctttggaacaaggcattctagtttttgtgacctgccctggaggaggatgaacggggagagataggagggaaggagaaagtcagaaacttggcttcttcattttagggtggtgttttctgagccccaac

SEQ ID NO: 467345 - DNA, 756 bp, Homo sapiens
gggggaggcctgcaggccatctttgaggtgactcgtctagagtggagacttgatgggccagcgcgatgatccattccatccactcctttcagcacccgtggtcatggaggcagatggagcctccttgaccttcctgaatgaccatgatgggcagagacccccgggcttgcacaggccatgtaacaggtcctgctcctcagatgtggacatgcatgtgaaccacttgggaactggttacaatgcagattcggattcagtggctctgaggacacaacatgcagaagagtgccttcccccctgcagtatgcaacatgcagaagaacaccttccctccttctctgcagcatgcatcctgcagaagaatgcctttccctccactgcaggacacaacatgcagaagaatgccttccctgcctccgcagcatgcaacgtatttattgcatgcagaagaacaccttccttcccctctgcagcagcctctcgcttgccaaaaggagacagcaaaggagagtcctcaactcacctgcaggcgcccatgcagagtgggtgttcaacagacacccaagcctgccaatctctcttaactggtttccagttagatgctgtagttatagagcttgctggaagagaacccaggtgagaggaagaggtgagacactacatataaaatgcagacccgagagctttgcaaaggtgttgagggcagaaggcagtctggggctgtttaggttcatggcaaagagcattagggctttt

SEQ ID NO: 467346 - DNA, 615 bp, Homo sapiens
agagctcctgacctgaggtttgcaaagatctgtgggagaagcatggtttctgggtcgctcattcggtcattgcttctctgggcaggggagtatcccctggctcctcccagtgcgagtatctggctgtttcagttgaaggtgttgtattcactcgccccttctgttcctctccaaatcatgccaccctcaaagcctcatccacctgtcgtgggcaaagtgactcatcacagcattgaattatactgggatctggaaaagaaagccaaacgccaaggacctcaagagcagtggttcaggttctcgattgaagaagaagaccccaaaatgcacacttatggtatcatttatacgctgttgtgttcactgacgtggaatggccccgcatggtctaccctggctagcttctctgatctcatgtcataccattgtccccttgtcaactctcttataccacgctggctgcctctcagcctggacaggccaagctggttcccatcgcaggatcttgctcaaaaatctgaaatgtagttgcaatgtaaaaatagttcttgttctgactactcaaatgttattttaatcatgtcgttttacttattgaagcaccacaagctgtgt

SEQ ID NO: 467347 - DNA, 516 bp, Homo sapiens
ttagggccattatgaacatgttacagtgctgcagagattgtttatggccagttttggggctggtttatcgccagattttggggggcctgctcccaacaggaagggctgtggtttccttggcaagcatggagattgaatccggaaaggaagaagaggagaaaaatcaaccaatgaaacttgcagatgccaataaaacaagcctcaataaatttaagaagattgaaattatatcaagcactctctcagataacagtggaataaaatcgaaaatcaactccaaaacgaaccttcaaaacaatgcaaatacacggaagttaagtaacctgttcctgaatgagcactgggtcaaaaacgaaaacaagatggaaattttaaaattcttcaaactgaatgacaataatgacacaacctatcaaagcctcttggatacagcaaaggtggtgctaagaggaaagttcatagccctgaacacctaaatcaaaaagattgaaaaagtgcaaactgacactctaaggt

SEQ ID NO: 467348 - DNA, 598 bp, Homo sapiens
gtcaccagcggaggccccccagctgcggaggcaggcatcctggcacctgccacccactatgccacagctgttgctactgctgctactggcactttccacaaagatgagaaggaatcagcacaagaaccctgataactcaaaaagccagagtaccttctttgctccaaatgaccacatcacctctccagcaagggttctgaactggattgagatggctgaaatgacagaaatagaattcagaatatggataggaataaagatcattgagctacagaagtattttgaaacccaatccaaggaagctaaaaatcatgataaaatgatgcaggagctgacagtcaaaatagccagcctagaaaagaatctaattgacctgatagagctgaaaaacacactacaagaatttcatagtgcaatcacaagtattaatagcagaatagaacaagtggaggaaagaatcccagagcttgaaaactggctgtctgaaataagacattcagacaagaatagagaaaaaagaatgaaaaggaacaaacaaaacctccaagaaatatgggattatgtaaagagaccaaatctgtgactcatttttgtccct

SEQ ID NO: 467349 - DNA, 1261 bp, Homo sapiens
tgtaaaaaaccaattagagaagagtgggtatttgtaaaataggtgaaggatggagatcaatcagaggaaagtgcaccaaatgggaagagaggttctcaatccagtccttcagctaaagactgggtccttgtccattccacgaccacgacaatttaggctcatagatggtttgaaggcgtgcttcctacccagccgtttgaattccaggttccacacaggaagaggaggagtcggactcctggctgctgcaaagggcaccaacttctgtattttcactccagtgcgcattcccagtgcgcaggctggccaaagcccaacccagagcaaggccctaactctccccaattttgtgaaggctgataatggtgaggaagctgcagaagaaaagtttgaagctagcagagattggtttgtcccgtattttagagaggcctgttctcctttcccccagccccaggcatgttcagtgtacccagaaatccggagttacctgcccaaaggtcttgatcgaatggtgtgcacacccctgggctgggcaggtcactgactaacaaaatgcttaatacataattctagtcaataaacatctgttaaatgcatgaatgaacaaatgaacaagagatggatagatggatgaacaaataatatctttcatgtagcatgggaacagaaaatactcttaaaagttttatttgaatctacctgttatattaatcactgttttctgaacttaacagacaagtatttgcagtcttcattttctcattcaacaatgaatgaactcaagctttatgctttacagtctaggaaaggggaagacactcagaacacaagtaaagaatttactacagggccatggtaaccccttaagtaaaacttcaaggcaaagcatttttctattaatgagggatctgcccccaagacccagacactgtccatgaggctccatctctaacactgaggtcaaatttcaaaatgaggttttgaggcatcaagcatccaagccataacagaggctaaaaggaaaaaaaaagatatgaatactgacttgatgttttaaacagaaaatagctatctaaatttctgccaggacactgacaatcgcaactagtgctgtcaaagtatcctggagaatgtcctccattctagatttgtctaatagttttctcatgattagtctggggttataggtttgtagaaaaaaagtaccaaacagctgaagcactcttctcatcatatcatatcaggatgggcatgatat

SEQ ID NO: 467350 - DNA, 630 bp, Homo sapiens
ctgccactgacacctcaagcatcattggatctgctgggccatatggcccaagtggcagagcagcttgcacagcagcctggacccattgcagacccttctcctgttctggacaccacccaaaaccggcagcctttcaggacacttaataaatgggagagtaaaggtatattgctggccttgccagctgaaggcgaattgcttctggtgggccttatggacagaaatggagaaaagggcatttgccaaatcaatggctgcataccaggtgctaagtacatctatgcaaattatgcattctggcactggggaaatgaccacaggatgagtccagggactcactggacccacttaagcacagagtttatctcctcggacaaaagtggaaaggctgatggcagcgtgggtcagggaggggatgttgccactactgggggtgggaaagctgtttcttctggcaaaaaaaggttcatcagagttcacaactcagtatccccagcttcatcaaggtcctcccacacatccccattccaagttgtaaggtcccattttttccaatcaatgtcctcactttaacagcagacacctggtgaggctgtgcatgcacttttcattgcagatcattagacgtac

SEQ ID NO: 467351 - DNA, 2536 bp, Homo sapiens
cagccactgctgagcgcccaatttgccaacagcagagaccagcactgaaccttcaatatggcaccattcctaggggagatcagccagctactcattggcaggttgcttatatttccatcattgaaagcacagagatttgtcctcactggaatagacactctagatatgagtttgcctatcctacacacaatgcttctgccaagactaccatccgtggactcacagaatgccttttccaccggctggggcaaagttctccggaaggccatgtatgctctgaatcagtgtccaatatatggtactgtttctcccatagccaggattcacaagtccaggaatcagggggtggaagtggaagtggcaccacccaccatcacccctagtgattcactagcaaaatttttgcttcctgttcccatgacattacattctgctggcctacaggtcttaattccagagggaggagcattcccaccaggagacacaacaattccattaaactggaagttgagattgccacgtggacactttgggctcttcctacctttaagtcaacaggctaagaagggagttacaatgttggctggggtgacttacccagcctatcaagatgaaatctgtctactactccataatggaagtaagaaagagcatgcctggaatacaggagatccctttggggcttgtcttagtatcaccatgccctgtgattaaggtcaataggaaactacaacatcccaatccaggcaggactacaaatggtccagacagacccttcaggaatgaaggtttgggtcactccaccaggaaaaaaaaaaacacgacctgctgaggtgcttgctgaaggcaaagggaaacagaatgggtcgtagaagaaggtaatcatcaataccagtcacaaccaagtgaccagttgcagaaaggagaactgtaattgtcatgagtatttcctccttcttttgttaaaaacatatttgttcatgcatacacttgtactaagaaaatatcttcattttatttcctttttccattatcatgtgatttaagatttactgacttcacattagcatttaagtgtttttaactttatgtaatagcatttggattggggattggtgcctttccagttgtatgaaggatagttgtaatatgttaggcataattatgaccttataattctctttatttgaagattatgtatgatctcaggaggtgtgtatggggtcgacttcagtgaagatcatgggtttgcatttaaaaatgaaatttcaagagcctttgagacattaagcaggatatggcagaaaggctatagatatagatatatagattgtgagttcagagaagcggtcagtgctgtagataaaattttcttatttttcttggtagtaaatgaactctaaaacctgagttagattatctaaggagaaggtttagagcaggtagtatgagaaccacagaaagtacagtgccaaactcaaatgaatttcaaaatttaatgtcaaggtagaaaaggatgatcttagaaagacggcaatgagaagtcagggaagcagaaataaaactgcagagccttgtaacagaaaaccagagagcattataccagataatttagagacaataatttaagtaaagaaagaaggaggcatgaaaagtgttcaatggtactggaatatttggaggaagaagggagaaaaaatataagttgaatttagtgagggcattggccaatggcttggccctgagagcctctagggggaaggatggtaatcaccctttatggcataaaaaactaaatataatgtgaatgtgcagaaaaggggaacaaaaacaatatataattacaaaacaaaatcttcaaaatatattaaaaaattcaaacaattcttaaaagcatttacgggcttaataaataatgtatattttatattgtatggttgtatataattgaactatttgaaaatatatcatgcatagaaataagagaaatacaggttattcagaagaaacgtcttcaaatattaagattatgtaaatactctctggatgagggagaaggaaggacctcaaagacaaagtagcaaacaaaaatgtatttatttatttaaatagtatttttataaatgatatgtgtactattctactaatgcattataccctctgaaaaacataatgagaatgtaaatttatatgtcaagacgtgatttcttgtgtttttttattcaccaaaatatgtgaagatctgataattagtcaactacactggtatagaaactggctctaacatataacaaactgacccacattaagatatcatatcaaagaaaaaaaaatcgtcgaatattttaaggtgatattatggagataataaaaataatttattctgtcatagcatgtggggataaaaagccataaaaaaggcaacttacagagtataccatttcctttcttcactaaatttgcaatatgctaacctgcttaatcattttcttaattttttttatttctgtaagttattggggaacaggtggtgttt

SEQ ID NO: 467352 - DNA, 1431 bp, Homo sapiens
agcgtccgcggtttcattcttgaagtcaggaactcagaggctggcgggatcctccatatgctgaacgctggtcccctgggtccccttatttctttctctatactttctctctgtgtctttttcttttccaagtctctcgttccacctaacgagaaacacccacagtgtcggacagcagacagagccccacaagagccagtggtagataaagtccaaaggcagtctgctggagaatttcctcttactcgaggagcaatacttcaagaacattcaatgggtcaaagtaacattggtggctcaggcttaagagagctgcagcttttcgaaactccatctctatgttttgtgaggaagaagccatgtggagaggcccacataaaggaaaacggtgcctcggcagatctaacagctgctggccatcagataactccatctggagacagagagatgggcttcagaggacccaaaagtcactattaatccagaaaatcacttctaatcttataaatgtctttccctgttgtcagacactgaatgtatttattctgcctgcaagtgtcacaagaagaaagtttgctatttattaagtcaatgtttacataattgaaaatatttttctttcttcatttttgttgtgctgtagttttactacactttagttactattcccattagcagacagagaaaatgaatcttggaacaatttgtattttttctcaacaaatcagtgtgaaaataaaacagaatcttgttaccagaggaatgaagcaaaatatgctaacaaacaaatgaactaaaacaaacaaacaaaaacctttcctttctaggtggataatgattcagcttctgatattctttcatgcacatgctactctatgacataacagtgggcagtacaagctcctgttttatgaggcataaatcttttatttatatgcacagctccctaattatgctgcatgctctttcaagtaatatttatatttttattttcattacaccagtaactagtacaatgattcacaatggtaggagcacacacaaaaaagtttatttatcaatattgactatatgacaggcgctgtcctaaggctaaatgatataaatttgaataagatctggtacctgtcctcaagcaatatagaatagagtctactgagatagcgacaaacagaattatattaatatgcccgagatctgtataacaggccgcaagaacctgaaataaatagtgcaatgatcttcagagatgatagggaagacatcctagagcatgagatagttgtgtatggtaaaaacaaggacatattaaatagaataactcattccgtaactgctagtctacaagggggagggataatatatactgaagctgagagagttttaagcaaggctgtgatggttaattttatgtgtcatcttggctagact

SEQ ID NO: 467353 - DNA, 947 bp, Homo sapiens
cacagctcggcctgctagtgcccacagacaggaagagttaaactgctgactctgaaggcagggaagagccagccatgcagctgtatgtgggagccgccagaataagcagccgagacagggcggacagtcacctggaaaagctgtagacactcaatgcagcccatgaaagcagccagaacgggggctataccctgcaaagccacaggggcagagctgcccaagaccattagaacccaccttttgaatcagcatgacctggatgtgagacctggagtcaaaatagataattttgcagctgtaaaatttgactgccccactggatttcagacttgcatgggccccaagtcaggtgccctctgtgatagggagaagcaggctgctgatttccgggtcaccagcagaaatttcagtcaggggcaggcagaatgctcaggcagtggaagagtgctgagatgcatggctcagtggcagcaactgctgcggaggccaaagggtggatcaccagccccgggttggggatggctctcagaacacctggctgcagccagcatgctcaagtgggagcagggtggctgggctgcagacctgtctcagagtcaggtcaaataaagcccgttgaccctggacttctcagcctccataattgtaagcaatgaatttcttttgtttttattaataaattacccagttttggatattctgctataagaaatagaaaatggactaagacaatattaaaaacagaggaaagtgtggatcttgagagttattaaataataaaatagttattaaatagtaaaagattggtaagagattaaggttttgaacatactaatgtacaagatttatcttaaatcaggatgaaaaaaatatctaattaaatgcaaaatcataaacaatataaaatagagaggtagagatcagacattgtcactttaccgactatt

SEQ ID NO: 467354 - DNA, 580 bp, Homo sapiens
caacccatggttgggaagctgtagctatgcccgggagtgtgggctccccctgccaacttggtagggtgtggggcccctgctggaatcacctgttcccagccttcaccagttccatggagcacaccgcagcagctgcacttcccctgctgcagctgatgtccttgcagaacttctccagatgggtggctgccaccatcacaaggaccttcaaagagtacacttcactcccctgctacctccactggagtaggtgttggtatccacagccccatccccaggggaaggaggagagaactacatcaagggagcacactgtgggaaaaaagaatttgaacaacagccctggagccccagatcttccttctgtcataatctacccaaatgagaaggaaccagaaaaacaattctgcaatggattcaaactaaggaaaaaatctcagggttgccagaaaaagaattcagaagggcaattattgaactactcaaagaggtactagagaaaggtgaataccaacttaaaggaataaaaaaaaaattacaagctatggacagaaaaatctccagtaaaatagatagcata

SEQ ID NO: 467355 - DNA, 774 bp, Homo sapiens
ggctttaccctgattgagctaaacaagggttggtgaatccagaaggacaagcacacatgtcaaatcgaatgtttctgcgggacaccttgtgtgtgtttctgcaacgccgcattgtgggtttggagggtcacccaacagcagcgttggtgtgagctgaatcctccggtgtgtgttatagccgtctgtgtttccgcacgcgtctgcaagctgtattatggcttctccaaagaaggaggaggacatggaggaggagagggagggggagagggaggaacgagaggaagaggaactgtccatggcaggacatggtgtggtcacaaccttgcctccggcacctgcgcggctgctgtgggctgagcatttggccatctgggccctgtgggctccaccttatagccccattcttccagcctccaaggagaaattcagtaacaacatggtggggacacaagttttcaaaagcgcttgtggaagaggtggtcccatcccacctgaagaatggggagaatcggatcctggtcccaggcagtgggcggtgggcggcgggcagtgggcaggtccgctggacctcggagtgtggcttctactggagacaccagctcagcctctgccctgggacttctgtttaaaaatgcaaaccacacagaatccattacctaaaaccttccactttgcattaaaaagtataattaagagttttaatgagttcgtgtggagctgcaggtgagtgtcattaacacatctcagggctgcagctggaacttttaaatggca

SEQ ID NO: 467356 - DNA, 681 bp, Homo sapiens
tcagagcccttcctctaagatggtggcagagaggggacctgggacgctatgcgcaggccacacacggccctcattcacctagctcagggccttcctgaaaatgtccccgctcaaaggaagatcatactgactccaactcccactgcaggagccagacacctgctgtccagactgttgggacaagagtgttgcaggcagcccgggggtcctggggggatgatccccatccagggccaaggacactttgagattcagcaagaggcccacctgctccaggctgcagctcctcagctgcctgattccaacaagcagcccggaccagccgcggcctctcgtctccctccttggcggctgctgcaattgtcctcattactgctgaggtttctggagcttcttcaaagggtggaggcaccagcgggcatcccaccccccttcagcaaggggctcacaattcctgcagctgagcaggggtcttcaggaccagaagtaaactgagtcaccctgttctaagccctggacgtctcacccctggtgtgcaagcttttctggagatgcttgttacttttgtcttttcacagaaggttgcataattcagggctcagccttcgtgttccctccccaagcaagcctttccaacccacgctaggtgaggtctgtctatgcagctggccccggctctcc

SEQ ID NO: 467357 - DNA, 1138 bp, Homo sapiens
aggccatttgttgaaagtcttgatactcagttctgcttcaattcattacgggaatgttgggggctgagggtggcagaacattccaggaaagaggaacaacccatgcaaaaatccggtgggatgaaaacaagcatggcgactttgaggtctgcaagaaggctgatgaaaagattaattggtttggggaaagctcaagaaatactagtcttgacagagtccgaggtcattccaaagctctcccaacacagaaaatgaggcagaccctcttagattttacacatttcacgaagtcttatatcacaagtgggaaaatagataattctggaggaatttgtatcaaagctgaaaagctgacatattatttgaaacttaataggatcaaacctccttccagcacagttagggattgggctcttgcaggtgctactgacactcactacaaaggacctgacacgcccacagaacatcaggcctttaaatcctcaatggacaaatgtggccttactggcctatgctggcattgaaacagatgggtcggggaagttagacaatgtttataagaatccatcaattgactttttcagactcatgattggctgactcatattcagccagggtggatgagcaaagctttataatattgtcgtaaggacaaaattgaataatattatcaaaggatcctgaaaggcattatttcaatgagcatttcccaatgaaaatattgctacatgattgaatgctgatggaaataatctattagagaagataaagttgaggatcttgaaggagggaagcagacaacaattgtagtagaaatacccctaagaggcaaaaggagatgggatctggtgcttaagaggaaggattggccttaggactgagacagaaaggacagaggaaggaaggccatgggcatagactgagagagtgaatagatgttgagaaatctcagacatgtttttatcagcagtatgaaaatggactaatataatattagattctaaaattggcagaatgaaaatagtgatatgaatggtctaacatgactgatctaattgtttagtatcaaaaaatatatatttcagttggtttatgaataataattatagctataatttattcagtatttactatgtac

SEQ ID NO: 467358 - DNA, 993 bp, Homo sapiens
tttttcattcctgcagcacaacatctgtcttttcttcttttgaatataagacgttttcatctgagaaaagtctaggtattgagaagacctatggacctgcatttaagtattcccagcaccgctgcctttggctcaggaaagcgtcagtgggtcctctctctgtttagaaactggaagcagtggcgccctgctcctaggctgtcatccacccggcagcaaagccttgactataggcacatcgtaaaacttcaaaagaacattcccatcccatctcgtaagcggggacttttgcaaagacaggagtgtagagcacagagagctcctcccaggactcgggacgccaccccttgctccctcttggctccttcctggcctcagctcctgccatacccctgggctttcactctcagctctgccttggtctgctcagccgtgtccctctggcacctggagagccagcacagggcatccagtcttcagttcacccctagagagcagccccacgtcacgcaaaggagagggagccatgtgattctcaactccgatccccagaagtaacctcaactaaatccctttctgttaaactagttgagaaaactcagattaaataatgaagatcaaacccgtttttcactccaatggacaccaacaccaaaaatgcagaaaacaagtagagtgacccagattgtgaggacgcttcaggcctttctttttcatttgttattcctaagccaccatttctacttctttcccaaaaaacatctccattcaccccagaacttgagcttatctaaggaagacacgggccctattgcaatttgtcatacttccacagatttttctcattgttttccctggatttcacatacagaaaacattttaagttaaggaatatatgtattttttctatcaaaaagtgtgaaaactccttaaactagatgggaagatatttaataagctgatattcagaaatgttggcaaaagttcactttt

SEQ ID NO: 467359 - DNA, 2817 bp, Homo sapiens
gaagctccttcaccagcactcctccctctgctcctccctctgcgcctccctctgctcctgcctctggtcctccctcagcttttctttccactcctccctccgctcctccctctgcccctctctccactcctcccttcactcatgcctctgctcctctcctttctctgctcctccctctgctcctccctctggtcctctctcggatcctctctccactcctccctcttgtcttccctctgcccctctctccgctcctccctccgctcattcctccattcatctctcttcttctccctctgctcctccctgaatccctctccctgctcctccctccgcttctccctctgctcctccctctgttcctccctctggtcctacctcagctcctccctcttatcctccctctgcccctctctctgctcctccctctgctcattcctccattcatctctcttctcctccctctgctccaccctcagtccctctccctgctcctccctctgctcctccctctgctcctccctctgatcctccctctgccccctctctgctcctccctccactcctccctctgcttcttcctctgctcctccctctgtccttccctctgcttcttcgtccgctgctccctccacttctccctccattcctccctccgctcctccctctgttccttccttctctcctacctctgctcctccctacctcctaccttgctcctccctctggtcctccctcaactcttctctccactcctccctctggttctccctctgcctctccctctgcctctctctctgctcctccttcagctcctccctctggttattcctctgctcctccctctgttcccccatctatccctctctctgcttctccctccgctccttcctctggtcctttctcagctcctcttcactcctccctttgctcctccctctgcttctccctttgctcctccctttgctcctccctctgcttctccctttgctccttcctctagtccttccttagctcctttctccactcctccctctgctcctccctctgccttactctccactcttccctccactcctctctctgctcctccctccactcatccctctgctcctccctctgttcctccctctatccctgtctctgctcctccctccgatccaccctcggcttctccctctttttctctctctgctcctccctccactttttcctctgctcctcccttcgctcctccctctgctcctccctttgctcctccctctagtcctcccttagctcctttctccactcctccctctgctcctccctctgccttactctccactcttccctccactcctctctctgctcctccctccgctcatccctctgctcctccctctactcctccctctatccctctctctgctcctccctccgatccaccctccgcttctccctctttttctctctctgctcctccctccactttttcctctgctcctcccttcgctcctccctctgctcctccctttgctcctccctctgcttctccctccactcctccctctgttcctccctctgcttttctctctgctcctcctttggcctctccctttgcccctccctctgtgctttgctggtgtaaaaacaaattctggtgacttttccaggccatgagttctgtctgctccacagacatgcagagtggaaggaaaaccacacaatacaaccaacgatgaaagaacgggggctcaggcacccgctgctcccgagcatccctgcagcactgacctttacccacggcgctgaccttcacctgggctgcataaagacgaagtcttatgggcctgggtttgctccagggagagggaagtgtgactctggggtgggccctggggaggcctggggtggaggcgaggctggggtcaccagtgtgcagacgggggagcgtcacggccatgggcacaccgatgggcactggaacactggggcctcacagaaggaaaaccccccagcgggcctggaccctgaaccaaagacgatcaacatggctcgcatgtccgtggacagtgtccactcctcagcctgcccttcgcggccacagggatgggctccttcttgcagctcccgcctgacttccagctgtggctgttctggagattcttgcagcagctgcagggacctgcctgttccagacaccttccctccctccagcctccatctcactggcctcatgttctccctgcctggactctgtgcacagacccccatggtcagggtcttcctgcctgagagggaacacctgcaccctgctcagggcccacctccttccaaatgccaggtaacaccactggtgccttcctgctgccccaggcagctgctgtcctggggtggggtccccccagcattgcagatcccacagggggtgctttctgtttgataagtacctgctggtagtaggttggtaaattggaacaagtcagttaaaaaggaaaatcataccaagtgcatagcttaagtcttttaagtcttggtgttgccatttggcggggagccgagtcctttcccaggtgagggtccgtggcttgaacctgcatctcctgccactcattcctgccatttcccttttctctgtcacctgtggttacttgtcaaggccagagtctctgtatcatgacctggaggttgatgggtcattctctgctacgtgacaagttggacggctcctgcagaaactgcaagtgctgtgtgaagctgccaggctttggggggttctgtgagccccttgccctcgctcccttcacctttcctgcccactggctgtcctcagac

SEQ ID NO: 467360 - DNA, 1005 bp, Homo sapiens
tgtaacagctgccaatgcagacatgcacctcctgccttctggggatgagtgtggctcctgtcctgggcttggtggcaagaccgaaatcccagagaagagcagaaagggcagctgtggccatgcaggtggtcagaacactgctgtggcgagacaggtgggttcagtacctggcagtcggagaggtggcagcacagccctacccggcactagggccagtgagaagagggctgccgttcctgtctgtgcagccagtgagctgggtccccagacctcaaggaggttctgtgaggtacccagtattcagtaccccagaccccatggaggttctgtgaggctaggtgctccctcatccatggtgctcctccacggttcaggatcctcctcccctgtgggcctggtgctccctcatccgtggtgctcctccacggttcaggatcctcctcccctgtgggcctggtgctccctcatccgtggtgctcctccacggttcaggatcctcctcccctgtgggcctggtgctccctcatccgtggtgctcctccacggttcaggatcctcctcccctgtgggcctggtgctccctcatccgtggtgctcctccacggttcaggatcctcctcccctgtgggcctggtgctccctcatccgtggtgctcctccacggttcaggatcctcctcccctgtgggcctggtgctccctcatccgtggtgctcctccacggatcaggatcctcctcccctgtgggcctggtgctccctcatccgtggtgctcctccacggttcaggatcctcctcccctgtgggcctggtgctccctcatccgtggtgctgctcttcttcatccctcatctggcaaggacactgctggctggcagctgccaggtagccccttccatctagagcagcaggccagaagagacaaaatcaggtacccttctgggtgaccctggtgagaacttaccttcctcaagaactgcaggccaaacagattccaaagcataga

SEQ ID NO: 467361 - DNA, 633 bp, Homo sapiens
cctcctcaccctctcatgcatgggcctggcctgatgcagctgagctgggcccggggaccaggcccaagtcaaggaactcacaagaatgcagatgacaaacctagcaggcaggaagtcactcagacactcagacctggcctatcccacaccagaaaatgaaggatggaaacgacacagggatcggcagaggatagtcaacccacttcgtcccccaggtcccggggcgagggcaggcacagcgcagtccccctgtgcaatgccaccacgcctcactccctgggcatcggtgaccctgcaagaaaatgaacaagcttattatcatttgcagatgttggtgaggactttttcatccctaaggtgtgaagacttcaccaaaaataaaggattttttctgatttcactgagagaaaatcacataatacagggaagctacaattcaattctcgaagtccagtgcaaatgtagcagcattcagccaaagcccccatttggtggaggttttgcacagggaaaattcatgtgagttgtgtgggtcgcctttgggggaaatctttgtgttcaatctttattacccaaggatcaatcgcactccggagatttgctgtttgatgtaatatttatctacagactgtc

SEQ ID NO: 467362 - DNA, 1292 bp, Homo sapiens
ggataggaacacctccagtctacagctcccagcatgggtgatgcagaagatgggtgatttctgcatttccaactgagtaccaggttcatctcactggggattgtcggacagtgggtgcaggacagtgggtgctgtgcaccgagcatgagccgaagcagggtgaggcattgcctcacccgggaagcacaaggggtcagggaattccgtttcctagtcaaagaaaggggtgacagacggcacctggaaaatcgggtcactcccaccctaatactgcgcttttccaatggtcttagcaaatagcacaccaggagattatatcccgcacctgtcttggagggtcctacaagcacggagcctcgctcattgctagcacagcaggctgagatcaaactgcaaggcagcagcaaggctggaggaggggcaccccgccattgcccaggcttgagtaggtaaacaaagcggctgggaagctcaaactgggtggagcccaccacagctcaaggagacctgcctgcctctgtagactccacctctgagggcagggcatagccaaacaaaaggcagcagaaacctctgcagacttaaatgtccctgtctgacaggtttaaagagagtagtggttctcccagcacgcagctggagatctgagaacggacagactacctcctcaagtgggtccctgacccccgagtagcctaactgggaggcaccccaaagtaggggcagactgacacttcacatggccgggtactcctctgggacaaaacttccagaggaacaatcaggcagcaacatttgctgttcaccaatatccactgttctgcagcttctgctgctgatacccaggcaaagagggtctggagtggacctccagcaaactccaacagatctgcagctgagggtcctgactgttagaaggaaaactaacaaacagaaaggacatccacaccaaaacaccatctgtacgtcaccatcatcaaagaccaaagcaatggaacaaaggtggacagagaatgactttgacgagttgagagaagacagcttcagacaatcaaactactctgagctaaaggaggaagttcgaacccatagcaaagaagttaaaaaccttgaaaaaaaatttgacaaatggctaactagaataaccaatgcagagaagtccttaaaggacctgatgatgctgaaaaccatggcacgagaactacatgacaaatgcataagcctcagtagccgattcgatcaactggaagaaagggtatcagtgatgtaagatcaaatgaataaaatgaagc

SEQ ID NO: 467363 - DNA, 802 bp, Homo sapiens
ggagtaactaaccaccagcattttactctcccaccctcatctcattatggtcacgtggatgcagaccttcaggtgggaccagaccgaccctctcaggacagacgcactgtgggatacccgctgtgccgggagagacccacagagaaggcggccccgtgaccacggagacacagaggttggaggatgcagctccaagccaagaactgcccaggaaggcaaaggacaccaggagccgggggagggcaccggacagaccctccctcagcgcctcgagcgggagccaacctgggactcagacatttccaccatggacaagacagcgttatcttcatttcgtgagcgtcacgtgacggagaagagtctaacagcagctaacttctgcattgctgatggtttcatgtttaacatcatcattgttccaggctttagacttgcagtgctatttgactgtgacagtgcaggagtatcgccgtcttggacaagcaccatcatgctaaagttcaccttgatcaaaaaccgcctaaatccaaagggctaaagtcagcatgaccataagccccaaataacatctcctaccagaaacattccaaacccctccccgaccagagacatgccagccctgagataacccccctccggctgggaagatgtcagccccaagataacctcccctctgcccagagacattcccaccccaccataaaacttctccctcacacagaaacctcccaagcttgtgataagccccctcaccctaaaaccaatctgtacccttggcctgtaagagaacgtgctcctgacc

SEQ ID NO: 467364 - DNA, 1641 bp, Homo sapiens
gtgctccgtgggctctctgtgggttgcgggtttggtgcgaggcttcacctgcccagtaggcacaggcacacttctctttattgtgcgtccctttcttgtgccttgctgatagtgtgtttttacaagttgaaggctcagaagtgactgctcccactgctgagcctggcactcctggcagctgggcccagggcctgcaattcgctcccagaggagccaaccctggcagggttgtgagctgggcaaaggggagccctggaccacccctgagcactagggcccccggggaacttgtggcaacatcacccttgccctcgactctggcacgggcctggcaaggccctggagcccccaccgaagtctgcaaggaggtggacagggcagcaggactggtggtgggagcagcagtggggttccctgtgccccatgtccccaaggcagccaactgtgccacctccacccttgcatggctgggcaggacctgctccgaggcttggagcctctgccacagcttcaacctcacactctgccatgtcctgggagcccataagcacccggccaaagttgcagccaggactcatgggaccagccccaggaacatcgggttcacttgtgcaagggccaccactgcggcagagggagacgcagagaagggcacagccaggtctgctcactttgcagagctgggacaggcaggagccatgacccccctcaagttggcagtgtgggagctgccgaggctcagttgcagccacccaggttgcagctgtgggcctgggcctcccgatgctctcagggcttaggcttgggggtatctgctcctgctgcctggcctctccctgcttccagtgcttactccgatcctagagtagggttggggccaagcctgggtgctgttgcagtccagccaggtgtgtgcacactcagggcagtgctcatgtgcagtgccctgctgcctcagattctctggactttgggcaccaatgagcgcaggtgggaggctgagacggggctggtggcaactcagcactggcctgcgggtacccctgggtgcaagcggcctgggcatgatgagtggtggcaggaggcagacgggctcctgggtgtgaaggagtgggttccagatgaggatgcaccttcaggccagggaggacctgaaggctgggggccggttgccagtcctctggactggagtagggacttgtgccttttccaggccctctcatggccacccatggaccaattggaaggcacttcctcccctctgaggcccataaaagccataaaagactcagccagagcagagcagaggacagagaggtgccaggatgaccagctgcagagaggagttatcagctgcagagagcagcagatgtagggacgaccagccacagagaggagctaccctctccaaggcctcctctctgctgagaactacagatgtccagttgaccagctgcagcagaagctaccctctctgctgagagctgaacactcatcaggatgacctgcctgcagagaggagccacccattccagggcctcctctctgctgagagcctctgagctgttctaacacttaataaagctcctctttgtcttgctcaccctccacttgtctgtgtacctcattctttctggactc

SEQ ID NO: 467365 - DNA, 817 bp, Homo sapiens
agcaggctgctgtcctgctgtcctcaacccaggcaggtccacgcagaggcaccacaggggttctctgtgccactttatggagcaacacttgagaaggaccaggtaacctgtgatatgaggatgatgcagggaactggggagctgggcggtgagtctggggaaaagggtgcaggcccaggaatctctgagtggccccagctcaaggtcagccccagactcaggatctcaggaacacagagcaggagctccaaggaggaagtctgggccctccagccttgggatgagctgctctgtatgtggccctcaggtgggggatcggggtcttcagcacctgacttacagactcatgccattcatccatccttgactcctcccaccaaagccctacagccagcccagcctccccggacactgggctgtttccactcatccagtcatgctctctgcatcctgctggccctgggtcctgggagcatggaccccaggtctctggtcctggttaccttccagatacccccaactccccagatacccctcacttgtattgaccgggtgtagggccatccgcagcctcaagaggcgaagtcttcctgcctgcctcccaggaggcctcccggcaggtgtcctcacatggcaagcaagccagaaccaatggcaatttgaaggcaggtgtgattcaaataaaggacttcattagctcaagttttggatattaaaacaatcaagttgaaaaatgtcagaataaataggtttataaatatcaccagatacttagaattaaaatttgcacattgacattagcttatttaatctcaat

SEQ ID NO: 467366 - DNA, 1027 bp, Homo sapiens
tcactcatgtagctacttctcctcggaagtggagcacaacctgtacccctaagtgtgggctgtgtatggcgatgtccttccagagaggacagcatggagagggggacttcacagtggggagacctcagccagccgaccacggccaccactgtcagtgaagagtcatgtcagcagtgtgctatttacgaggaaaacctcagacaaatcccaactgaggagtgtcctgcaatgcacctgaccagggctcctcaaaccatcaaggtcatcaacggcaagggccatctgagaccctgtcacagccaagaggagtccaaggagatatggcagcgaaatgtgatgaggtccttggcagaaatggaaaattgggtatcagcattttctacctgggagaaagaattacacaaaatcgtgtttgacccacgctatctcctgctcaactctgaggaacgaaagcaggttgacaataatagtgatgaaataggagtggtccagagaacactagcagcacagtgaagggtggagttctacaaaacgccacccagaaaacacggaattgattagagggggttctccggggactattttaaggagagacttgccagggctctgccctagcttttcacaaaaaggtccagtgggaaagaggaggaagcaggccacgccatagccagtgcactggagggtccagagagcgctcagaagaagtgcctgcaacctcatcaaaggggagcatggcagctcgtatgaggaatgggatggaaagaaatcatagctggaccccatccaaagaccacagtcctatttaggaagaaattgggttagaagtatcagacatagaatctgtacaggacctggtgtcacacagcgttttcatggggaaagctaaggcccctggtgtgaaaatcacagcccttcctctgccgggggagctgcacaggagaagagggtgatcctacacagaatcagggtcgagggagtgtgaatcaggcctgtttctatggcaacaaatagtgttttgtttttttgc

SEQ ID NO: 467367 - DNA, 903 bp, Homo sapiens
caaaaggcacagtgcaggtgagcatgactaattcctgccgattagccacctcatcccatctcatggacagagaacgtgctagcatccatggcatagctcaaggccctgggactctacaatcagcagttgcaaaaccagccgggcccatgtcctttccttcaggggagcaaggtcccccaggccctgaccacaagctgtgcagcctggcaaagaagttaaaaaccttgaaaaaaagattagatgaatggctacctagaataaccaatgcagagaagtccttaaaggacctgatggagctgaaaaccatggcacaaaaactacgtgatgaatgcacaagccacagtagccgattcaatcaactggtagaaagagtatcagtgatggaagatcaaatgaatgaaatgaagcgagaagagaagtttagagaaaaaagaataaaaagaaacaaacaaaacctcccagaaatatgggactatgtgaaaagaccaaatctacgtctgattggtgtacctgaaagtgatggggagaatggaaccaagttggaaaacactgcaggatattatccaggagaacttccccagtctagaaaggcaggccaacattcaaattcaggaaatacagataacaccacaaagatattcctcaagaagagcaatcccaagacacgtaattatcagattgactaaggttgaaatgaaggaaaaaatgttaagggcagccagagagaaagggataaacacgtctattttattggaaatcctgtgaaagtgtgaagtcaaacttcagggtttgagattggtgacctgttcagaggattcttatcaacctgaatctcattctggggtgaatttttactacaggaaacaaaaatacttctttcatttagccaacagtgcaagaaac

SEQ ID NO: 467368 - DNA, 4492 bp, Homo sapiens
aacatagaacactgctgcgaggaatacacttgtgcacgcactggttgatgtttggagacattcacctgtaagggaaattcctggacatgcagctctaggtcaaaggcacgtgcctatgctacctccttagaagtcttctcattcccctccacaatgcagtaacatccctgctccaaccagcactgcgtggggtggcttcccccagccttgcccatggagtgctgccagctgtaaattggcatcgatctgagagaccagatcacaacaggaggctagccagcctgcttcacagggagcaaaagagtttcccagcatgcacgattcttgcatctggatagagtccatcctggaaactgggattttcaaacttagttccatagaatctggttcatgttctcgtaaagaagacatccacatactctccgtggctctggtgggcacatgtctgggtgggtgtggggagccccagagcagtagggaagacccaagcactgtgagagctgccaaagacagactactggagtctctcaccctggaggccctcacctggagaccctcacctggaggccctcacttggagaccttcacctggagaccctcaactggagactgtcacctggagaccctcacctggaagccctcacctggaggctctcacctagagaccctcacctggagattctcacctggataccctgacctggaagccctcatccagaggctctcacctggaggccttcactttgagaccttcacctggagtctctcacctaaagaccctctccgggaagcccttccttggaacccctccctgatgactgctgagtccagagccagagtcaggtttattcacaggtatttgccttcagggatgctctttgaggtagcaaggatgactgttgacacaaatgaaaattcaccagacgacccatctgatgctggcgaattcaccaggcgactcacccaatgccagagaattcaccaggcgacctacctgatgccaggaaattcaccagatgacccactcatgccggcaaattcaccagggccatattccccaatggatttatgcagattcatggaagaaaattgctgcttgatgtgtcgatagtcagcaaccttaaccaaagcactgtgcccttttgaccaccattacacaagggataggagtaaattcaacaaacactttcacttgtgttatcctctctttgttcacttcaattatgttacaagaaatgtcaaagaaaaacatcaataacagcaaaaataattttttaaaattcctatcactgatcataaagtttatagaggctataacatgacaacaataattgttattttacccaattctgtactgtaccatcccatgcatggagaagataccatacattaatgagattatttgacattgcattctgtaaaacttacagataagtgtgtatacccctaggagacctcaggaaaaaaacctcctgttttcctgttttgaatgatattcatacaccaagaaaaacatcctttgaaatggaactcaagtaaactggagcctcgagaaggtgacatttattttctctcagaagcaaacattgtaaacagagagaggctgtgtcacagaagctggaaaatctagtgttttgtactgaaaattatttgactgaagccttaggacaaatataaaggatattcaggaggaaatttgaaagacagttcacatgttaattataatcatcaaaacacataaagtttagaacttcctaacttgccagaaagactccaggttatagagtatttttgatccaactttccatctaacaggaaaaataagactctaaactgcagtcgttctgagaggaaagaaccctgcgggtgtcctacaccaattctttcttcctttgcttttctcgtaatgtgatcacagtgaaatgaagtaataataggaaccatttgactcataacctcaccagatatttatgggagcacaatcttatttatctgtagttgtgatgtttatttgctagatgtttatttacaacgtgggggagaaatgtttttagactcaaaaatatattcattattagaattttctatacaagacttttgttgtacacacatgtatgtctgaattacaacttttccttatttttatttgcataaaggggtgcaacattatcttctgttacttaggggaactacattctcttaaagactttgggaatattactgttaataataaacactaaaatgtgcatacctgtgtgtaagttttatttcatgaatttagagagaactgagaacttaataatttgcgatttactagtgttgggatctgtactaactctggcagccagtgccaggacagtcctgcagaattgcacaaacaggcttttgctatttttgtctctaatgacacagccatgtgggttctatgtgctcaatggtgactaaaatgttgggtccagatgttatctccagcagcttgtgcctaaacagtaaatgcttataggcaccaccatgccacgccctgtatacatcattcattcagactcagtaattaatgatgtggatccaccagagtcctcggagcccctgggagggacaggtgtctgtgtttaaaagacatacgagatagatagtaggagggggtgtgactactccttcagatatattttttcctttttttcttctcttcacaaaacccacacaagcacctcactgacgctctaccactgaccccaagtttttagttgcacaaagaaaacaatagttcttccgtgctctaacaatgcttcgccataccttttactgaatagattccagaaactggcctgaggaaatccaaacttcgaaccaaggttgtgtagtgtcccaccttgggaagaaatgcagcgtgattgattcacagccttgttgctgccagacagatggccaagtgacccatgactcaagaaaaccacagtgaccagatatgctgacccgcatgccctacccccagggactctccccagtccagctgtgtaccctactcctgatgtcaattcccacgctttgcctaattaaaaaaaaaaacccactgactctttttgtggaaccagctggagtattcttgcacctccactgtctcccttgcattcaagcacaagcctccaaataaaagccttgtctgggaaaactgcttggccctgcattagtttccaggccatggaacccgagaccctgtggtctggaacacatggagaatgaggcaacagacagaggctttgggagcactcatttgaggatttcccatgaggtaagctccatgacacgtcagctccatgacacgtcagctccctgacacatcagctccatgaaggaagaactagtatttgtcacgtgcgtccatgtgaagagaccaccagacaggctttgtgtgagcaataaaactttttaatcacctgggtgcaggcgggctgagtccgaaaaggtagtcagcaaagggagagaggggtggggcaggaacaaatcataatggtagaatgtcatcttttgtggttcttcagttgctccaggccatctggatgtatacgtgcaggtcacaggggttatgatggcttagcttgggctcagaggcctgacagtatcatattctttttatgggtgaggaaacccaacctgggaatgtgaaatttctctctccaggcccccccatttgttaggtggggaaggatttggtccatatggtgtgactccacaacccactgtcttctccaccaaagaagcaagaatgcgtcattgcaaagtcttgagcagatgactgtggagagcaatttctcagacctgtgaggctactgagcccttgcaatggggcaagttgaaactgcaatttgctataagtttgaaatgcaccctggattcacaagacttagtataaaaaaagtaaactgttttattactaatttttatattgatgatatgttggaataaaaatattttggatctactgagttaaataaaatgttactgaaattaatatcacctgcttcttattgcatttttaaaatgtggctgttggaaaatatttttaaacattatttatgtggcttgcattatgacatcacaaataaaattgaattgtatttctattgcttaagttctactgaccagtaaagtgctgctttgaagaatcagactaggagatggtttgggagaagaaccagacaaggcctggagaggaggaccaggcacccagacagcacaaggcacccccgctggggtctcttagactgagttacccaagcacaaggaatgagtaattgaaaaatattgtcattggccccaatcagcgcttcctctgttccctgctgggcccattggagtgtgcccctcctggtgacagtgctgtggagtagctctgcagggtgcagtgggaggaggggctggctcattaccggttttgtgatgctaaagagattccagcactgactgcacctgttgggagggagtaggggtgagc

SEQ ID NO: 467369 - DNA, 1825 bp, Homo sapiens
ccagaaacaaagccatttgactatgcttatctcgtaccacagtcaaaactcaagggcaaaaaaagaacataaaagcaaaaagccatatccaaaggacagcagtgccccagtggggactctgtatgggagctacaaccccacattttctttctgcactggcctagcagaggttctccatgaggaagctgccatggtttggggcttgcaccctctgaagcaaaggcctgagctgtatgttggcccattttttctatggctgggatgcagggcaccaagtctggagactgcacaaagcagcaaggccctggatctggcccacaaaacccaatacaccacaagcacagtcaaccaaagcaaaaatagacaaatgggatcatatcaggttctgcacaacaaaggaaacaatcaacaaagtgaagagatggcccacagaatgggagaaaatattcaatgactgataggttatgaaccgttgtaaagaaaagaatgtcctggtttaatatgtttaataaattggaaaatctgtgtattcatcaaatagttactctttactgattgtgtgccaggcactactctagatgcttcttacacatttttaccagttttgatttctgtgtttcctagatttctttttatttttgatttttaatttgttagcatatggtcagatgacgaactctgtatgctttcaatctttaaaatacattgagacattttatatcctggcatatggtctgtcttgctttggtccatgaccagaatttggtgactgaaaatttaatccaatccaacaaatgttttaaattaaaaatattatactgtgtttattagtttatattttgtatttgctgatttttgtagtttctacttctctaccatgattccctatttttctcattataattatacatttttacaattccttgaaaatgtgtgtaaagcttgcttagtgcccttgtcttctattttcatacctttgccaatttaaagcctttatcttttggatgacatttctcatcaatgtcaagagtaaagaatgggtcaatgggtcatgtgttcttgcttatttttctaggacatttttgtttgacagtgtgattgttacgttgttgattgtttgagttttctatctgccttaatagagtcttaagtttggtctagctgtccattcagttacttgcaggtcaacttgattccttaaaattttgcctttacactttttaaagataaatttctagttgcttgtgctccatgactagatatactacttagaagttctctatgcttcttctattggtgatttgacatctgttattaatttgggaatgctcctagtcattattacttcaaatatttatctgctgcattatttctttcctcactttctgacattctcattgaacataggttacaacttttgaagttgtcccatagtacttgaatgtcccgttctattttttcccttctgcttttctttgaattacagtttgggaagtttctattgaatgatcttcacactcattgattattttatcagtcgtgctcagtgtattgctaagttcatcaatagcatacttcattgcagttacagtggttttttttgttttatttctaacattgccttttggtactttcttacaatttttatttctctgctatatttatcatatgttatagcacaatgtctactttttcactaagaggctgtattcgtttgcatagccttgcggaaaatttatatatatctattgacctgaaacctgtgaatgtgaccttatttggaaatagagtcttgcagatgaaagcaaatgaaaatgaggtcgta

SEQ ID NO: 467370 - DNA, 636 bp, Homo sapiens
cagaatcagaatgttaagaatgcttaaaaacattcttccacaagcctacattgtatttggcaagtctgcttctgaaatccagggccttttcctccttgagagcatcttggttgatttccgcagggtgcatgatccttcaatactattcaggattatacgaggcatcagaaataccagagaactggacgtggctcatggaaagagctcagggagaaaggcctttatggccagaacagcactgagtcacccactattgctgctggtggatcccccattttctgaaaaaatggtgaggaatctggcaggtcactctgtgcttctaatgaaatttcttccagataaacctgacagcaaagaaaagtatgacaccactgagaagagtattatgaatgtttaatgtttccaggtcacttcactgttcatgaagagactgccccggacttagagaccacaggtgaggttgagcatatagaacagataagcaaaaaaattgtgacattttttgcactgatgcctagatgctcagtttttgtgacttagtcatttgtatggctctgtaagacttgatacccatgaggctgtgcagattcagcccactgacttcagctgatttgcatgaatgcagaactgcctcac

SEQ ID NO: 467371 - DNA, 747 bp, Homo sapiens
gagggctgccagcacacttgctggcggtagatcatggcttggtactcctggggtagccactgcagctctggggtgatctcagtaattatgttctttccccagcttggaggcagcaaagggacctcagtagtggtgtggccaaggggtcttttgcttttcttctggaggctccacctcacagagatgcaggagagtctaatgcttgatgatctgaggtggaacagtttcaagccgaaaccatcccccactgtccgaggaaaaactgtcttccacgaaactggtccttggtgcggaaaatgttgggaaactgctgctttaaagggacagttgctgagcaatgaatcaatttcccagttgcttttcaccgtcgctttcactgttgtgctgagtgctctcagggttgaactttttcaatctcatcctttggggtatacaggtataaaaggagctctctgttctatatcctgtttctcattctgggcaaaatatttgagctgctgctctggtgctccaggcagggaaagcaacaggccgtaatttgagtgaccttgagttgccaaatgacaattgataatggtctatggaatgaaatttatcttccaaaagcatattttatgaaagcttgcgtataaaactttcccattacaagttagtaaaagctgacttattaacagctactcttcaaagtggtccgatcacagattgagaattttaatgaagttaccatgaaggaaatgagttatgtgt

SEQ ID NO: 467372 - DNA, 7031 bp, Homo sapiens
gttatttggaatagccagaggctgccatgaatattggctgccaacagcttttacctccaccctttgttggggaatcgcacttggctaaacaagatcccaaagtcaggttatggccaatgattgatgggaagggtgtacaatatggccttaagatcagactggcacagtctcatgggcaagatcaccctgcagagttcaggtccaacagttcccctggggtcaaaatatcctatgggagcaaagaaacactgggggccacgaatgagtcctggtgtgcagtagccccattcaggcttcccagcttcctctcccatcagcccagcatctgtgtcttccctctctccactgtcaatgacttccctctgaagatctgctcagagcaggccagtcttcctgatttcctagtcctcagggctaaatgttcaagagtggcagaaatagcagagtgctgtggaagacaatatccttgaattatacatgtcatcttcttttgaactaacatcaaggatgtttcctcagtaattacaagatttaaatatgtttttcaatattccattgaaatgatatatttttaaatcatatgattatttgttctattttcatctcatttctatcacccattgtagttccctatgagagatttttttatgtggatatttattgaccttgttctccaagttacccaagagaagggtgggtatgaatgagattattgacatcagtatggaaatgagtttgagaagctctttgacgacaaaggaatacatgaaagtttatctaagttgtaaagattactaaaggtcgtaagtttctgctatggttttagccaacttttaaaaagtcagactatgttaagtagaaccggatgaaacaaatgtaagaatattgaaaggccataaaagttaggagcctttgaggaaaatgacaatttcttttgagttagtgttcagcagcaaatgtattaataatatgtaagtataactcttaacttcactcaaatctagacttctgatggtatttttttaaaaaaaaacacaggtcatgaattatagtgaggacttgccataagaaaattggacttagcagcttgctattgatccattcaatgagtagtaacaaacatttcttttcatcggctttgcatctgcacatttatctgtttcgaaagccaattcgataaagcctcttatttgacattacctttccatgttctatactatttgttttggttagattgaactacgactgttgatacagtttcctgagggcattggtatacttaccattgcagagttatttatttcacaagacttcttctttgtccctttcaaaactgccatcttttccactgtgaaatggcctggatttgcaagcaggatgataactttggtatctcattgtgccatcaccttataacacttgctatgcttacataacttttcaattatgtgaccctattcaatattatgatgagggagctgaaatgagattttttctcaggtatcttatccactttcatgtagaaattctaatctttgcacgaatagcaaaattagtgttttggtaacacaaacattgaagcctctgaattttaaaaaaggagattctcaacttgagaaagaatacaggctctaaacttccaattatatgtgataaatcactaaaaatgaagccataatgtatgtgcgtgtatgtttataatctctcaggatttagtgaatttgcagacataaatttgcttctgacttataaaatcgagagttggaaacccttcagtaagcggaatgaaaggaacaatgaaatagtttaatgcctccaggtgttccttacccccagccgtgctttcttttgctgctttctgtcttgtcttcttcaacactcttgaacatgtaatgtataattgtgatccagcatagcatagaggttcaaaatgtagacctccaaacaagtcatctgtattcaagtcccaaatctgcctctaagcggctaggtagccttaaacaaaacttaatctctctgtgttttaatgaccttaaatggaaaatacgaaaaaaaaaaatagtacttgctcataggattgtggttagttttaaatgagatagaatatttttaatggttacttaagatataaatgtcagttattgttaatatctgccattaccatatttgatggccatctattgttttgtctgtgtaatatccctactattttcttgtctttaagtctccttgagaaatttctttccttattgtggttttcttagactcttactcaagacgatttgtcctgctcaagccaagcagtgaccatgagacaaacctcctagggcaatcaatctccactccatgtaattaaaaaaaaaaaaagtcaacaatactgcatttcatgcttaaacatttgctaagggagtagatcttatgtcacgtgttcttatcacaaataatatttataagagaatgggagaaaacttctggaggtgatgcataggtttgtggcatagattgtggtgatggtttcacaggtgtatatttatcactaaactcatcatgttgtatacctaaattatacagctttttgtatgtcaaatttaaaaaatattataaagagactagtaacattagacacatttccaaagcacagaaaacagcatgtaatgatgtgttatttacatgtggtacacaagtattgggtccacatttataattttttacacctatataaactcctataactatcccctatctaaagataaagaggactttctataccacagaaactgctttatgctctcttccagtcactacccataagataaccaatatactgatttctattatcataggatatttttgtatatttttgaagtttatataaatgtgttcataagatatatacttatatcatttttgacaacaatatgtctgaagttcattcatgtaatatagcactagtctttttgctctgctgtgcagtatctgattgtaggaatataccacattttatgttttctcttgcagatgagcatttggatttgctaattatgaataaaactgctgtgaacatgctggtatatatctttgaatgagcaaatgcaactatttccattagtattttcccattagtgtgattgttggatcatagaatatgatgtataaaatactatgttaagagacagtgtcaaatggtttttcacataagttaaattgtatgtctaccaccattaagtgagaattaaaactgttctatttcatcatcaatatttggtatcattagtctttttaattgccttatgagtgggaatatttattaatagttacatggtaatatcttaaatggtatttatgtttaattttctatttgtttattgtgattacataaaactcaatttttatcttatgatggcttatgccaaatatatattttaatttttctatgtgtacatttatgagtgttttcaaaatacaatattcatgtcatttttccctttgtcatgtcatggtgactggaatatctaagaaaatgattattttaaattattttatgtactttacctcaactttcaaaattatcagaataaaattgttaataatatctccattgtatattttgatgtttacatatttgaggtatattctcttttctattactaatattatattgataatttgtgttttttgcctcttttttctgatcattcttgttaaaatgtaatactaattttgaagaacaaattttggctttgtaattaaatttattttatatttgccttcttttcaataatatgtgttgtttattttcaaaccctttatttccttgagtttaatttgatgttcttttaatagctgtatgagataaaatgttagataattaacgttcaactttgtatagttctaaatatggccctttagacacattattagctgtatctagtggattttgatgtcatatttttaatttttattttcctcagaatattttctgattttcattgtgatatcctctttgacccatgcattatttggaaacatgtttcttaatttcttaattttggggggaatttaaatttcaagatgggtaccacagggaaataatggcaaaaatgatcacattaaatgtaatggcccaaagagatcgcctttgagtttgccaccaatgtcttcacagctgccttatctctgaccttttctcacttgatttactaaattactccatattcatccaatcagttctccttttgcttatgttatccagagtttctttctgcttcgtgcaacaaacagccctaactgagacattctgtacacaaaataccctgttctgccattccttgttaccctattcaaatgttgccaaatattcaaggtccaatttaactcatacttcatttaagaaatgcccacatcctctggattctgctaaatagtaacatagtttcttggacttattagttaaattgttttatattcaattattatttagcattctttctctaccaagattcttagaggtaggaggtagttaggaagcttagaaattatataggagctgaaattctggttaggtagttatccagactctatttttactctactagtgactggaaattcactactttaagaaggcaggctcttcaatgtttgagcagctctaatctttttaaaaagtatttttaatagagataaatagtacttttggaattcatatctacgatactagttcagttctcttaaacattacagtatctactcctttctcctcagaaaatatattgcagatatttagaaagtgctaccccatctacgctgaatcttgactttgacactttctgctctattaattattccttgggaggggatggcctccagcctcctgtcaccctgcatacagattctggattgcattacatttaaactgtcgatggctttcaactgagagaacacagcatgtcactcaagatgtgttccaatgattgtaggttagagtggaattcttacttcatattcataaatcatttaactctgcagttactagaacataaaatatagtaataagttgcagtaaagagactgttgctgaaatatgattagaggtgactttctattaaggcattttaagtgaaccctaaatacaatcctttaaccactgaaaatgagactatggcacaagagtaattgtcccctcaacaaaatgtcacatggtgggattaatttttttaactaatatgttaagaaagtaatttatgaacagtattaatagaagagattattactgaaaggaaataatattcttcgtttatgaaatttcatatatatacacacttacatatacaaaaaatgtaattcatagataactctcaggaatatgtcacccattaattattatgtaaagtaaaattatccaataataattattttggtttaaaatagaaaagtcaatattttaatatgatagaataatttacaagttactaaaaagccaaatttgtaatccataaaattctaataaaatgcaatatatatatagtgtatgtgtgaatttaagaaagatcaatagactctatacaaatagaaacagaagaagattaaagagttaaaaaggaagagagaatggaaaaagcataaaataatatcaaataatctaacgtatgaataattggacttccacagtaggaagaaagagagcaagaggaagatgaattatttgaagaaataatacctgagaagtttccaaaataataagaccataaattacagattcaagaagctaatataattccagaataattaaaaacaaaacaaaacaaacaaattctagacgtattgaaattgctgaagatgaaagacaaagagaaaatcttgaaggtatccagaaaaaaaaaacatattttatatactgaaatgtagaataaaaaatgaaagcagatttttcatttcaaactctgaaagccagacaataatagaataatatctacaaacagagatttctaggctcagggaaactgtctttttaaaaaagaggaataaataaagacttttcagacagtcaaagccttgaaggagtctatgccaacagcactgcacacaagagatattaaaggaaccacagaaaaagaaatctagaaagaaataaagctgaaaatgtcatacgtaattgtaaatataaaattattatgactttttaaatcaaaaagcaatgatgatataggtttatagactatggaagcgtaaagcatatgactaaatacaacaaagaatgggaagaggaattggaattatactattttaagatctatatatgacacatgaaaaactaaaatatttgaaggtagattcagtaattaactatgtactatttatgatacatactaatacatatagtaaacttgtactgaaatgacatgagtgtacgcgccatagtgcagtatacatactaaaatgtactatggcttaagtagtacactgtatgtattaatatgtactaatatgtactcatatgacttcaagaatttttatataacattcttgaaatgacaaaattatatgtacagagtacaatttagtggttggtagaggcttagtctagggaaaatgctgaaaaactaaaaggatataaatataagccaatagtagaattaataagaaattgtaaaatataggcaattcattttaaaatttttatctatttattttacaattttttgtggacacatacactatagaagccagagtttctcagctgatactgtgctgttccccagagctataagaaagcttaagatcagctgcgatttactgaagcaattaaattaagttattattttctggaagtagcattaaccagtactaaataagataagaaaatatttacagaagttacattgagcattcctggcatttaagcggtttttttaggaagacgttgcatcgagttttaatattttcccctatcacttggtggggttttatttgtccaatgatttaatatctgatccaaaacaattatgacctaatttatagcaataaatcaaaat

SEQ ID NO: 467373 - DNA, 822 bp, Homo sapiens
tgctttaggtaaaagaaaggatagaggctctctcgctctcccctctcactttcctcctaactctcctccttctccctctctccgtgccctccacccccgctgtctccttctcccttcccctctctctgatacccgtgctgtgtgcagcctagggacttggtgccctgcatcatggccactccagctgtggttgaaaagaagcaatgtagagcttggagcctggcttcagagggtgcaagccccaagccttggcagctgccacatggtgttgagcctgtgagtgcacagaagtcaaaaactgggggcagtgcagaaggaaatgtgggtttggaggccccacacaaagtctgtactggggcacgacctagtgcagctgtgagaagagggccactgtcctctggaccccagaatggtagatccaatgacagcttgcactgtgtgcctggaaaagtcacagacattcaacaccagcctgtgaaagcagccaggagggaggccgtaccctacagagccatggagcggagctgcccaagaccatgggaacccaccttttgcatcaatgtgacctatatccaagacatggagtcaaaggagatcatgctagaagtctgacatgagttttactcgtataaagtcaaggtttcagcaagttccgttcattttgggggctttggggagaaagtatttcttgcctttttacttcaagaggctgttgtcatttcttggtttatggctgcatttctccaatctcttgcttttgtcattagtctcctactacttactctgatctcctgacacctgtttataaagttgcttataatt

SEQ ID NO: 467374 - DNA, 1071 bp, Homo sapiens
ggttactatgcccatcttcactgctgtgagcctttgatgatccaatgttgtcaggcaaactaggacaattggtcgccttcattataggatcactccttcttctctctctctctctctctgtgctaagccacctggaactgggggtgtggtcgtgcaagcactcctgtggccacaactactgggactacactgggtcagacctgaagccagtacagcactgggtcttgttcatttctactgcagattttcacttaaagcccaagggctcttcagtcagcttggttgaattctgccaggcctggaactcacccttcagggcagtgggctcccctctggtccatggcaggtccagaaatgctgacccagaggctaggcctggaatcggggacccaagagcctgcttgttgctctaccctgttctggatgtgctagaaccaaaggtgcaagacaaagtcccctttactttcttgtctgcttttcttaaacagaaggagtcttttactgtagccaccgcagctaggaatgtgctgggccacacagatagtcagcacatctcagagccccaggcccacggcataccacctgaacatcactgctggttattcagggcccaagggctctttagtcagcagaaatgtctgggagctagagcctggaaagggggcctcataactttggcgccctatcctactgtggctgagctgatttccaagatgcaagagaaagtcctctttattctttgctctccaccacttacgcagaagattcgaggatacacgtgcttgtttgttacatgtgtttattgcatactggtggggatgaggcttctagcgtaccggatatccaagtagtgaacattgtacctatagatttatagaaataggagactgttcattattccatggtatatatgtgccttttctctccccttcctttcctttatgtgactttaagaagaccattttaaaaaagaaaataaaatatgcatttatttgaaatctatgagtgtctctgtttcattagagttaattgtagatttaatcagcaactattgggttgaaataggatgcc

SEQ ID NO: 467375 - DNA, 616 bp, Homo sapiens
gcgtctgatgctgatgatatttgccttctggctcacccacctcctccacaccaccggctccgggagactcgctgccggctcctattacgtcctcaccatccttctcggtgtgtggtttgtcaaagatcagatagttgtagatgtgtggtattatttctgaggcctctgttctgctccattgggcaccacctagtggagctgtgagaagagggccaccgtcctccagaccccagaatggtagatccactgacagcttgcactgtgcacctggaaaagccacagacactcaatgccagcccgtgaaagcagccaggagggtggctatagcctgcaaagccacaggggtggagctgcccaagaccatgagaacccgcctcttgcatcagaatacaaataagagacttctcaattatgtgaaccagtggatctggggaggactgctttccttcttgtgcctaaaaaatggaatacaggaaaggtcacaaagcagccaggctctggagataaatatgaactcaactggctcaatgaatgactcagaggtacagtttttgctgttgtttgtttcccaataagaggagaaagaacaaaggtttgcattgagcctcagaatatg

SEQ ID NO: 467376 - DNA, 1058 bp, Homo sapiens
ccgagcgctatccctggagcgggctcggggcactggggcatccatggcggttgctgcacgctccggccggaggagacggagcggagcggatcaggagaaggcagaacggggagagggcgcgagtcggagcccccggggagtgctaagagatggagggcagcaggagcctgggactcgggagcgggacccggacaaagccacccgcttccggatggaggagctgagactgaccagcaccacgtttgcgctgacgggagactcagcacacaaccaagccatggtccactggtctggccacaacagcagcggaccaagtggatgcaagtttcagggcaggaactctccagcatcttctaacagcactaagcgagggtgttttgagaactggggctttccagcccatgtcctcccctataaatctgcccccagacccattcaggaccacaggcagtgcacatcctgtgaacccttctcacctttagcaaaaagcctttgctatgaagagtctctgattatgacaacacctgcattcaaggtgcaaatgcatggtaattataggctgcttgtcaatctggtgaggaattctggatggttcactcacctccttcccttcactttcctgccccctcagctgttggacttgagcagttgtataaagacatgtctgttttgcctcgtctgtgggtgtgatgtgattcctctgtactgcagtctcgattgatggaaactgttgctagagttggtggaacacctggggggatcttctggcatgaaaggtgctgggtatgaatcatttgtcatgagcttggtgtcgtaagcaagaacatattgttcccaccctactcatcccaggcatgctgtgccctgatctaaatttatatagtaatccttagagtgttaaaatatatatttgcctttatatgtatgcataatggtgtatgtgtttattccttatttccaagggattttaaagtgctgtagcattaatctttataaaatcctttgtaggtagtaagtaggtgacgggtgttaatatctctttttcatatttttatgcc

SEQ ID NO: 467377 - DNA, 1462 bp, Homo sapiens
aaagtttaatgattgccccgctggatttcagacttgtgtgggacctgtagcccctttgttttggccaatttctcccatttggtgatttgcaacggagacgtgatttgtaaaggggagagtgccatgttgtgaaaccaacatgaacgctgtcaggactcttgctgctgagtggctggagagcagaggccccttgctgtccttatccagacctcttcttcaggtagctccagagaagggcctgctgccccttaccaggagcaggaagggctgctcttctcctgtcctgtgcaattcccacccttgtggacgttcaagaccacaaatgaaggctgactttcagttaaaatcatatggtgatagaaaaggaaaaatggactgccaatgtgatgaacagccaatgacagaattttattatacagctctgctgaatttgggagaagatggcagcttatccaagaaggggttgtaccaaacaggttctactgaaagtaaggaatatgatgccccaggagagactaaggtgcttttaccaaaagacgtggggaagataatgcgaaggcatcaacaagagcattaccctggtttagctccaccaccaacaccccaatgagaaataatgaaaaagcctctccattcatcttcctatatcactgcccaaggactcttgtgtctccccaatcaaatatttgtctcattcctcattgtttgcaacataaattgaagaggaagaatctaactaggttcttgccattgtggggttgaatgtactttttctgacctactacccactctaattctgtatgctaaattccaggagtccagctttccaacctagtttccgtattgaacagtaagtatgtcaaaatctggataagaaattgtttaggcttatacagatgagtatgtatatgtatagacacgtatacttacacgcatgttcttgttgaaaaattgttgtggcaaatttagtgtttgtgcatacaaatataagttaaaaatcttttcatatcagcacatataaatttagcaacttcatggttaattgatacatagaactccattataaagtcaactatatttagtaattactaaattatagagacctttgtagatatacagacctctggttatttcaaacaatgcgaatatatacacatacacacatattatttatttggttagtccgcattcaagctcgcgtaagcagcaaacactacggaaagagaatttatgaaggaaaattcctgggtcagagattatatacatttcaaatttttgtaaacattgtcagattgccttctgaaatatttgcaacaataaatagtctatcagtatcataatgcctgtgtttgcaagccctcagcaatcttggacattatcaaagacttttcaaatataacccatctgagagcaaattttaaaaaggcatatccttattgttttaatctgtatttatttaatt

SEQ ID NO: 467378 - DNA, 478 bp, Homo sapiens
agtgaagggaattcaaaatgtatcttcttctgcctacccatgggaaatttggaatcctacaatttcaattaagctttaaagggacaattggtgatgttcagcggacactcatccaagtggactttggcgatggtatcgcggtgtcttacgtcaatctcagctccatggaagatgggatcaaacacgtctatcagaacgtgggcattttccgtgtgaccgtgcaggtggacaacagtctgggttctgacagcgccgtcctgtacttacatgtaacttatggagaaatcaaggattggagaagcactgtgactctggcatcactttatgctcaaagcaagtcagaacaagaacataaccgagtcacactctcaggcatcttaaagatggagggtgtcatgagtgactgtggatgccaaagtgccatgatatggcagtgagaggtggctttataggggaaagaaaagcactggactgagtc

SEQ ID NO: 467379 - DNA, 987 bp, Homo sapiens
acagtcagctgcatcggggatgtggggcacaggggtcccaccaccacaactgctgctcctatagccagcacccacacctccccgctgcagctggaccaagaagataaagcgggatttctccgagctgaaagccgtcctccttccatggcaacagggtcagactcatcctacacagacaagaagcattagcatctgatctgctttatcctgcagcaacaggagcccaagtgctttatggcggaaagcagcccttggtgtatccgtggagacagggagcttctccttgctcagcttgttctaggatcagttaacaacttccctgagacgtgcctcatggttgtgctaagagaggatgggggaccctggttggagagaaccgaaaggtccactctggtgtccaggaggaggtccaccttcctcccttcaattaccagaatcacctggaggctcctgtatggtaatggtcatctggaccattggagccagggagaggagccctggaacctgttggtcttgctggaccatttgtgagactggctctggacttggtgacctgcatctccagggacagtccgcccttcagtggtccccattacagattggacagggaggggacaagctagaggagaaactcctcctgggtggacccagtgaggcagggctggagggagcctgttctcctcctggagatgcctctggggtttgtttctttagttttctgggattgtctcttgcagccttacctgagctggccaacaggagggttggatcagtcttataatgttggcaaagatctggattaccctgcaaggtagaatcttatattattgattttatatttttcttctttactaatatatgtatttaatactatgaatttttctgtaagcactacatttactatatcccacaagttttgataagttgtatgtttattttcatttacttcagtatatttttaaaatttttcttgaaatttcttctttg

SEQ ID NO: 467380 - DNA, 724 bp, Homo sapiens
aatatccttatatacgagctattgggacccctgtcccggatgccatgcttttcaggggtctgctgttgctgttcccagctgtgtggaagaatgccactcagtgtctgccactcagtacttcagttttggttgccaactgcagcactctctatctgtggcctggcagggagctgggctatagggaaaggtacacagacctcattttccttctgacctcccatctcctgtggtgtcttgcatttgctgaacctgataggaaaccagaagagaaggaggctttatcgcagcagaatacacaagcctgcctcccaggcaccaaaatgcggggagaaaagtggattgtaaacccatggaggacaaaacccaagacacagaacatggctctcttcctggagggtttcttccctttcatgctttcccatttttgtgtctacacatttaatttgagaaccttagcagccatgggatagtgtgatatttgtcattcaccttagggtgtagataaccatattctatggacactctgatgttgtctagacaagaatgtgaaatcatgtatatactttttgtagctcaaatgtacttagaaattagtgtcatagtaaaaaaaaataaaaatcagaaattgaattaaagaaactgagacctactcactaattagttcctatattttcttacctagcattagtttaacccttctgtaaaccaggactgtgaattatat

SEQ ID NO: 467381 - DNA, 686 bp, Homo sapiens
agatacccgaactatggtgctatcctgaactgccacaactcacatgaattttgctgcttccatggtgttcttcagtgtacttctgcagtcactctactcaaaatataattattttttgtttctgtccgctttttctgcattagtctggattctgtattctgcattagcctggattaaatgggaaggcatatggaagcatatgaaaactaaaaacagaaatatcatccttatgatagataatgctgtttgtgaaatttggcttaggtctgagggacaaattggctttcaaaagcttcttctcctgtgcttgatccccaacaggtggggaacaggccacacctcttcccctatctatctttggggcaacccacctcaggaaaaatgtgagttcttcagagcacttctcaaatcagtatccttcaatggcccagagcaatatcctgtggtgcaggacagacaatacaatggtcctgtggatgaggatagggtgtgcagagaaaggggcccagaaagaacacaagaagtggccctaaataacactaactgtttttagtggacaactttaaacgtacatctttttttgccagtgtttttggtaagagaattgatatgaggttgggatgcatacggactcctgaaaaattgcaaatagcttcgctgtggtcagtggactgaaaaaaaaatac

SEQ ID NO: 467382 - DNA, 806 bp, Homo sapiens
tcctcagacagctttacaatgcagtttttctaggagaggtagtcttcacgcagtctccagccatttatcaaagttactgatggcagctgtgggccatccagagtggccgctgcctttgtgcctgtcgcagcaggggctgggggcaggagtggcagcaggaatggccacgggagttgcagtggcagcactctcacctgctgcagctgtagggagggcatggggaagaagtggacagtccccagacccctctgccctcggggccactgtgatgggtctgggccgagtaaactgccagcagggaagctgtgcaatcaggcatgaaggagtgatcagagaggggccccaaggtggagctgggcctggagtggtgctgtgctccatggaacaggtgaaagccagtagcaagcagcagccccaccctcttgggcatgactgcagctgcccaagtcactgctgtggacctgggcctccctgtgctcttgggggtcaggagcaggcaggagccctgccctcctgggtgcagctgcaaatgtggacccagtcatctctctgcactcttgggggcttgggaaggcccctgttgcccccacaggctcagaggtatttactcccactgcctggcctttttctgctcctgcagcccactccaatcttggagcaagaatggggcaagccaggtgctgttgcagcctggccaggacctgaggtagagatattgagtgggcagttggagaatgaagatagagagagcccgtagaagaggtgtcattctctcccgcacacagatgagaataaggaggtatcaa

SEQ ID NO: 467383 - DNA, 597 bp, Homo sapiens
ggaagtgtaaatgtccaagaaatcttcagaatttatgttcttctgctgtggcttcagccggcccctccattcgggttccctgacttcccgcaacctcttttgcttggctgacgcccatgtacaaagccgctggaacctgcctccagtgagccaaggtgatcttctttcctatggaatggtgtttgccatttggctgcagttccagaggccaaagcatatggaaggactgaaaaagatgaaatgtgggagaaggatgagtttcctggtgggagttccctggggggagccctggcgtgcacaggttgcccagagctcccaagagagaagcagcagtgcttgggtgttgagggtcaatcctgtgctacatagacaggggcctgcttgttcccaggggacctggaaagcacccctgaagggctgcagaaggggttaggtttgtctccaaattcttcctgggtgtctgtcttaggggcatgcatagataaggattaggggaggctttcttcttttgccaggtcacagattaattacttaaaaaggaggatgcacaggtttgttacataagtaaacctgtgtcatgagggttggttgtacaga

SEQ ID NO: 467384 - DNA, 596 bp, Homo sapiens
cttaggcatcaagaagccgtgggcattattagccatcagggaaatgcaaacaaaaataatctcagtgacataccccttcctacccactagggtggctgtcatcaaaaaggtgggtttagatcggttttataatcttagactaacttcttatgatctggtcctaacaagtgttgatgaggctgtctttggctttagtgtgaggaccagacctggaggggcatttcagaggtcgctgcagggagaccagaggggaggctcttttaaacagtcagaattaatgtccttagccaaccaaaaggatgacatctgggccatagcgaggatatctggtgttgtagagtcacagaatgcaagctcagcagagaactatgagtttatccccaaatggaagtttctggaaagagtcacagtctactttggtcttttatgttcaaagttagagaagcttctggttgcatctgggtaactactgtcttaatctttactcttcctcaactatattttatggactaaattatagattatagaaatatatgtgaattgggggtttgggatggtttaggacaaccttttaaaagttacccatgcttggataa

SEQ ID NO: 467385 - DNA, 601 bp, Homo sapiens
tatttgacaccagatgtgcagctcactgactgtgaccctgagaagctgctgccaccctcccctttcaaaactattattgctctgttcggcttatgaagagctctagtaaagacagatcatgggagtctcaagatgcaggggaagatggctacaaaggagagaaaacagagcgactatggagagatggagaggacttcactgaaggctcgccaagttctcagcttgacccattgcaaggaatattctcagcacctgtccagtcccaaccaaagcccacagccctggcagagcagcaccagaaaaggaccttcccaaaagggggtaaagctctccatgggggtagagaggaggctgagcaggccaagtgcacacaggtgacagggcctggccacaggtcatgtctgagatggagattccagtgcaaagtgctttcacctgggagtggggatgacggaaaggacagcagggatgtggaagtaccagaggtctggaaccagctaggcacctcacagcccctggatcttgattcgtggcaccaagatcctgccaacttcatttgatttcccttttattttcattacttacagaactcagtacatat

SEQ ID NO: 467386 - DNA, 612 bp, Homo sapiens
tgccaccacaccatttaggtggggggaaaacttgacacagaatggaactcctcagatgctccaggagagaggtggtcttcaaaagcagccagcaggccaagtctcagagaagtgctttggccacagcaggagggattgaatgtcatgctgagcacccaacactagttctgatgctctttgccagtgtgctggtgacttgccttgaggctgctaaactcaccgtaggcttccagaccccctggaacatctcccatccattcagcatgcaaaggctgggtgcaggcctccagattgccatggacaaggtcaactcagagctagtggaccttggaaatttcaccacttacaccaactcagcctgcagcaccaaggagtctcttgctattttcaacaaccaggtccagaacgaacagatttctgccctgtttggaccagcatgcccagaagcagctgagcctgggtgacacagcaagactccgtctcaaaaaataaataaataaataaataaataaataaataaaagaagaagaagaagaaacaaatgcttggttttaaatagaaaactatcaattgtttgagtaggcttttctttggcgtatataataaattaat

SEQ ID NO: 467387 - DNA, 657 bp, Homo sapiens
ttctcataagatctggttgtttgaaagcatgtagcacctccaccttctttctctctctctctctgcctctctctctctctctctctctacctcccctctcctgccagccaagtgaagacatgcttgcttccccttcaccttcctccatcatgggttcagaagaagatggaaagatgaaggaaggttttaaacttcctagagaattggatacttctgtagaaaatgctgatagtgatatggacaatgaagttcaggctgaggatttctcagatggagatgagaaacttattgggaactggagtaaaggtcactcttcctgtgctttagcaaaaagattggcatcatcatgtccctaccctagagatctgtggaactttgaacttgagcaagatgatttagggtacctgactgaagaaatttctaagtgtcaaaggaagcaagatgtgtcctgcctgcctctaacagcatattctcatatgcatgcccaaagagattatctgacactggaagttacatttaaaagggaagcagaacataaaagtttgaataacttgagccccaccatgtagtagaaaagaaaaactcattttctgaggaagaattcaagccagctgcagaaatttgcaagataatcttcaccacggggtggaaggacgg

SEQ ID NO: 467388 - DNA, 491 bp, Homo sapiens
gacagtcagcgggcagccagatgcccaggaacctggaaatatgtggtgtcagagcccatggaagccatggcagctggccctttttcatgcctatccctgtgctggatgatggattatagtcaggacccggggcagacacagcccttttcttgccttctttacagtgaagaccgacataacacaatcaaccaggtggttccccagctgaggggctgtcctgaagtcttaattcctcccttccaagaaaaccagcagctgatcatcatcttaagcagatcagcaccagcagccagatgccgttcaggcttaagtgcccagaaagcctcacggattaattgcacactctgtgtcattaacctccaggcactgaaaaatgatcaggcttctgtctcttacatgtattcagtgagtcttcagggtacgttaaggcaggaaggggaagctggcccctcccgccactttaaagtctaggagggtgaggctatggagag

SEQ ID NO: 467389 - DNA, 1157 bp, Homo sapiens
cgcctgcttagccctcttccgagtgacgcccaactgctaagggaagaatgcctcaagtgagcatgcgcacaactccagtaaacaccgtgcctgcggccctcctgagcactagcaggccgctgtgcacgcggacggcacaccccaagggaagaaccaagggagaagaaatgcaaaccccagagccatgccaacacaaaaaaccccaagtcaagggtggatggagcactgagacctctcacatcgcctgcttggccctcttccgatctgatgttcttcctcatgcaaaagtttaccaggggattcaagatgtggtcgagaacaaactgcatgatctggtacaaggacatatccagaaaaagcctccgggtggacctatggccctggccacaaagtatgatgaccttgaaattccacgtgaatgccccggaagacatggactccagaggaggctccgaacagtcaggtgggcaggtgtatgccccgggaagacatggactccagaggaggctccgaacagtcaggtgggcaggtgtatgtcccggaagacatggaatccagaggaggctccgaacagccaggtgggcaggtgtatgccccggaagacatggactccagaggaggctccgaacagccaggtgggcaggtgtatgccccggaagacatggactccagaggaggctctaaacagccaggtgggcaggtgttccttggacatcacagttccaggaccaggaggaaaaaagaaaattcatgatgcacatcagggcatctgagacaaatgtgagaagcctgtcccagagcgtctgttctacggatgcgtcccactgtgatattttaatttatttctattttgtgttcatattttattttttatttgtgagcccttttgtattaagattattaactctttataattcttgaagctaataattttctgggttaattgaggttgtttctgagagatgtggctggtgggatgacagagagacagaaggagagagagaaagagagagagagagagaggagggagaggagggagaaggcaatgtaatttgccttactttgcttagttgcctagcagaattatactaagattgggagaaggcaatgtaatttgccttactttgcttagttgcctagcagaattatactaagat

SEQ ID NO: 467390 - DNA, 473 bp, Homo sapiens
tccagtctgaggccaagacttgccatgtgtaaaactcacaataaacatgaaagtaaatgcctgttaaggaggagcaagctggttctgaactttatggtcctgaatggcagaggaccagcctctgccatcaccatagatacatctaaccagctgaggcttctaagagccctgagcaggaatgggctgcacctgtcccaaacccagaaaaagctgacatctgtgtgcagaactggctccactagggagcagatccaagggggtgaaactgtacgtgtccagaatatgacacaggatgagggtgtcatggtcagcagctttgacagaagtgcctgccctcccccaacggcattcttcactgaactccaggagcctccttctctcggtttcccttccacgccactggtgctcattttctcccagtctgggtcctcgtcctctccatcttctgataagcactcagtcctctagcctcc

SEQ ID NO: 467391 - DNA, 561 bp, Homo sapiens
cagtttgcagatgatagaatggcagcacaccaggaagtcaacaaagaaaaacttcttataaaaatcacgaaggccattaaggtcaagaattctgggtgtgtggctggggccaggagcagggggacgtgccaggatgagaagaaacctacctgcacgtggcccctacccagcctggaggtcagaggtcgcccctccaaggtgagccatggcaagatcatctctccaaacctagcctggaggtgtcccaatccagcctcttatgaaaagccaaagctccacttttcacccatggtgaagccagtggttaaacctctggctcatcgaagagtcgcacatgttgttgagcaaagacagtgccagccaagggcccgcaacctgtgtgcacccttttctaaggccgtgacacactacaaatacttcaagcatgtggataagaaatactcaacgggtaaaaaaatcccacattaactagtaaaaaatagccaaggtttgttacatgggtaaattgagtgtcactggggtttggtgtacaaatggttttatcaccaaggtagtcagcac

SEQ ID NO: 467392 - DNA, 692 bp, Homo sapiens
agagaaagccccccgtacagtgcatgctaacttggattaaggggtgcagctctctccacccctgcgaagggaagcacgccaatctcccgttatggacagggtggggctggatgctccttcacccccgccccaggctctgctgcacactgcccgtccacgcagcccagcctgctgaggcctcagtgctgccgttttcccggtgcttacgctcgggcacagcaatcgatttggacagggaagccactcccaccctggcggagccccttccttcaccgctggggcccacctccgcacggtccctcgggcctgcaggggcctctgtgcaggtgcatggcgatgtgtcggcgcagggtggggaagcaggaacttggccattgagccagagagaaatgggaagggcgcggacacatgagttatcgtatgcagcagacacgggtcatggaaagggtggtggtgaggatgctgagaggtaccagggaccatctccttccccgtgaacagctactcctgtttcctgtcatgaagactatgggttgcattctcatgcttgtcatccagaaaataagttaggaaaacctgggacgtacggaggatggtttgttaattcctgcgctcctcgatttatatgcataaggctattgcccattcctgcatgattaccttcgttaaaaacacctttctcttgctctaac

SEQ ID NO: 467393 - DNA, 576 bp, Homo sapiens
agcagtgtgggggacttggacggattcaagtgggagaaacaggatgcctataaatttgtattcttgctctaccacgttgattatgccaattcctcaaaatttttccacctgtggtgttgcaagaagagggagtaggaagaaagaagggagaaaatcgaagtggtgggagagatgtggagagatctgcgagcatctgttgaaaggggtttctacaaggaactcaaaacaggccattctttcccatttctgtcaacatctttgtttcttattcatacataacccgtccaacccaagtcctgtgctcaaggacttgttgtgggagaagggtgcagattacagacatggacaggtgctttgcaacctccagcagcaagaactgggagtttccccagtccttgaacctgggcttgactttgacttgcctctgccaattgactgtggtggaggctttgttggaggctctgggtcttgttctcaggaggtctaacggtttattctgttgcccacggatctctgccagcctgtgggaaagatgggacagccttgctggggagagagacactaggtggagaggag

SEQ ID NO: 467394 - DNA, 1511 bp, Homo sapiens
gtaaatgctacttcattgccaccagcaaaatatatcctgtgtctgactcccagattctgcaaaccctgaattaaagcattgacaatgggaatctcacctgtctatcaacaaccccttccacatggactcacttttcctcagcctctccgtggcttgtcctttgaatgctatcattctggtgttattactgtcatttttgaaacagggcagtatatgttgctgacattactagctgtttttggggaacaggtggtgtttggttacatgaaacaatgtttcaatactgtttacaccaggggctttcttgtacaaaccgtctttacacaagacaagaataacataggaaagaactatttgtctctgatctgtgcaaagaaggagagcaaacgggaatcctcaggggctttttcgtcttttaaacctaccaggaggagattaatcaaagtatggtcaactgtgatacaaatggattttgccaaaacatggtcagtgtgtttgaagtttcttgcaagagaaaaatataagaggcaaagccacccaaaatatttctggtcagcagaatgtcacatagatgggtttatacaggatgtagctttttcagattgacttctttctcttagtaacatacatttaagtttcttccatgtcttttcatgacttcatagttcatttattttaagtgttgaatgacattccactctctggatggagcacagttgatttatccattcactcactgaagggcatcttagtttcttccaaggtttggcaattatgaataaagctgttatatacttctgtatgcaggcttttgtgtagacaaaagtttttaactcttttgaataaatagcaagaaacacaattgctgaattccatggtcagagtatgtttagtttttaaagaaactgtcaaactgtcttccacagtggagcaccattttgcattttgcaccatttccaccagcaatgaatgagaattcctgttgctccacatcctcaccagcatttggtggtgtcagcgttttgcattttgttcatgctaataggtatatagtagcagttcactgtgaacttgccaattcctagtaacatagggtttttcaattttttcatggacctatttttcatctttatatcttctttggtgaagtgtctgttcatatcttttgcccatttcttaactggattgtttgttttcttattgttgaattttaaggtctttgtatattttgaataccaatccttcatgagatatgtctcttgaaaatatttttttctcagtctgtggcttattttttcattaccttaacagtatcttttgcagaacagaaattttttattttaaccaagtccagcttactattttttttcatgggtcatactttcagtgttgtatctaaaaagtcattgctaaatccagggtcacctagattttcatatgttatcttcttggggattcatacttttgcattttacactcagttctagtatccattctgagttaatttttgc

SEQ ID NO: 467395 - DNA, 545 bp, Homo sapiens
aggcatccaaagacaaaaagaaaaaaaatacgcaaatgcatcttcttacaaaagaatacttcactccagcaggtgactgcataattgtgggcacaggccctgtgctcattacatggaacgtggtggagtctgaattgacttcctgcagagagaaatccccgcaccccgtttcaaataacgttggttcctctggggagagctgtgggtctgtctgttctcaccgcctgcctctgcttctggcaaaatctctgagccacttctcccaagctggtgcagggacggtggccacttctctcaaagtgacacctgctttatgggcggagcatgggccaggtgaagcagcttcaagttttctaatttggatttctgtgtgcaacctccatcatccaggcccaccagggtgcaggggacctgagttccgatgttcctggcttgtcttccctggagtcgagtctctgtcctctgagagggccctggggggacaaggcagccccaaactctcgaggaacttgtcctctgcatcacgtagttgtgggggatgagaa

SEQ ID NO: 467396 - DNA, 641 bp, Homo sapiens
agcagccagctcggagccgcacttcaacaggtcatgagcgcccacggagatgaatcagctactggcaccaaccaccaccacagccatatgcagcggactggggacgctgacccaccactctacaacactgggggtgcacagctaccctccatcctcaaacagaagcaacagagcgtgaccagtgctgagcaggtcctggagacacaaaggaagagaagacctgggcctgagttacagatggttctgcacggcatgcaggcagcacacaggagtggatgctggcagcaccaagcccctgtgaggtgtccccaaaggacaacggacaacggaaatccccccagggcagaactccagcagtgcccatggatgttcttttttattcttcttgttttttcatgtgtgtgtgtgtgtgtgtgtgtgcgcgcgcacatgtacgtgtgtgtgtgcgcataatatattgcctttaatgttttatttcctagtcatgtcaaatatttgtgttgtaagcaaacagtatctgaatttgccccataaatgcatatttatttattcaaatattaatacaggtaaaataatctttgtgtatctattatgataacttgaactcgtcagggtggtaatgacacaataggggtgcagcc

SEQ ID NO: 467397 - DNA, 1614 bp, Homo sapiens
accactgatgaggagtccatttctctcgtgactaatgtggatggcttttgctgaatggttgctctatcaatttgtgctagcctgacctggtgtaaagttatgtctctaatctccaacttgctgatccaaactaaaacttgcgaaggctgcagagccaactctgctgacatcatacctccagggagagatgagggggacattgttttcattgtgtcttccttaacagatacagctccaaactgtagacacagtttcatggaacacttagctatttttggtgaatgtggaggaaatgggcccccagggaatgagagcaggagctggcgctcttggagcaggctgtggggtgctcaccgaagaccctgggcccctcagcgatggttacagtgtacagcagcctggcctgccagggcccaggtgcagcgcagaagccagaagcccttgagaattaacagcctaacccgaagggagctggtgcataatgctcccagctcccacaagccccggagtgggcagatcccagccaaggggtccaaactgacgtccgtggatctccagcctggactgaggtccacttactcacagtgaatactggctttggactgaagccaatactggctgtctctactttcctgaataactccctaacttttaccaggatgtcccagggtcacttcccaataaaagccatacctcacatctttgtctgggtgtcctcttttggggtgaacctgaactaagagagccttcatactttatatgaaagcatatttctattaacttattgtgtactggtctaaaaagatagccttctatacttgttagtgaagacattgttgtaagagttatcactgttattttttaagcaatagcttagaattcttagagtatttcacattaaggaatgccagttctgctttttcaatagaaagttcttcaccctttccaagaaaaatttgaggatgtagaataagaacttacaagttatgaaatttatatagatgagtttatcttgggaatatttaaaaagcattcactaaactgtgtgctatatgcaggcagacacagagtccatttggtttttgtagttttctatatttattacaaagaagatatgacacttctgtgattaaaacaattaaatctcttttaatattctctggtaaatatttagctcagaaaccttaacttttcaactaatttaatttttcaactaatattaaaattaattaatttttcaaccaatattattttttcaactaatattaaccttaatttttcaactaatattaaaaaatgtttataattagagagctgtgtcttttattatttgaaaatcccaatttattattttttttgcttccttgtaattaaattatcaggtaaatgctagtccttaaatgtctgtcctgattccctgccttattgaattgaactaaatggactcattttttgcttccgtcggctgtagtgatgatttcctgatatttgcagatgacacaactcaggaagatttgcaaggggcattccttgttgcttatgaccaagtaagtgatgttccacaggaagcagtgttgttttctatttgttgtacatctaaacttttgctagagc

SEQ ID NO: 467398 - DNA, 677 bp, Homo sapiens
cgacgtgctggagaaactagagctgctgggaggagaggaggatgtggccctagacaggacgttcagtaggatgttgagtaataaccacaggaagaaacccctttgcctgggtccccgtcataaggggaagatggtccatttctcagctcctgatgcgatgctggctgtaagagagggacgctggaggaggggctgggaattggctgctggaggaggagaactgcccttccgtctgggcaggaaagcactggccaagcatttcctctggggagcaggtctgtgttcaacacagcagctttcttcttcctcctcgcagagacgtgaggtgatttgtttgactgtccgctatgaaaatctagtggggttccagggtgcaaacacacagaagtgtggggtccttctaagactgcagccccacgcgctcctcatttttgtgtcagtccatgacccacctcaagaaatttgtcataaaacatccacgcattctggcaaatttgtggctctgtggctctggcttcaggtcagctgccgtggcctgtccctccagatccagggtagccccctgtccttttgggggttctggaatgggcaacaatgttcaataggtttagtttttctcttgggttcaggataggagtgacagccttccagtccatgtcagagctgagagcagaaat

SEQ ID NO: 467399 - DNA, 646 bp, Homo sapiens
tcctctgggccattggcttgctgggatcccagggcatgactattatctttgtcccctctggtcttcacggacactgcactgggatgaagggtgatggtcttgctcctgtcccaggagctctcaagctggcgtggaactcaaagttgtcctctgaggagaggagacctgggcatgtggcccacacaggggaacacacaggggaacacaaggaacacaacctaaaggtgagggcagacattggatgggacgggtgcaaccacaagccaggaataccagggacagcagagtgtggaagaggcaaggaggctcatcccttggaggctttggagggagcttggctcccaaacacctcgatcttggactttgagtctccagaacacagagaaaatcaatgtctgggagtgcaagccctccaccttgcggcgcttcttgatggcagccctgggaaatgtgtgggctctcaggggcagacacgtgggcatggactatgattctgcaactttctagggatgctaatttaggcaacttagttaatctttctaaacctcattttcatcaaatgtaaagtggatatggagagactgcttaagtcacatggctattttaagagtttcatcaaacatttgaaatacttcacctagtgtct

SEQ ID NO: 467400 - DNA, 2012 bp, Homo sapiens
tgctcacatctccctctttctacgagcaataatgatgatgatgatgctgctggtggtggtgattgtgaagataaggataatgaggttgtatcatcataattatggtggtgatgatgatggtattgatgatgatggtgacatgatattgatggggatagtgatgatgagggtgatgacgatggtgttggtgatgatgatggtgatgaggatgatagtgaatgatggttatgtgatgatgagaatgatgatggtgatgatattatgtcatggtgatgatgatgttgatggtgatgaggatgatgagggtgatggtgacagtgatgatggtgatgatgatggcaatgatgttgatggtgacagtgatgatggtggtgatgatggtgatagtgatgaagatgattatgataatggtaatgatgatggtggtgatgatgataatcactatgtcacaaaggagacagggctgtgtcctcacatggaaataactgagctgctcaagcctttccttcctggtgggatccccaaccgccaccctgtttccaagctgggtttttacggagcagctgacaagaggggaatgtactgcacgctgctgatcggtgcacttaaaaacggttaagatggtataaagtgtgtcgtgcctctgctcgattttagtgatacaaagatcacaaggaatacatgctccctttttatacggcgtccatagaaagatggagtaggagataaattgaacaaagaaaagttaagtgattgcaattcagataagaactatggagatgcagagagtgttatgaaaattatcaacagggcacttgactttgtggcaagtagtctgtatacacaattactttataaaggcttaaatgtatgaattatttataaatgtccaatatagctttctactgtaattgttcaacaatatactacatcattacctgcgcagtttgtatcagattgtgctgccataagaatttggtgaggaaagacatacagaaagacaatcgcagtgcctgacatgggctagatcagtaaagagtagctgtgatgtctggtactattggtggttgcagccagatggtagcagcatatattaaaattataatttgtctggatgttgagagctgcaaaaacaactataactcttttcctaatcatgaactatttaatgaatttttccctgtgaagagcttggaacagtggctggcacatgacaactattacacttattacccatgctattaacattgttacaattattattactattgttacaggcattctttagggagagacgtgtttcttgccatttccaaacaaccaataattgcttgtggctcttttttaagcagtttatcacaggaaaattctgcatatgcttctggtttgccctggccgcgtctccatctgttactcagtttctctcatggattcgcaacccacattcaactgccttttcaacttgcaaaagggtcttgttttttgcatgactctttatttttaatcataaaaagtaaccattttgtgtgctcgtttttctttgtcctacaaggatatagcgtactaacctttattcagtgctgagtcatttgacatttgattattttatttatggaacatctctcttttcgggcacgggaccaccagctgcttaaaatctttgatattgtctttgcctctgtcaccctcactagaggttgagttctttgtgccattttcttttacacagacagcaggatgttgtttatccagtaggcgtaaatatgcatgtgacatggcctggggtggcgggggtctcaccagaatgcagaccctggatggtgagtgaggttggttaaccaccaaagaacgtatgcattcagacatcaacataattgtccctcctatacctgtggtttcttgagaatagtcaaatttggagatatgaatttttgaatcccacgtacttgtttactactaaagtacagtaatgtttattctaaatactcagcaaaatatggcttccttttaac

SEQ ID NO: 467401 - DNA, 543 bp, Homo sapiens
caggtctttcctgtgctgttctaatgatagtgaataagtctcatgagatctgatggtactgtaagggaaagtttctctgcacaagccctctgttttccttctgccatccacgtaagatgtgactcgctcctccttgccttccaccatgattgtgaggcctccccagccacgtggaactgtaagtccattaaaccactttctcttgtaaattgtccagtctcctcagtgttagagctaccgcaggaccactggattcctggtgctgctgtgatttgcaaccacacggagcctgttgacatcctccacatcctctcctttctcagcttaagagggtctctctctgggtcttctgaactcagtgtgacgaatgaggactataaaatggaaggaacgggggcaataatctcatggtataatactgccttcctttggtctacccaaaaatcactaccttgataataagatataataataatataacaataataataaatatatctgcgccttcattttcattgcagcattattcgtaataggcaagac

SEQ ID NO: 467402 - DNA, 653 bp, Homo sapiens
acgattttcagagaagttcccagatactatttttttaaatcaaccctccttttaagccagtagggactgtgaaaacaaacaaacaaacaaacaaacaaacaaaacttatcatggcaacaacaatccaatcctgtattctgaacttgggtttcctgtatcagcctctctggcaataccctgagatagatagaaactgtacctctttctgttgtataaaagtgggcaccaccagctctgggagttacattcctgcaactgagcagaatcgcccatccagctccattgagcagaatcgcccatccagctccattgagcagaatcgcccatccagctccattgagcagaattgcccatccagctccattgagcagaattgcccatccagctccattgagcagaaccgcccatccagctccatcctgccacctggacacaaatggagctttttggatgcctattcttctgtctcatttcataaattcctgaagacagtgaaaggcaatgcagatgggcttaattattatcttcttctgcctgagcatgctgtgagaaaagattaacgggagggagagaaagaagagataaaatatccatgacacaaattagtatttagcatacattttgaaatcatgctgtttctgccagcttcatgc

SEQ ID NO: 467403 - DNA, 548 bp, Homo sapiens
gttgagctgtggtgttggcatgtgagagggcgggttggtttaggtccgacgtttcccagcagcagtccatgccagaagacacgatcagcccccatattcagatctcacaatcacagctggagaaaacagtaaaggatgcactcagtaaaccttgccctcaggacagacttggtgtaaccaaccccacacctccaggagcagcaactcactattcatctgctcaagcagccaccatccggatcatgatacaggttgcttcagagccctggggcgctcctgcatggcccctcgcatcggttaataacccccagaggcagaaagttacaattactttagctaaaaaggcaatgaaagaggctgattcacagaataaaaatgatccttcccacggccctggccctggctccatacttgcaattcactttcatcctcagtcccatctgctgctccaggtccctcaaccccagcagcaggttcattggtctttattgtttgccaggggggtcagtaagatcagcatatctcaggaggagtgaggctctggttac

SEQ ID NO: 467404 - DNA, 647 bp, Homo sapiens
ccgggagctctggtcccactttctcaatttctctcagagatgactgaccaaacttggccaatcctatgtgtttcagggagaattccaggcatggaccaagtgatgtggcatcagcaggtccccatcagagctgtggaggtggcttctgtctcacgacggttcttgtcttctttgctcacaaaccccggaatgctcttgatctctgcgtcttccactcctgttcctcaggtttcatcaaagtgaaacttgagtttaagaaatacccaaaatataaaatgcaccttcatccaatgcaagctgagacagttacaaacaggggtgatgaggctggcatgagactccaccggctacctgctgggtgccacgaaggctctgggatcctcgaatgctcagaaaataaagctgctcttgcagaactaaaatgtaaaaagttctcagcattagagaagattgccccattcctccactgtacaaactgcagtaaatcaccaagaatagaaaaccgggagataattcagcatacttttcattatttacctccccaacctccatcactctgaatctctctggtgacgggaaacctgtagctcatccaagaacatggctttcctggattgcgttaatgtcactcaacgtcttttcctgtt

SEQ ID NO: 467405 - DNA, 723 bp, Homo sapiens
ctatgaaaactcccagggttggtatgaaactgttccagaatattaaaatgttaaggtattttgaaaaattaaagcaagaagtaaataaaagacagccagccccttcattttgtctgctagtctgttttattccactcagcatccctcagcccacagtaaaaagccttagggtgagatcccctcatcgaaagcagaccagcacagtctctctttcctgcagagcacttgggattcagtgggtcccatcccagaatctcttttctacagtcattgcagcagcttttgcccctggtctgccaggccctgcattttctggaacagtggaacatgaatttcatggatgtccaacagtgcattcaacatgtatggttatctatgcattcaacacgtatgataacacgattccgtgtcccaggcactattccaattggcaggaacaccatgatgaacagacacatcccttgtctacatggagaagtttagattccttgcctgcatgttgatgaggacctgaccctaaaatttatattttgttacagaactctacattataagacaaataatcagattttccctaaaagcaggaatgattttccagcctcaatatcaagcataaagagccttttgtgaccctacccacctgaaatcgaaagttcactgaatttttcaaccatagagttagggctccattgagagttgtaaccgccaacactcagttgtatt

SEQ ID NO: 467406 - DNA, 673 bp, Homo sapiens
cggaggcaagttctatggcaggaatggaagtctacttaaagagggcttataacaggaaagaacgaaaggtgccctggcacatgaaggttaaagagaggtcaagtgtccggtttaaccgtgatcttaagattttgatagactcaccccttttccatgattcttccctcagggtgcactgtccgcatgcgcagagccctccttgccctgggaaatgcgcatgcgcagtgtgcttagggacggacaacacaggtcccgctgaggtttccttcccgtgtggaccatcaggaaagggcgcctccccggcactgctggattatcaccctcagagaggcaatgcaattattgctgaaccatcacccgatgtttctcgtgggtgggggagagccgtctcctgcccctctcagccagtccaaccacctgtcacacacgtgcggagctcagtggctttccgtgctggggcacaggcaagacaacacgtagaggatgcagaggaaacggggttagaaatgtgcagagccaggacagacgagaggataggatttgaaaaggagcacgtgggtagtttagtgatataacaaatattttatttcttaatttgtatgatgagttcatgaatacatcttccatcattatgcttcgtaacttacatatagtttatattaccatacattgt

SEQ ID NO: 467407 - DNA, 633 bp, Homo sapiens
gaaaatacttaacgtcataaagccatgcccaagcacgtctactgctatgacagcaaagtgacagtgaaacccgcctctgccttcccatccttttcagaacccaaattccttgagtatgaaatttacaatgaactggcagagagggaagcctggcaaaccagccgtctggagggacctgtttgcctgggtgacatttgcaggccacactgtcctggtttctggattcagaaggtttggtgtctgtctacagggacacacagcactctggtgctggcgtggagcctgaacgcgagcggattcaagacaccaagagttagagaagcagaacatagagacctttatgtgggaatgttgcagacctgcagatacttctccctcatgaagctgatccctatgagtctgcagatatttctcgctcgtgaatctgatccctgcacttctttgacagcaacaaatcctgtcttaattcaggtgctagagaggccaacagaattgcctgactttaaaccactgttcccacgttcccagctgcctttactggtctcatcttcctattgcccactacacatggaattatcctgttctatgattgcttaattgaattcagctcattttaaaaattacaattatttc

SEQ ID NO: 467408 - DNA, 858 bp, Homo sapiens
acagacaagaacatcctgactccacacgcatgttgaattcttttctaaaaccgttattgctttgcaggcgtctgacgtgtggtcaggaagtgcgctggagcagtgccgcttccagaacagggtaggcccagagggtcttaatcaaggattctccagtgtcccaggggatgcgtgaaactctccgctgtctttctggtgtccgcttgtccctcagagcccctgatgctcgaggttcccaggacactcagctccatgggtcatttgctccccatctgccactagatctttctcttgctctccctgttagctctgtgggaacacaggtacagccaattttcaaagtactacatagcaccagtatccacacgagccctacgaaccatgagccgatgggcctttcaaatcactggaaacctggaattgcgtccaggacacacactcggccacattctgaatctatgagtcgaatcgcacctgggcctggctcgctcctgtttcttcacgtcacggagtgcagattttctctccaggatagcgcttctattattgctctgtttcccacgtgcaagttttcttctcatgctcagccaggcttgttgcttgaacaaacagcaaactgtgatgttccgacaccatctgggccaaggaggcagcagaccatgttgcaatgtgacacttggcacaggatgacgccatcgccaccaaagcccctgtgctctggtggaagcaaagagactgaggtcaaccacagccactcctgaacaccaagctcagcacacaagcaatgtccccctggagctgatcctgcaggcttcccaccccacattcccacagtgcctgatctgttgccagagagac

SEQ ID NO: 467409 - DNA, 603 bp, Homo sapiens
aatattcctttttttctactgaatactacagaaagctaaaatatgatgggtgtctcctctatggcactggtgccagggactggacaaagtacacattatagccgagaccctgggggccggggcactgatcagagggtgcagaaaacaggaaatgacccagcgttcataaatgtctgtgctttaagttgttacaaaggccgtggtatttgttttactcgatggattgatggatgcggtaaacgtggattgggattttatttctcagcaatgcaagcagctaggaaaggcagagactttgaatgctgctcaaatgaaatacaggagtgtgccttaagcgctacgctctgcacaatgccaggaattttgaggaaattcaaagccgatacttctcaagcccagatatcctcacattattcacatatgcactacatttttctagacactatgtaatcatgtaactctggatggtatttcagatagagggataacctgaccaacatatcttttgtgtagcatgcccttttatttgaatttcttgtaaagaagtaacgttatagaaattgcgacattttaaagcagcatgtgacttaagtacctatggat

SEQ ID NO: 467410 - DNA, 476 bp, Homo sapiens
tctggaaaaaaggcacggaatcaaacacagtaacatttctgccaggaaatatgcagtagtaaatgaactatttttatacactggttcctctgttctatctgtacagttatgaatctgtatcatacaagggcattttttttataagtcaactttccatgttccccttttgccaaactctttttcaagtgtctgctaaagtcaaggtctatgataaaacaacatccacatactctcagtttagtgtggggaaaaggatcatggactctgagattgatttttacttcctcagaggccaaggcaatgaaggatgtttccaaagggtatgcccagacctcaaagggcagggagacacctgccctatggatgataatcttcatcctttaattcccacagctctaggccagaagtctttcctgaattcagacaagtgtagcaactgtttcacaggcttttcaaactcatgacttttaaaacca

SEQ ID NO: 467411 - DNA, 518 bp, Homo sapiens
taccccctagtttgatcaagcatttcaggtgaccatggtcctgactgaaggcagatacctgattcacattacggggcctgcaatgagtccaggcattcgtggagatggtcaaaaacctactccatcagcaccattcatctggtcaccccttagtgttcacgtcagacttggtgagcaagcaagcaaaaagggcctctctgaacagattctcatgctgcctgctatgtcaggagtaagcaccttctttgtctctgactcaggagtctcaggtcatgctaccatcatttatgaagttgtgattgctgaacatgttagattgcaaacgagtaaacaggaaataagtgatgtggcttcctgtgttgtttgggataaacatgtgaaaaggaagcctggagctcttctgacctggcagaagctgacccaaaactgcccacctgagagtcattctaaggaactccagagagagggctagggtggcagacagacactgggacctgcgtgaactttaacaaactgcc

SEQ ID NO: 467412 - DNA, 1136 bp, Homo sapiens
ccagcgggaccttgggaggacatagagggaagacgccttctgcaaaccactgagagaggcctcgaggaaccagccctggccgacaccttgatatgggacttccagcctccaggacgattgcatgcatgcacttggcaaaacctgtaggtttcacttcagaaacattaagttccaaaaaggctacatcagcccctgctttacccctgagttccgtgcactacctgctcgtgtctccaaatacggcaacagggcccaccgccggcgctgaggatggaacagtgaacacagcaagccacgtccttcctcctagggcccatattctgatggaaggagtcagacgaaaggcagagaaatgcaatagaacgagagaaacactcagtttttccaagttgaggtcagagaggaacagtctctccataccccacaccgttcagtcacttagctcagccaccgtgggaacagtgcatgaattgcgacaaggctgctcagccaaggccctctctgaagatgaatcagtgatagacgctgtcttctggaagcattccctgcagcttgcatcgcggccctgagtgcatagtctattatctgccgcttgccggcttcatgctgtcatatgtttttttcagtagtcaataaattgctgaaggccacatttggagatatatcaatatttatttgatatgctctaggctggaacagttgggaagtgtttaacctgaataaatctttttccaggagtgcatacttaatgtggcaaaaagctgggtaaagtgattactaaaacatttattttctccatatccataatgcagtggcaaaatagtaaacatcagtatatttattaatttatttctgtttctggcttgaaaccaagtgctaaggtttggggaatgaaaataatgggatatttatcttgagaaactttacaatgcaaacaaattggaaaattacctggtatagataacatgatgtttcagatggaagctgtttgggaacagctaatggtttctcacaagcctcagtaagcaaaatatctgcgtttcgaatgtattgattgagttttatgaaattagaaacctgatcagtgacattttccgtcattcccgagcactttgatgtgagtctcaagtcttttc

SEQ ID NO: 467413 - DNA, 1014 bp, Homo sapiens
tccacattcactcgctttctgctgtgtcttctgcaggcctcagtggctgtgcttccctcccgtgggatgctctgggctagcctcccacctcttctactcacaggggaaacatcagacaagtatcagctgaaggatattttacaaaaccctgacctgcagtcctccagatggtcattctacaaacccccgaccagcagtcctccagatggtcattctacaaacccccgaccagcagtcctccagatggtcattctacaaacccctgaccagcagtcctccagatggtcattctacaaacccccgaccagcagtcctccagatggtcattctacaaaaacctcaaccagcagtcctccagatggtcattctacaaacccccgaccatcagttctccagatggtcattctacaaacccccgaccggcagtcctccagatggtcattctacaaacccccgaccaacagtcctccagatggtcattctataagccccgaccagcagtcctccagatggtcattctacaaacccctgaccagcagtcctccagatggtcattctataaaccccgaccggcagtcctccaaatggtcattctataaacccgaccagcagtcctccagagggtcattctataaactcccaaccagcagtcctccagagggtcattctataaacccccaaccagcagtcctccagatggtcaaggtcatcccacaaggtctaagaaagtgtcacagccacaaagagcccaagagacctgactcgtaaatgtcacatggcacaaagataaattaaaaattgaggaaaactaaatagagtatgaactgcagttagtaatcatgtactaatatccattcatgattgtgacaaatgtaccatactaatatgttagtcacacaggctggtgggtgtgaaatgtggcagttatctgtaatatcatctgaactttcctgcaaatttatacctaccctacaattttcaaaaaagtttatttaaaaaattaaaaagttggcc

SEQ ID NO: 467414 - DNA, 753 bp, Homo sapiens
gacccgaaaatgctcgggctgcgttctggacccaaacagaaacaaggttacttctaaaggcacaaagagggagggaagatatgagaggaatccaaacagctaaagttaagcaagtattgctcacagtgaaatcgcaagccttgcagaccccatgtggagtgtgagctctgaggctggcggccttcagaacagatcagctgcaggggaaacctgtgtgtgcagaaaagctcgagtgaagatgcaggaaagtctcacaacaaccaagtacaaatctccccggccacaacaaatcaatggcattgttaaacttggaaataatccatcccagctttcatatcacctgtctctgtgccgactggctgctggctgctctgtcttcctatacaaccatgctgcacaagcagccctgaggctccgattgactccccaggggtcagtgtcctcaaagggcagcacagccatgcaagcggactggacggagatggcaaagtctcacattttcatcaagtgccgtgcgtgctttgctattgttgctgttttaaatgtggataacatacaatttaccattgtaaccattgtaacggtacagctttttggcattaagtattaggttggtggaaaagtaattgctggttttgccattacttctaaatcagcaattgcttttgcaccaacctaatacattcatattgttataccaatctccagaactttcacctgccctaactgaggctctgtaccattagtgtgaat

SEQ ID NO: 467415 - DNA, 977 bp, Homo sapiens
ccaggccacctcgccctcactcaggtgacacagcctaaaaattcttgaaaacgggtcaaagtggagagaatgggaggatgagaaccagtgctttccccatccccaaacacaaacatcaaagtacagtgggtggtattagggtgtttatagaggagttgcttctgctgcaagatagacaagaactaaaggtggaaaggaagcaagctcctgaaagaggacaggtgcgggaacatccaagactctcagattctacgtcattccctgcagggaggcaagatggcaacgtacgtcctcatggagagaaacgtgaatggacttcaaggggatttctggattcggatgagcagaggagactggcgagagcagatggggggaggagctgcagctggattgcagactttcctttttcgtcattggatgtgtggatttggatcagcgcagacgggaacgctcagatccacaaccagaaattaaaaagttctcaagggaaagcctgtcccatctacattcataattccaaagacacctgtgcattccgctgcctgtgtaaagtacacaccatcaatctttgtggatttactcttgcatgtttagtatacacaattttattggaccagttccaatctcagaaacgggaaagtatgctaaagcagcagctgagcttcttccacatttgtgccaatttgttcaattcaacttcaatgaatgaggccatgaccaggtgtgtccaagacatggcagtaggaagcacatcacacaagctcacgaagagctacagatggtaccatggcagctgcataatgctgcaaaatagaggggctctgcttatgaaaatgaaaggctttccagccataaaaaatgaaatgcggttaaacctaacagttgagcaagttgaaattgttttaaaatattgaggtcaaataattatatttcaaacagattaaaatctctatgaaatgaggctatataagaactac

SEQ ID NO: 467416 - DNA, 709 bp, Homo sapiens
gaccaggtccctggagaagctgcgtgaagcccgccgtgtggtagtgcccacccgggctgcctgcagtgaaagtcattttgcactaagaaccgactcttttgggagtagcatctgctcctccaagccctgatggagagccctttctcctgcggacagcagcagcgtgctgagtccatgagtgatgacgatgaaggcagtccacatccctcccttcagctcccgtgtgggtagagcagcagcgcaagagagctttgttatacaccgaagtccaggtgagagtgccacagctgtcttgctaatgcacctgcaggatcagggaagatacagagacatactcacaagccatgagctgctaagcaatcgggaaccctgcagaggaagccctttcaaatgggaagtcaactgccaaatgatcaggaggtgtgaaaggaagaaccaatcacaaaagaaaaacagaaggcaaccttccacctgtaccaacagagcagataagtgcacgtgttccctggtgacaggaggcagcactaagtctcttttggaagagacatttctcctaggagtcgagctgacaatcccaagaactatgctaagtaacaatacatctgtgtgtgtggtggccaaagtgactccaaagaaggagctgtgtgtgtcactgtcacagtcgtgttgaaagcatattgagacagctgtgttcagatgagagggtttt

SEQ ID NO: 467417 - DNA, 1870 bp, Homo sapiens
ctgactgtcagcctgtggccccggctggcttttgaagcactgtttgtggcacccagccgtccataacacagctaagatctgcctgctcacatcacattgcacatgggcgtttgctgtgatgagaagtcattgcatgtttccaagcagccattctcaatttcaggtggcattcctggcttctcacaggattctcagcacaggagcagaggagtcacccacaccactgctcaaaccctgtgtggcttcccacctaactccctaaaagccaatgcccttccagtggctgaaggccctgcatgtgaggggccaaatggccattccgggctttgcgttgtctcaggtgactggaccatgccctggaatttcaagcacaaaggtgtagaaaagggggttacatctccagggaacagccttggagcacgtctgagaaaactgggaagtgagtccaggtctcccaagtcgactgttttacctaggaccgagctccctgtgccgcttccagaacacctgcttcacctgctttattctaaatggggaatttacgcaattccacacccattgacaatgtgctcgtcttctaaggaacgtttttatagctcatcactcaaatgaagccaaaaactttacggaaacagatgttgagttcagaccagttggttgctcagtgctagattcatgctggatcctaaatgtgtacattctaagctggttttgtcgatgggaggcggtaaaaacaatgaccattctatctgccctgggttttgcaatatcagaacttgtgcttaatcaccttccatccctccagagatgacatcctcagtaggaaatagagtaacagaaatcatttcctctctcctttttccttctgtaaagcatatggctaatctaccctgtgaaaactccaatttattttagcattcatgaaacttcatgactaatttcctgagccaaagtataattactttaattcgactctgctggagagaatttgaaaacaggacttctttagaagaaaattaacttacataatgagagaagagataaatcatattaactctaattaaagtatattaacattttggttgcatatgaataaaaatcagacacaatgaaagcaggtttctcataaagagtcaatttatggagatttatgaagattttagaaacttgcaaaatttcattacttaacatctctattaagatctttacaagcatgcataatgaaaagcctaataaaagatttaataaatggacttttgcttaaagtcacactgattcagtgcaagcaaaggttttaaacccctcatggagattaaaatgataattgtcaatttaaaaaatacatatgctttccacgtggtgagaagtggagagttagaacatcagaaagtcagaaaactattcttagccaatgtcagtaattccacggctttgcttcgtatcccaagactgtgatgattacctccgtcttccatattatgttatctagtacatcatagatgacatattacctacaggtaacatattaactgtaaataatagactacagatgacatattaactgtagataccacaataactacagagtcctggaaaaaaatatgaatgtttctttaccgtgaaaccatatttcaaatgctcctgtttcacctcaatacaagatatttagctctgtctctatgtgtagaacaaaagtctaacacaaatagtagacttccaggtaagcttacttaagtttaacttgagaatgaaaagaattaatttttcttccaaaatgctgtttctccaaatgtatacaatgaaactgctcaatgattgaattttcagtattgctcctgagtagctcgtaaggtagatgctctcaaactac

SEQ ID NO: 467418 - DNA, 527 bp, Homo sapiens
gacggtgcactacttaagatgcaattattcaattgaccgtacatgaatagactttaccaatggcaaagctggagatgtaaggtcacaacatctgacactgattggttaaaagcagagattgggctcagagtcctgcggccgacacctcctcaccatgttccacccttctctgcagcagttcctaagggccatgagatcagtagtgatggccccattttcatttttgacgttggtaatttaccattgataattctccctcttttctccatagtgctcacttctacagagataggcttgcactcaaacattctagcatcgaatacgggcgtttgcagggtaagccctggttctgtgcactgtcagccagttttcaggagacagcagatcacaatggataaagttacagaagaactgtacctcctcttccaaatcccagctcccggttacagaaccactgtcgtgtctcccacgtgaggggaagtggtttgaacggttgctggtggccttcacttgcgtgcttgtcagcc

SEQ ID NO: 467419 - DNA, 654 bp, Homo sapiens
gcaaggacacactgggtgtctgatgcatcgcatagctatgaagaaagagagagatgacatcttttactctgtttttactcctgatctccattgtgaaggctcaacctctgaacgggtggccctcttccacctctttgggccaacgctcaggggccctgtggactctgactttccagccacactttatgtttatccaaaatgctccatggtcatatttgaggaaactttggcttctttaacagaaaaggttccatgtgggggcagcagaagtgaaggacggatctcttggaggagaagaaagactgaacctccagcctcagcacgctctggtcttgggcctccccgttgtccgtgggttcagaccagcaccactccacagctttccatggagcagaattcgctgagagcctggggaatggtaaaggcagctacggccaggagcctctgggctggctggcagatgtggctgctctctgctcctcgtgggcacaggccatcttcatgggatcccaacaagtgcccaccatggcaccagccagcttttcctcactttcctgacaaccaccacacaaaacgaatcctctgagcccagccaaaggaacaaggctgcccacaaccagcctcagacacagtggaagtctggctgtgatggga

SEQ ID NO: 467420 - DNA, 561 bp, Homo sapiens
gactttgactttcagtcttttctcagttaaaataggattgaaaacacggaggcttcctaatgcacgcaggttctataagaagcatggaaaaccatgcacagagaaagacttggaccattttcctctcggtaagaagcacaggaatggtaaagagggtaaaaatgacaatccccttcgcaacaaagattacaataactaaaaagtgcatgctcctaggaaacgtcattgaggtcaccttcatgccaactgctacatttcctgctccttctgcaggttccgctgcgacttccacggggccaaccctcctggaagcaggttccactgagctatccatggggccaaccctgctggaagcaggttccactgtgacttccacggagccatccctgctggaaggatttgggccaggaagttttgatcttcagtgtctccactccttaccatttctattcttggaaagtttattaaaatagaccataaaattatcttggaagatgaaaaaataaggttcccaaagtgctgtgcacacctgaaatgtgaacgtttgggagggttgttgcc

SEQ ID NO: 467421 - DNA, 967 bp, Homo sapiens
gtctcctcctcgtgcctgtgtggtctgagagaactggggcgtctcctccaactggggcgtctcctcctcgtgcctgtgcgtctgagagaactgcggggtctcctcctcgtgcctgtgtggtctgagagaactgcggggtctcctcctcgtgcctgtgcggtctgagagaactgcggtggccccttgtgggcctcttggttctggggacagaggacacttttcactcagcccggggacctttggttctttctgtgaagatggcgcccatgagatgacgccttgtgactcagcccttaggtgtggggatggctgcactatcactgacacccacacccatgcccacgcctacaccatcacccctgcccacacctgtctctcccacgaggctggaaggagccgcgtaaccacccatgcccatgcctacaccgtcacccatgcccacacctacagcctcacccacacccacactatcacctacagcaacaccgtcacccatgcccacacctacagcctggcccacacccacaccatcacccacacccatgcccatgcctacactgtcgcccatgcctacactgtcacccatgcccacacctacagcctcgcccacacccatgccatcacccacacccacatcatcacccacactctcaccatcacccacacccatgaccacgcctacaccatcacccacacccacatccacactcatgcccatgcctgcaccgtcacccacactcacatccacacccacaccatcacccatgcccacacctacagcttggcccacacccacacacccacaccacactgtcatccacaccctttcccaacttgagtgctctcctgtgccctggtgcactgaatgactgtggccacaggaggccagaagcccacacagaggacggaggggacatcagatgatgtgtaaggaaatgtgacaaaaggtttctccacaatgttttac

SEQ ID NO: 467422 - DNA, 2467 bp, Homo sapiens
gtgcccccagaatgcggaggcgccttgctgtggggaggcgctgtgaggaggcgctgagtactggtgagacactgaactgtgaggaggtgctgtgctgtgaggagatgctgaactgtgaggaggcgctgagctgtgaggaggcgctgagctgtgaggaggcgctgagctgtgaggaggcactgagctgtgaggtgctgagctgtgaggagatgctgaactgtgaggaggcgctgtgctgtggggaggcgctgagctgtgaggaggcgctgtgcagtgaggcgcttgcggaggcgctgggcagtgaggaggcgctgtgccgtggggaggcgctgggcagtgaggaggcgctgtgcagtgaggaggcgctgtgcagtgaggaggcgctgggccgtgaggaggcgctgggcagtgaggaggcgctgtgccatggggaggcgctgggcagtgaggaggcgctgtgcagtgaggaggcgctgtgcagtgaggaggcgctgtgcagtgaggaggcgctgggccgtggggaggcgctgggcagtgaggaggcgctgtgcagtgaggaggcgctgtgcagtgaggaggcgctgtgcagtgaggaggcgctgggcagtgaggaggcgctgtgccatggggaggcgctgggcagtgaggaggcgctgtgcagtgaggaggcgctgtgcagtgaggaggcgctgtgcagtggggaggcgctgggccgtggggaggcgctgggccgtggggaggcgctgggcagtggggaggcgctgggcagtggggaggcgctgtgcagtggggaggcgctgtgccgtggggaggcgctgggcagtgaggaggcgctgtgcagtgaggaggcgctgggcagtgaggaggtgctgtgccgtggggaggcgctgggcagtgaggaggcgctgtgcagtgaggaggcgctgggcagtgaggaggtgctgtgccgtggggaggcgctgaactgtgaggaggcgctgtgccttggggaggcgctgaactgtgggcaggcactaaactgtgacgaggcactgtgcagtgaggaggcgctgtgcagtgaggcgctgtgccgtggggaggcgctgtgcagtggggaggcgctgggcagtggggaggcgctgggcagtggggaggcgctgtgccgtggggaggcgctgggccgtggggaggcgctgggcagtggggaggcgctgtgccgtggggaggcgctgggcagtgggggtgctgaactgtgggtaggcactaaacttgcggaggcgctgggcagtgaggaggcgctgtgccgtggggaggcgctgggcagtgaggaggcgctgtgcagtgaggaggcgctgtgcagtgaggaggcgctgggccgtgaggaggcgctgggcagtgaggaggcgctgtgccatggggaggcgctgggcagtgaggaggcgctgtgcagtgaggaggcgctgtgcagtgaggaggcgctgggccgtggggaggcgctgggcagtggggaggcgctgggcagtggggaggcgctgtgcagtggggaggcgctgtgccgtggggaggcgctgggccgtgaggaggcgctgtgcagtgaggaggcgctgtgcagtgaggaggtgctgtgccgtggggaggcgctgggcagtgaggaggcgctgtgcagtgaggaggcgctgggcagtgaggaggtgctgtgccgtggggaggcgctgaactgtgaggaggcgctgtgccttggggaggcgctgaactgtgggcaggcactaaactgtgacgaggcactgtgcagtgaggaggcgctgtgcagtgaggcgctgtgccgtggggaggcgctgtgcagtgaggaggcgctgtgcagtggggaggcgctgggcagtggggaggcgctgggcagtggggaggcgctgtgccgtggggaggcgctgggcagtggggaggcgctgggccgtggggaggcgctgggccgtggggaggcgctgtgccgtggggaggcgctgggcagtggggaggcgctgggcagtggggaggcgctgggcagtggggaggcgctgtgccgtggggaggcgctgggcagtggggaggcgctgggccgtggggaggcgctgggccgtggggaggcgctgggccgtggggaggcgctgggcagtgaggaggggctgtgctaccagaggcgccgtgccgtcgggaggcgccgtgccatggggaggcgctgtgaggagacgctgagctgtgaggaggcactgtgttgtgggaaggagccctatgggtttaacattcttgtgcttcctcagcacagtaaagctgaagatagtgacttcctgttctctgtgtgtttcactctgtggacaagacaccaaaatgggtaagttttaccaagtatggggggaatggtcaaattcacttgcattcagttttccaagataagagtatcttactgtttacatatctactgttttaactttttattgccttctctcttcgattc

SEQ ID NO: 467423 - DNA, 2548 bp, Homo sapiens
ttcttctttatggctgcatagtattccatggtgtatatgtagcatattttctgtatccagtccacaatggatgggcatttaggttgattccatgactttgcaattgtgaatagtgctgcgatggacatgcgcgtgcctgtgtgtctatggtagaacaatttatattcctttgggtatatacccagtaatggggttgctgggtcagatggtagttctgttttaagttctttgagaatttgccaaattgctttccacaatggccgagctaatctacattcccactagctcattcccactgagctaatttacattccattcttttttctcgccagcatctgttatttttggactttttagtactagccattctgacggctgtgagatgctgatgctgattatcgccgttgcagggcacgttgttctctggtggatgctggttattgccgctgtggggcgcgtggttctctggtggatgctggttattgccactgtggggcacgtggttctctggtggatgcttgttattgccgctgtggggcatgtggttctctggtggatgctggttattgccactgtggggcacgtggttctctggtggatgccggttattgccgctgtggggtgcgtcgttctctggtggatgctggttattgccgctgtggggcatgtggttctctggctgatgctgattatcgccgttgcagggcacgttgttctctggtggatgctggttattgccactgtggggcacgtggttctctggtggatgctggttattgccgctgtggggcatgtggttctctggtggatgctggttattgccactgtggggcacgtggttctctggtggatgctggttattgccgctgtggggcacatggttctctggtggatgctggttatcactgctttggggcatgtggttctctgcctgatgatgattatcaccactgtaggacactttgttctgtggtggatgccagttatcgccgctgtggggcacgtggttctctggtggatgctggttattgccgatgtggggcacagggttctctggtggatgctggttatcactgctttggggcatgtggttctctgcctgatgctgattatcaccactgcgggacactttgttctctggtggatgctggttattgccgctgtggggcgcgtggttctctggtggatgctggttattgccactgtggggtgtgtggttctctggtggatgctggttattgccgctgtggggcgcgtggttctctggtggatgctggttatcgccgctgtggggcacgtggttctctggtggatgctggttattgccgctgtggggcgcgtggttctctggtggatgccggttattgccactgtggggcacgtggttctctggtggatgccggttattgccgctgtggggtgtgtggttctctggtggatgccggttattgccgctgtggggcacgtggttctctggtggatgccggttattgccgctgtggggcgtgtggttctctggtggatgccggttattgccgctgtggggcacgtggttctctggtggatgccggttattgccgctgtggggtgtgtggttctctggtggatgccggttattgccgctgtggggcacgtggttctctggtggatgccggttattgccgctgtggggtgtgtggttctctggtggatgccggttattgccgctgtggggcacgtggttctctggtggatgccggttattgccgctgtggggtgtgtggttctctggtggatgccggttattgccgctgtggggcgcgtggttctctggtggatgccggttattgctgctgtggggcgtgtggttctctggtggatgctggttattgccgctgtggggcgcgtggttctctggtggatgctggttattgccgctgtggggcgcgtggttctctggtggatgctggttattgccgctgtggggcgcgtggttctctggtgggtgctgattcaattccggacccacgtggctctaggctgtctggggccacagcatacaggaaagttgataatcacaggtgtggcatgttccctctccactgcccacccccagctgtgagcccacccctgcccctctggagacaccaagccagaatgcaggagtgctgctgtgagagtagcttcaaaactgtcaaaacttctatcaaaagcagttattccaaaccttctgtgtcatattgttgggaatgcattcctttttgaaagtctgcacttggtcacgggtgggctggcacctgctatcgatggatgtttcttcatcctctgagctcccagtggggcttcagagcaggggccagagcagccccacacccgctccctctgcagatcgctgctgctcagcttttcatggccagaaaagctcttttctaatgggagtattgacttggagaattttcaaagtttggcaagaatccactgcagcctggatgggttgatatttatgctgtgtttggtgttgtttgattttgtttatctgtttttaatcccttctgtaatcagagcaaac

SEQ ID NO: 467424 - DNA, 965 bp, Homo sapiens
tgcctggcggcccatcactgccccctgggctgggcagtaacagcaagtatgaggctgcggtcatcagggctggaggagttagaggagggcaggaaggaccttgccattctcttatcaaggaactgtcaggacctctgtgaagctgaggccttcagcgagctcctcccaggacctgttgacacaggaatgtcccagtgccctggctttgaggaaagctacctggatatcattcagcccatgacagtgaacatgtggctgacaccgcaggccacctccgttttaactggacgctttcaggaccaaacctatgaatccatctctgaaattgccaggaaacattcaccaaaagaatcaaaccttctcgtgttttacaaaacacagtgcagacccagaatctctttaaaagttgcctgagctccctgtgttgttcataggacgggagcttggagatggcgttgtaaaacccatgttcctcctaaaaacctgtgagacgaactccttgcctttcgtctgcaatgttactcctcctcctgcctgcgtggaggttaatcatccccttgcttctcagggcattccacctgtccacactgatttgcttttgtgtttagatagaagtgcatccatttgaagacatacctgtattctgttcgaatatacagctatggagaaagtgggtcaagcctgagggaggccatctgtcagagcgtgttttggcaaaaggaaaacatgagaaggaaacttgtaacagaggctgaagtattgtagcctgagggcaccaagagagttctgtggactccaactgtcagccccaatcccggttatgtaactgttcaggagtgcagagctttgcaagatgtggaatggacatggcccacaaaagggaaaggcagaagtgcaaacctcactttcaatttttgaaataaggacagactcaaagtgctcgatttatgtatttttaatagcct

SEQ ID NO: 467425 - DNA, 2828 bp, Homo sapiens
gctaagatacacctcggtggaccctatatggtggcattaccattatgctgttgactgtaaatgtaactgaatgtgcaattatggtatcatttgacaattcatctgcatctcgttattgggcagagagaaatagcagcccaaccctcagtttggtccgggaacaagggcacttgggctcacagcttcgttgggggaagattcagatcctcaaaaaattgaagcacagcacggacctgggtcccctgggaggccgtggagcacgagggagggcacagaacccaccctggcccgaggccggctgtgcctccaatgagaggtgtccccgggctgtggatgcccaggttacggggaaggtggtgctggctggggggctgggagcagatgaacggcaggagctcagacaggtgttggtgagacaagagcggggctcaggcctgcttccaagccgatgcttttgcataaaatgaactcaagggagggtgtgaagctttcctcccctcagtgttactcctggtggagaaagcttgttaaagatgttctaatctctgctgtggtaaaagacaggaccattaactcagggggcctgtgttccttccgcttgagggcagagcctttgctgccccgggctgagcctccttctgcgcaaggaccattaacgagggggcctgtgttccttctgtctgagggcggagccttcacagccctggactgagcctgcctctgcaccatcctgcagtgtcctctcatccaaactgtggccgccctgccaggcccctctctctccttccacttcctgggcgagacttcagggttcacagcatcgttccaaaacctgcacgggagaatttaaactcaggcctgcctgcgtccagctcgggtcctgtcttgtccctggctgccacctgcctccctgctggccaccccagcaggcaacgtgaggctggaaggatgtggcctccgggaaggttttagtccacatgtcactcataatacgacattcagcaaaatgagtaaaaacgtttcgaagggaaaatgattttatagaaagggatgggtaacctttatgataaaattgctttgctagagcgtgttgcttgtgacagcaccacctttctgttcttgacaatgtttgtcttcttaactaaacaaacgttagctgagttgaatgaaattatgtacgaaccagagaagtcgggaggatgtttgaggctcgagcccccgtcatcaccttttgtaatataacttcattttgtaatggaagtggctcttgcgaggctgtgtgtgtgtgtacgtgatatgtgtttgcatgtgcgtgtgtgcatgcttgtgtgtgggtgtacaatgaacacctctattcaaatagagcagctcttcagaagccacttggattgatctgttaattttccagaattttacaatatggagaatcatcacaagggaaacctatactaccctagcagctactttttaaaaattctttttgtaattagcctaggtctctttttgttttaaagaaagtcttcactgatttttaacgatcacacttacttctcgtgagcaaaagccgataatgtctgcagtttgaaaggtaattatgcctggcttctcatccagcagctactctgatattccaaaataataatgttaccattggaactgggttattcttcatacgatactttgtagtattgtaaccatctttataataataaaaaggcatttatattatgaacacttaattttttgttttctaagatttcccacctctcaaagcttttaggaaagagaacattaaaagatgttaatgcacacagatacatctcaatttccctcggggagaagctaccttaactgccatttcaagttttacatttttgctttaaacgagtgatttcatttaaataaaaaagtcttattttctgtgatgaaaattcagctgctccttgtaaccctgaagcatcttgatttattattgactatatcctctttcaaggagaatattcttctcaaagacattatgcaggaattcttatattgcttactgtttggcattttctattaatctcaccacatctgttttcatgctatttggataaaaaaatcagaaaagtatagtagttacatgttttgataaatacaattgcaagaatcaacacattctgttcacctgaaggagcctgtctaatgtatgctgttagttgcattaaggaactcttagaaatttaaaaagcatttttaacagggcaaaggttttcttcagttcttttgtaaaaaaatgtacaaacttcactaaaataaattttagaaattactttgtaaaagacgtaaatgggaaaaaacattttatatgaatttgtcttccaaaaataatttggtatacatatatatatatacacacacacacatatatatacacacacacacacatgcacatatatatatatagctaactttccatatgtgtgtgtgtgtatatatgtggatgaacgtaaagttagttgtagcttattatgtcgtttctatgtatagttgcaattcatacatatttatagtacatatccatagagtcacaggacacacatgcttatggtacaaagactaagaagcgactccagccaggacgcttacagcagacacgcagccacgggtttattaggagcccgagtcaggtctcttatttgcacagcagttgtgtgcctggctgtgcgctgatctaaaaggcatctcctgccctaagagagttgagtgactcacctgagccgattgggaaattattaaggcaagaaatatgggaagaagggagggatccaagtgcatctgagccctga

SEQ ID NO: 467426 - DNA, 3549 bp, Homo sapiens
caggctgcctaaagctatttgacgaggatctgagtgcaggtggatttattctgaaggtcatggcagggaacatgggtgatgccatggaatactatgcagccataaaaaaggttgagttcatgtcctttgcagagacatggatgaagctggaaaccatcattttcagcaaactaacacaagaacagaaaaccaaacactgcatgttctcactctgtgtgacagtcaccaggctttgtcacaatgcatcctggtgggccgcgcagagcctgggcctcagtggggttgggccgggcctgacaatctgcatttccagcacgtcccaggtgccactgctgctgtcattggggccacactttgaggaccctgggaagtacctgcccgtgagagctaagcctaggaaccaaccaaccaagtcacttccttctcaacaccagcaacggctcctggaggctcctgcccggaagacccctaagactgagttctgtggaatctcaccctgacaatgtcaatgaccagctcgtcttcataggtagagggcaaagactggaacaaaaatcatccctccacccaacccgaggcgaatgcatcattggccttttcctgcaccccttctctttgcacgtaaaatgtagattcacatcaaagcctccaagaacgtaaccatttgcctcattgcttaccctccctcctttctctcctgctctttcccctttaaatatcgaagttccccaaacgctctttagaaaagtcgcaggtgatggacactcatgtgacttttggttcttttcccagacgcatcgtcacactcaggccaaacaaacctctctcaatggaggtgtcactgtggtgaaccctctctaggcacgtgtccatctgtctgaacctctggaggtctccgcaggaagaacagcgtgcacccacatttaaatttcttgcgaatacttcccatctgcaaaataggatcttctgaagcttgcagttgctgtcaatctcctggccctaatgagctgccaggagaagaaggaaaggtcccacttgagagtgaaaacttggggtctcacagcttctctttctctgatgaaacaattgaggcttttctatgaaattaagcttctttgcattttaatatatattataagttttattgatcactaaaaacaatgaaaaaaagaaagtcaagaagccctgctcaagaactgacaatgcccctcttagccctatcctgggagaggctcacctatgcagagggaggccccgcagaccccttcttccttctccacttgggggtccaccgctatggcttccacggtgccctctggtctggcctctttgcttttacatttttctgcctgcccctcactccaggagctaaaaatcaattagttcttaaataacgagggcggtagccacctacatgaacctcatggggaaggcttctgtaaaatgaagacccatccagcagcgaacgtagttttttcctcatgtgtacatttctaagtttaacactagatttgctacaagtgtgacggaacaaacactcgacggaacaaacactcaaagaacaaacatatttaaaaaggtacttttcaaaagaagacacttatgcaggcaacaatcatatgaaaaaaagctcaacatcactgatcattagagaaatgcaaataaaaactgtaatgaggaaaaataacgaatgtgcatgaggcttaacacctggctgacataatctgtgcagcaaacctgcctgtgacctgagtttacctgcgttacgaacctgcctgtgacctgagtttacctgtgtagcaaacctgcctgtgacctgagtttacctgcgtaacaaacctgcctgtgacctgagtttacctgtgtagcaaacctgcctgtgacctgagtttacctgcgtaacgaacctgcctgtgacctgagtttacctgcgttacgaacctgcctgtgacctgagtttacctgtgtaacgaacctgcctgtgacctgagtttacctgcgtaacaaacctgcctgtgacctgagtttacctgtgtaacgaacctgcctgtgacctgagtttacctgtgtaacaaacctgcctgtgacctgaatttacctgcgtaacgaacctgcctgtgacctgagtttacctgcgtaacaaacctgcctgtgacctgagtttacctgtgtaacgaacctgcctgtgacctgagtttacctgcataacaaacctgcctgtgacctgagtttacctgtgtaacgaacctgcctgtgacctgagtttacctgtgtaacaaacctgcctgtgacctgaatttacctgcgtaacaaacctgcctgtgacctgagtttacctgcgtaacgaacctgcctgtgacctgagtttacctgcgttacgaacctgcctgtgacctgagtttacctgcgtaacgaacctgcctgtgacctgagtttacctgcgtaacgaacctgcctgtgacctgagtttacctgcgttacgaacctgcctgtgacctgagtttacctgcgtagcaaacctgcctgtgacctgagtttacctgtgtaacgaacctgcctgtgacctgagtttacctgtgtaacaaacctgcctgtgacctgaatttacctgtgtagcaaacctgcctgtgacctgagtttacctgcgtaacaaacctgcctgtgacctgagtttacctgtgtagcaaacctgtctgtgacctgagtttacctgtgtagcaaacctgcctgtgacctgagtttacctgtgtaacgaacctgcctgtgacctgagtttacctgcgttacgaacctgcctgtgacctgagtttacctgcgtaacaaacctgcacatggacccctgaacttaaaagttaaaaaaaacaattttatgtgcaataccgtgacaggttttgtggctaaatttaaatgttaatttggacattatatattctgttgtttttgattgtctactcagatgagaaaagtagtcaacgcaatcaacttccttaaaatcagtatctgctgcacgccagggacagcaacagaagaaatcatttcagcaacaacgtgacacttcgaacctccagaagaagtgccatatcaatgacatcatgacaaacgccccagaccgaattatttctgtgtcagagtcactcattatggctctggctcttgcaggtcatctcccatttaggagaacttgtcctattgtcttcatcagaacacgtgtacttgtcaggcctgcagtcctgatgtttggttcagaaaatatggtcactgtaattatagcccttcccgggtgaggaaatgagaatctgactcgtaatccttttatcattgacttggatgacttatttctcaccaaatgagaatggagaaatttcaagggcaatttatctaattctttccctgtgcatatatatttttttttttaaagaaatttgccctggtcagaaaaagcacattttccagagggattctttaatgatattgatctcttgtgcattacctggcctctggtagaccttacatgattgtcccaattaagctgccaggtgagtttcttaa

SEQ ID NO: 467427 - DNA, 774 bp, Homo sapiens
ggcgtcttatgggggtttgcgtttgcgctttcctaatgactgatggtgctggctgtcctttgtgttcttctgtctctcatatgtcttcttcggcaaacccgggttaaccactttagcggaaaagctgacggcatcaaacctgctgcctcttctacccgtgtctgcatctgcatcatggaccaggacacgctcctctttgccaacgacacacggaggtttctgagcagggaccagggacacaggagggcgggaggcagcttcatcagcgagggccacacgcagggattctgtgtgacaagtgctggaatagcggcctccaccaaatgctgtgaacgccccagagaggaaacactgctgaacaccacaggcatctgcccccacacaccacccaggcaccgtgggctgacttcctgtgcccccgctgcagcccccaatcccactcatcacgtggagagcacgtccttctcaatggcccacaaacccaccatgaccctggttactatgctccgctcacttaggcatccctaaatggacacacatcccacctgccccaccagctgcgtcccaccccacccaaccccagaaacgtactttccctactgcatccggagtggaggacgtgttttgaggctgtttcttgttttaaataacatttctatttatcagttatctccttcacaatggtatataaatgcctatgcctacactcatgcacatacattcacatacacatgcatacacacatgtacatacacacatgcacactacacacag

SEQ ID NO: 467428 - DNA, 791 bp, Homo sapiens
gcttctcacaggtgcactgggaggttccctcctgccctgacatgcatcccagggaagagcccctctgctggaggactaagagggtccatgtgggatcctgtgatgcccaggtaaactgtcccactgtgtgcctgtgcttgggttctctccctgtgaaaaacccgactgcagcaaacctccccgagcctttactgagcttaaaactctgagctgcacagatgtgatggaagccctgggaacagcatgggagtgcgccaaaacaaggaccctcggacgggagagcaccaaaacaaggaccctcggacgggagagcaccaaaacaaggaccctcggacgggagagcgccaaaacaaggaccctcggacgggagagcgccaaaacaaggaccctcggatgggagagcgccaaaataaggacccttggacgggagagcaccaaaataaggaccttcggacgggagagcaccaaaataaggaccctccgacaggagtgccaaaataaggaccctcagatgggagagtgccaaaatgggaaccctcaggtgggagagaaccaagatggggacccttggaggaggaggggcctgcaaacagatgggtcttcaccaacgaatccaatagctggtagcaccctcccaaaaggtgacctgatatcatatgtagaaaaactaaaagcattgttagaactaataaatgaattcaacaaagttgcagaatataaaatcaacacttaaaattagttgcatttctatgtacaaacaatgatcaatctgaaaaggaaattaagaaaaa

SEQ ID NO: 467429 - DNA, 713 bp, Homo sapiens
aggcagaagacaccacggttatttcaacctgcctggtctttagtcatcatggttgtcattattaacatgattgtcaccatacttattaatataatcatcaccatcatcatagtcatcatcaccatcatcatcatcattatcattgttatcatcatcatcattggtataaacatcatcaccatcatcatcactgtcatcatcaccaccattatcattgtcatcaacattaccatcatcttcatcaccatcattattatcataatcaccttcattagtatcaacattatcaccaccatcatcatcattgtcatcaccatcaccatcattattgtgatcatcaccatcattgccatgattatcatttctattgtcatcatcatagtcatcatcatcaccatcattagtatcaacctcatcactgacatcattatcttcatcatcaccatcactattatcatcgtcatcaccatcatcatcgtcatcaccatcatcatcattatcgttatcttagtgatcattattaccaacattatcatcctatcttcatcatcatttagtatcaacattatcattagtatcaacattatcaccaccatcatcatcattgtcatcaccatcaccatatcattgtcatgatcaccaacatcaccatgatcttcattgctatcatcatcatcatagtcatcatcataaccatcattagtgtcaacatt

SEQ ID NO: 467430 - DNA, 600 bp, Homo sapiens
gtgaattatccagcagcacacggccagcgagaccttgacactggtgttggcgttggatgaataggatgcgtttgagggccccttggtggttgagagccctcactgtcaccgacctccatccatccccaggacaggcatcttgcagaacctcaatggacgtcagtgctgtccccgcagctggtgaagacacacgctatggtcagaggctgcgtctggacctcggcttggccaagctatgtgtgagcatgaagcttgtttccttctctcaaacatggggagaacccagtaaacctgcctggcagagtcgttgggagactcccaggaggcccttggagtcacttgcctacattattgttttcacgctggcttctaaagaagtgagaagtcgtctggcccagcggtccctgggcctcagcatgaaggctggggagctaagcgaggagtttggtgcctttcttgaagaggagtctatgaatagatcctattttgtagcatccgggaggagccggtccatctataaaaacctcgataatcgtgcctcgtttcctgctttcactgcgtgccatgccctcggtgattagcgtgtttttcagactaaca

SEQ ID NO: 467431 - DNA, 1144 bp, Homo sapiens
agcactgcacactccatgttgacatgaggagacagcaagaatttggagaggtgatagtggcactgcaagaagaggatcctgagccacggaggacggccgtcatcgctagccacacactccagagtgccctcctgccagagtcggctgcagggcgctgccggcttcaggaaacaggcctgatggtggcggtcatccctgtggatgtggtaggagcactagaatctactctcttggcagattttcagtatgcaatgtcatcagctgtagtcttcattcttcacgttcgctctccagacatcgtcactctccctgagtgtaaatgtgtcagtatccagtgtagaagcatcaacgtcttggtgtccagtgtagacagcatcaacaccttggtatgcagtgtagacaccatccatatgttggtatccagtgtagacagtatcaaagtcttggtatctagtgtggacagcatcgatgtcttgttgtccagtgtagacagcattgacatcttggtgtccagtgtagacagcatcaacatcttggtatacagtgtagacagcatccatgtcttgacatccagtgtagacagcattgacctcttggtatccaatgtagacagcatccatgtcttagtatccaatgtagacagcatcaaagtcttggtatctagtatagacagcataaacttcttggtatccagtgtagacagcatccatgtcttggtatccagtgtagacagtatcaaagtcttggtatctaatgtagacagcatcgatgtcttagtatccagtgtagacagcattgacgtcttggtgtccagtgtagacagcattaacatcttggtatgcaatgtagacagcatccatgtcttggtatccagtgtagacagtatcaaagtcttggtatctagtgtggacagtatcgacgtcttggtgtccatgcactccagcctgggtgacagcgtcaagaaagaaagagagagagacagagagagctttggaattgagagttccatctataatggtatttgatgattactggttttgtggcaaaagctttcagtgttctagcctggctttgggctagattccagtgaagaagggactgtagggggtgggggagtcattagtctgagattcacagtaattac

SEQ ID NO: 467432 - DNA, 721 bp, Homo sapiens
gtaagagaagtgggggctaatgaagtttcagggaactcatgtcctgtggtttcttgaagtgtgagaagtttgactgcagggaccgtgagtgagtgtgctcttgataaaaatgaaggatggaccggggcttcattaagaaactgtgtccctgtgtcagagtcctgccagcaaaaatgctctacgtcttcctccttgtctctaaatattcccttccctcttactccctgctggtgcttcgcaaactttgctctgtcgaggatgccctgatgtctgttctcacatcacattgcgctccaagtaccccggctgcaaccagagctcagcaaaccgggaccagagggcacatccaccctgcctgcccatgtcaacagagttgtgtgggagccagccggcccccaggaagaccccagatcttcctgcccctgaccacagctctgtccctggaagcatatgctgcagacacttgctctgctgcagattttctgcacaacccctcctcatgggggaaggtttggtacctgaatgaggcctcttttgacctctattcctatcactatttttggtgacctcaatatttatgaaggtaataacttggtctttaatccagacaattttcacctccaggaatcttgtcctgcatctcacttttcttcttgagtcctgtggtcatcaccaaaacctgtccctccttggaaacctcagtttaagcatcccactgtcc

SEQ ID NO: 467433 - DNA, 581 bp, Homo sapiens
atgccttgcgatgataccacatgggcacccaagacatggaggtgctgggagcaaccatggaggcgatgctgccagcaagccaggccaacctcacacagcccacaggggcctggacactctctcaggcccattccccaaatccagcaaggccagcccacagctcacagcctggctcccagaggagcacctgctgaagccagaaggaccatttaaaaaccacttgacactttgggaggccaaggcgggtgcatcacctgaggccaaagaggcggggcccatggttctgatggagctggatgcccagactgtggacgcctggaccatggacgccccgaccgtggatgtcctgaccatggatgccccacttggacaccctaccatggatgccctgatcgtggatgccccgaccatggatgccctgaccgtggcagggagctctgtcttgatctgtatcgatcttgtcatctgcgaagctctccacatctttttctcatgaatttgtgtcaaagcagatcccacaccccattgcctccagaattgagtgtgaaccccaaggcaggggctggcgtccatccagggtc

SEQ ID NO: 467434 - DNA, 1104 bp, Homo sapiens
gaatctgccctgcaggagggaatgggcgtgttcctcaaatagaacacgggaagccaggaggaaagagcagagcggccatggccgccctccccagccaggacccgaggcctgagctccagagggaggggctggacataaggaggcggtcacaacgccggttcactctccactgcctgccccaccttggagccaatgccatggccttgccttcccgccctgccatgctgtgctcacagcagccttccagattgaagtgtgcctgcccctccccagagaagctgggcatcccctccagcccatgctggggaggcagcacagccctggatgtggcccaggactcactgccatcgccagttacccaccacccagaggcccaggatgcgcggtatggtggatgtgtcagggtgcacagctgtccgggtggggcattgtccacccgggagagtgtgtcttacaccaatgttgacaccacttggcagggcagggactgttgtcctgaataccacagtccctcccttcggaaagtgggtgctcctacccagtggggcagcaacactgtgttgtaaacacgccgaattcaccagcctatgatgttcattgcatttgtcaatgggaaacttctgtttgacagttgctgtgtttctcttaagctcaaaacttttgttggacggctcttcccctccaactacagatttccctgagttcagtgaattgctgtccacttttttcccctaaggctgcatctccccgggagcttcatcatgccctttagtttctgtgacattctctgcacctttaagacgacttcctttattaaatttcttacttaaccctctgagtgtgccatctgctgcctgcccaaacaggtgtacctaagttccagcctttactctaacagaatgcctttaggtgagtcacagaattgctctgtaaattagaagagcaggcttgtttatgaacttttcttatttaagatcctataagtccagctttactttaaaaaatccaccaccatgactataacctctttactgccattcaacaaccccaaattataactgtttagtggatattgtaaaagtatgtatagcttatcaccttttt

SEQ ID NO: 467435 - DNA, 596 bp, Homo sapiens
gtgacgaagtccacatgggacatcagtgttgggctcccaggagaatgggagggccatggtcccatgggcatgagtgctctcctgctgcctgccaagcctgtcctggaactgagccaggaggctgactgcatccaggaagctgaccgcatccaggaggctgaccgcatccaggaggttgaccgcatccaggaggctgactgcatggttcttcctagagcagggcttagagcctgctctgtggtcagtcatgtggccctggaagagaagtccccagagccttcaggaatgtcccagggtcttggaatcagagaagaccaagaaacgccaccagctttggaactgggtgagctttatctgggtgtttctccctggctggcccacagtaccagaccattcacgagcagcctgatgatcacagctgatccttaccctaagaaagctttgggctccaacatgacttccctatgagaatcactagtgttgttgaaagaaagtgacaaataaacagaactaattctaccttttttaaagcaggttaaaagcaagtgtcagagcttgcagtttgctgccattagaggggctccaggggcccattt

SEQ ID NO: 467436 - DNA, 509 bp, Homo sapiens
ctgacttaagattggatagacctttgtccatccatgatgcaggtcttcagaaatcaaaaacatgtttccacaccctctcatatgtactttctactgaactgtattttcctggttaattatgaattcttttataaatttaaaaacctattaaacaaatattgtgtgcttgaccctgtgctaggcaccttgggtaaagaaataataaaggcaggcatggtccctggtttttatagaacccgtggtctagtgcagaagtcaaatattgaatggaaagtacacaatagcagtgaagaaatgagctttggtgacttgcgacagcaggacttaaggtgtcccaaaacctcaaaagtaggaaagctgacagtgcatccttcactctgtggccgaaggcctgagagcccttggcaaaccattggtgtaaggccaagagcccaaaagctgaagaacttggagtctgatgttcgagggcaggaagcatccagcatgggagaaagatgaagaccaaaata

SEQ ID NO: 467437 - DNA, 638 bp, Homo sapiens
agcacaattgtaagggaacacctttcagagaagtactcatgtgtcccaagcaatgggtttgagtcatggactgctcagtgttctaggtcccacatgctgtcttgaaggcaggagagaagctggctgggtggagctgtactggacaagcctgcactcaggccccctaatgttgggcgcaagaatcaaccttgatgggggtctgaagaaagtttctgggccctggagaaatgtccatctgaggagtggagcaaccgctggtgtgctgaggtttcagcatgagaagggagagttggtcttgacaccacagccagaagacaggaagatgtgggaaagttcggaacttcctaaagacttgttgaatggctttgatcaaaattctgatggtgatatgaacactgaagtcaaggctgaggtggtctcagatggagttgtggaacttcttgggaactggagcaatggtgactctagctatgctttagcaaagagatggcagcacttttcccctgtgctagagatctctggaactttgaacttgagagaaaccatttagggtaactggcagaagaaatttctaagtggcaaagtgttcaagagaaagcagagagtaaaagtttggaaaatttgtaacctgtgagtgc

SEQ ID NO: 467438 - DNA, 910 bp, Homo sapiens
tgagatctgagcgaatactctaaggaagagagagaaaactatttggatttggaggagacttccaggaagagtgaacagtcagtgcaaagaacgtaagcaatgatgaacgtcctgactctccaacaggactcttctgaaagctcaataacagaaataggaaggagtatatttctggttggggtgaaaggacggattcctcatgtagtttctgctacaccattaagggaacagggtgtatgcttgttactggctagtgaagaagaagtaggcatctcttctagcctttatagattggatttggcaaggaaagcacttcattggtcaactaatccagagattctgggtgggctggctggtggttgctgctggagtctttgggcaggctggcctggttcctgggtgagcaggtgggtgggcctggtgcctgggtccaccaagataggactggagcctgagtgcaaagtggtgggcctggatcttgggttgttaagccacagcatctggcctgatgctaaggtgggcatggagactgggttcacagagctgagcctggagcttgggtctgcacaggcaagcctaggtcctggggccagaggggctattctggctttggtgtgcctggagcctggggatttgagggtcaacctgctactggggcagcctggcactggtacaggcctggggcctaagtctgcaggggctggcctggtgctagtgtgggcctggaggctgagtccacagatgcctgcctggagcttgggaccactggggctggcctagtaccagggttgactggggtggtcctggagctgggatccctggagaagtataatcaatagtctctgtccccctcacctgataattctactagctttcattttcaagtctcttaaagccttaggggagaaat

SEQ ID NO: 467439 - DNA, 815 bp, Homo sapiens
agcagggtcagggatccacgtggaaaacagtcttgctacttttccatatggcagcggcagcatgctagaggcccctgacagttctcaggctcttcactcccttcccatcctgaaggcagcaggggcaaggataatagcagaggcaattgttgtgggcctggggattacctctgggagttctgtgacctgccagagtgctcaggcagaagtggggtggctgcactggggtcccaggccagtgggctttgcttgcttggcttccctcactggtggggctacagcagctgacaatggggtgttcaaggatctaagacccatagggctccccatgggcctgagtgtggctcttcccagattccaggcaactcgctgtgtcagtctgcaggccccggggatgcctcaggctggacagaagggattcctggcctgctgggtacctgtccttttagaatcttaccatcatcctgaggattccatttgcttctgttgcattggatcctctatttcttggattccttattgttctccttgatttactccatcgatttggcaggacatatcctgtagtggtttcccgagaaagagcgtgttataggacttccaccccagctacctcccaggtcctgaggatttggtgtgcaaacttagagctacatcatcagctttcctggttctgaggccttcagacttggactgagccactcaactggcatctcaaggtctccagcttgctgacagcctgctgtgggacatctcagcctccataactgtgtaagccaattcccctaataaacctcctctgatatatctatcta

SEQ ID NO: 467440 - DNA, 506 bp, Homo sapiens
cccagaagacggcgttggtgcagcagggctctctgcctatggcatcgtgctgcctgctgctcaagagatgggcacaggaagtgctagaagcggccatgggtccagctccccagccttgctgagccagggaagaagatgcagagaaaaagcttccaaagacacggtcaaggaacaagcatcgaagccctttgcattcatatctttccagttatacatgctgggtcttctgattttgacttccctgtaccttctagcacctcaacccttccttcaagtctttgacagcaaagagtcacctacacctatgtgtgtggattctccaccttactcatgcagacccctccaccagacttctgccagtatcccctactttaccagccattccatctctgctttcccagtcacttctacccctgcagccagcgcatctgcaaatttgacccaccagtcagctttggacattgctgcttcttcgggtctccttcaggctctgggatgaacttggg

SEQ ID NO: 467441 - DNA, 679 bp, Homo sapiens
gagcccaggcggcagagtaacatgaatatcacggatattaattatattaagtatgattacttttacattaaaaagaaacttgagagaggtgaggaagctgcagaagaaaagctagaagctaacagaagatggtttatgatgtttgaggagagaagccatttccataacataaaagttcaaggtgaatcagtaagtgcttctgtggaagctgcagtaaattatccagaagatctggctaaggtaatggatgaaggtggctacacaaaacagcagattttcaatgtacacaaaacagccttctactggaagaagatgccatgtaggactttcatagctagagaagagaaatcactgactagtttcaaagcttcaaaggactttctgactttcttgttaggggctaatgcagccggtgactttaagttgaatcaatgctcatctaccattctgatgatctaagggcctttaagaaatatgctaaatgtactctgcatgagatctatacatgaaacaacatagcctgggggatggcacatctgtttatagcctggtttactgaatattttatgcctgctattaagacctactgctcagaaaaaaaaacttttaaaaaatattactgctctttgacaacacatctggttaccctcaagttctgatggagatgtacagagagact

SEQ ID NO: 467442 - DNA, 3512 bp, Homo sapiens
tctgctttatcaactaagtctatataattttctaaatcctttgttggcttgtgggtcaaatttgtcccaatggcttaggatgcatttcaaggatgagcctgtcgaggcctgagtgtttcccatctgaaagacaaaaccacccacagttttggtttgtttgtttctccccctgcccaagaacccaaaacagtccctggaccctgctgatcagaatagttgcactcaccaatgcagcagcaggagtgttacagctcttaaaggtggtgcatccagagttgtttgtttctcctggtgggttcgtggtctcactaacttcaggagtgaagccgcagaccctcacggtgagtgttacagctcataaaggtagtgtggacccaaagagtgagcagcagcaagatttattgcaaagagcaaaagaacaaaacttccacagcatggaaggggacccgagtggggcgggcgatgggggtgtggctcgcttcttcggtgccctgctgctcaaaactcctagcgggagtatgcagacaaacaggcaggtcttggggagcctgggttccgaccccacagcagcatctaggggtgtatgtttacagctccccagtgggcatgtgagtcgggctgctcagcatgcaggctctccttcaactgcccctgtcaaactccatgtcattccactggttgatggcccaccggtttgccagtgtctgtcggtgtgctcttacgctggtgtgttcctctcgacgacgactgagttcagccgtaatctaggtacacagatgagaggtgttgcgggctttccatctacgtgcatttgttattccagaggagcagctcgagtcctggaccttgttagagaaagaggcaagctgaaaaaagaccttggatgtgaatcatggcattccccctcagcttattaaagccatgtctattcctgtttggcctccaatgatgttttgtcactatcagtcagggagacttttgagaggaaaatgaacaggcagatattttgccatttattgctccgtatggacacgggccatttgtcagagagccaacgaacagccacctcaaacaatgctctcttttaaaagatcaaacggaattattgaaatggacaattctagcagtggaagaaaaatatattttggtttcgggtagacttcacctgaaacaccataatagaacttggaaacaaataagttttaaacagaattcagaattactgacacttattattttttaataaagttaattcatacttctttaacgttagtgtgccatccattacaatcaataatttatcgcttagatgcttttcatgtaatcattttgctttaatttatataatagttggaaatatactatacatactgtattcttatattcatagttaacccactagattgtgaggcttaactatggtccttaaaaaaattttagaaaagaagtctgctgacaaataaaaaatttaccaatataaaaataaaattaagccaggcatggtggctcatgactgtaatctcagcactttgggaagccaaggcaggaggattgcttgaaatcaagagtttgagaccagcctgagcaaaagaacaagaccttgttactacaaaaaataaaagttaaaataaaaagatattcaatttgaatactcagaaaaccttttctcaaatttcttgtccttgactatatcaattatgttgctctccacagttacttctgctcaggaaaacacttccttaggattagtaattctataggcccaatctactgagtatgtaaaaagtttaaattttctgttaagtgttaaagagaggagcatgaattgtcttaagtgatcatgaagctaagcagcaaacacatttaactggatagtgaaagccaagttacaaacaacactttttccagtttcttgggattagcaaagaaaggaagtatataccatggcttccataccttgaattcttaattttaattaatttctcagacaattggaataaatcaaattataggaaaattatctttattttatgtatctatttctgtaattttagatttttttcagcaagtattcattgcttttaaatatactttaaaacgtgtagtttataacatttttgaaaagaactagaacattttcgtgctgcaccaagtggttgtctaacatactgaaacagattcgttgcatgaaaactataacccccacaactaaattattttatgtatatattttttcattctaaaacaaactttaacctctaaactattaaaagttactttttctttaacaaaagcaatactcttatttttttcttacaaccttcttcaccaaaaacatatcttgcttttctgtacactttacatacaaaattatttctctgagttttagtagttttaattatgtatattaattagacttttaactcttagtatcattaatatccagggaaaacctagaaagtaagcaatttcatttgtcttttacatatcagtattttatgaatccatactttgtaatttctaaaaatacttttcccacaaattttaaaaaatgtgaaacagaacatactaattaacagaccaaaatatattttgtttctttataataagaagccaaaatagataaaccttttgttataaatttagtattttatcttatttgaaaatgatctaaaatttggttgaatacctatcacttaatttaacttagtaaaacctgaagggtgtacttgtcaaagagatttgagaaagctttaagtaaacatattatgcaacataattgttgttaaaatggagtacctttgtagtctttgattctacttatatttatttgatttattcatccttagcaattatgcttggaaaaaatacagtagaaattagataaagcttagtctaatgactacgttatttttctattaatcaatgatatagcacatgatatagtcaattaccatcaaagcaagtaccctaaagttaaatacatgggtattttgtttataacttagaaaagaaaccctttctattcaaccagcaatatttaactagtcatatttactaaagatttatccaggtcatttgaacttgaaaaacattttggttagttatttaatttgtgagtattaatttatttttaagtcaatttggtaccatgaggacaatatgcaaacacatgtacagacatatacatacatttagacacaacacaaaacatacacatgtgcacatgtatatattcaaaagccaaagatttcagagagattaatttaaaagagagcagagctttagtttagacatgagaagaacctgccaatgaacctgaggatttcgtgagaaacatagaattctccgaaaattagtcaatggtgcctttcctgtgttcctctgggggtctcagggacattagcaacctccccccaggccttttcatgaggttgccaaactctaatgtttccttttaattatttttagctattggccaccaaatggaaaagatagagtatcaaagggaa

SEQ ID NO: 467443 - DNA, 644 bp, Homo sapiens
ttttgtttgattatagtgatcctacgttctgacaaaattcattctgagtttctggttgtttatcaatgttcttgtggaaggatgagagcttggggccgcctaatctaccactttgctgacattactcccagtgatgatgaatgctgccagcactgggtcctttccttcaaagcagtgggttcccttctggcccagggtgtgtctagaaatgtctgggaggtagggtctgaaacaggggcttcacaactctggccagtgccctatcttgctgtggctgagctggtatccaagatgcaagacaaaatcctctcctctcttccatctcctctcctcaagcagaaagatgaggtctgttttggagccatcagctttgcagcgtggggtagaggagggacaatgccagcactcccttggctgccccagctggtgtctcaatccaaggcaaattctgtggccccagatatcagtttatcagagaacatagctagctgaatgcatcatactaggcaatcaaaatggaaggctttgctgtgcatgcatttgggggtgtgtgtaagccgatcctttgaaataggccttgagggatactctcatagattctaaagaacacactgatggatacaatgtgggtggagaaggaaaat

SEQ ID NO: 467444 - DNA, 699 bp, Homo sapiens
cctgatatggcataagcaccaatacttaagtgttgatgaaaatggtctatgaacagatgcacacctacaaccatctgatctttgaaaaagctgacgaaagcaagcaatggggaaaggatgccatatttaataaatggtgctgggataattggctagacatatgcagaagattgaaacaagaccctttccttataccatttacaaaaatcaactcaagatgcattaaagacttaaatgtaagaccccaaactataaaaatcctggaagacaaactaggcaataccattctggacacaggaacgggagaagatttcatgatgaagatgccaaaagcaatcacaacaaaagcaaaaactgacaaatggcatgtaagtaaacaaaagaggttctgcacagcaaaagaaactatcaacagagtaaacagacaaccttttaactatcaacagagtaaacagacaacctacagaattgaaactatcaacagggtaaacagacaacttacagaattgaagaaaatatttgcaaataatgcatctgacagaggtctaatatccagtgtctataggaacttaaataaacttacaattaaaaaaaattttttttaaaagtcagcaaagaacatgagcagacattttcaaaaggacacctttacttatgtaacaaacaagcatatatacccctgaacttgaaataaaagtt

SEQ ID NO: 467445 - DNA, 662 bp, Homo sapiens
attccatctccccaggaagcaatgagccatcctggacttgctctgtgtggagccatcctctgcccctgcccattagctcccacttacaagcggactgtgaggactttcacctgtctggaagcattcacccatggcctgaataaaactaaacaatgtactaaagccagctgtaacggcaatgctgtcttgtatctctacaagaataattctaaatgcaagagaccgtactgtgaaaccatttcttgccctaaaaaaattctgaactacaagagggaacaattcaagaagaaaacagtgttaaggatgacggcgtcccttctggtcgactgctgccacaacatgagagaaatgcccagcttaggactgcttccagtgactgaggttgcagttccaaccacgcacatgagctgccccaaaggagctactcacctgagtgacagcacagcagtgctgacttttgtcactgagattcagaaatatgatttttctcagtgttctcagtggagatcaaaagctgaacagaaggtgttcttgaccttaataaaccttgcctacaacccttgaagctgtgcaaaatttgactaatgagacagctaaatgggcaccaggaccttgaattgtttgtggtgccttatttagttcatttggtgaggctgtgtttt

SEQ ID NO: 467446 - DNA, 740 bp, Homo sapiens
gctgatactaccgctatcatctccgcagcagcagcagcagcagtggtagcacagtagggtgcatgatcatggactgtgccagggtgtctgcctctgtgcagacattcacagcagcagtggagtcagcatggctacaggggtcagcattggcaactgtgcatacagtcatgctggtggtgttgttaacacggggcaaggtgctgatgggcacaggaggtttaatctgctcacagttctttatggccgaggaagtcttggcaaacttacaatcatggcagaaagtgaaggggaagcaagacacgtcttacacggcggcagggacatggatgaagctggaaacgatcatcctcagcaaactaacacaggaacagaaagtcaggcccctctgctgcaggtctgctggagtttgctggatgtccactccagaccctgtttgcctgggtctcactggcagaggctgcagaccagcaaagattgctgcctgttccttcttctggaagcttcgtcccagaggggcacccaccagatgccagccagagctctcctatatgaggtgtctgtcagcccctactgggaggtgtctcctagttaggatacaggggaattatagatatatactgctgcttctcaatgcatgaaaatagttgtttcatgttttctcccattttatagtgttcgtgacagaactgcaggtttggtaccagttactttgcagctagaggttaaagtctttgccaagc

SEQ ID NO: 467447 - DNA, 975 bp, Homo sapiens
tctggtcagcagggacctggtcaatgtgggctgctgagcactgcttggataagccaggtgcaatgtgcattattgaaggccctgtggacagctgggatagcccagtgatgcccaagggcctagtcagaagtggacaaagcacttatttggatggacctgggagatcctgctcagagattctgacaggacaaaggattccagaacactgctacaaggctctgagtgtttgtccctcacataggattccagaacactgctgccattgtctgaatgtttgtccccgacataggattccagaagcctgctgctggggtctgaatgtttgtcccccatctaggattccagaacactgctgcgagggtctgaattcacatagaattccagaacactgctacaagggtgtgaatatttttccctcacctagtattccagaacactgttgcaagggtctgcatgttggtccatcatataggattccagaacactgctgctgtggtctgaatgtttgtccctcacatagaattccggaacactgctacaagggtctgaatgtttgtccttcacataccattccagaacactgctaccgtggtctgaatgtatgtccctcacataggattccagaacactgctactaggttctgaatgtttttcccacacctaggattccagaacacttctgctggtgtctgaatggttgtccctcacatatgattccaggacactgctatgagagtcttaatgtttgtccttcacatagaattccagaacactgctcccgtggtctgaatgtttgtccctcacatagcattccagaacactgctacaagggtttgaaagtttgtccctcacataggattccacaacactactgctggggtctgaatgtttggccctcacataggattctagaacactccagctggcttctgagtgtttgtccctcacataggattcctgaacactgctgctgtc

SEQ ID NO: 467448 - DNA, 3878 bp, Homo sapiens
tgcaacctctttcctcaccccgtgaagtggaatggaatggaagggaatgcaatggaatggaatggaatagaattaacacgagtggcatggaatggaaaggaatggaatagaattgaatggaatggaatcaacccgattggaatggaatggaatggtacggaatggaatggaatggaacggaatcaactcgagtggaaaggaatggaatggaaaagaatggaatgtaatagaaaggaatggaatgcaatggaatgcaatggcatggaatggagtcaacccgagtggaatggaatggaatgcaatggaagggaaaacaggaatggaatggaatggaatgaaaccaacactatggaatggaatgggatggaatggaatggaaaggaatcaactcgaatggaatggaatggaatggaatgcaatggaatggaatggaatggaattaacccgtgtggaatggaaagtgaaatggaatggaaaggaatggaatggaatcaaaccgagaggaatggaatggaatggaatggaatggaatggaacagaatggaacggaacgcaattgaatggaatggaatcaacccaagtggaaaggaatggaatggaatggaatggaatggaataacatgcaatcaactttggtggaatggattggaatggaaaggaatggaatggaatggaataaaagggcatggaatggaacggaatcaacccgaatggaacggaacggaatggagtggaatggtatggaatggaatggaatggaaaggaatcaacctgaaggtggaatggaatggaatggaatttaatggaatggaatggaatagaatagtatggaatcaacccgagtggaatggtatagaatggaacggaatggaacggaatggaagggaatggaatggaatggatacaacccgagaggaatggaatggaaaggaatggagtaaccggagcggaatggaatggaaaggatggaatgcaatggaatggaatggaatggagtggaatggaatggaatggaatcaacccgagttgaatggaatggaatggaatggaacggaatataatggaatggaacgaaatcatcccgagtggaatggaatggtatcaaatgcaatagaatggaatggaacagaactgaatgaaatgaaatggaatagattgaatgcgagtggaatggaatggaatggaatggactggaatggaatggaatggattggagtggaatggaatggaatcaacacgaatgggatggaacggaatggaatggaatggaatggaatggaaaggaaaagaaccgaatggaatccacccgattggaatggaatggaaaggaatggaatccacccgatggaaatgaatggaatggaatggattggaaaggaatggaatggattggaatggattggaatggaaaggaatggaatggaatggtatggaatgaaatggaaaggaacggaatataatcaacaaaagtggaatggaatggaatggaatggaagggaatcaacacgagtggaattgaatggaaaggaatgcaatggaatggaatggaatggaatcaacccgagtggagtagaatggaatggaatggaaacaaccccagtggaatggaatggaatggaatgcaatagaatggaatggaatggaatggaatggaattcaatggaatcaacccgagtggaatggaatggtttggaatgcaatggaatggagtttaacagaacagaatggaatggaatggaattgattgaatccgagaatggaaaggattcaacccgagtggaatgtaatggattggaatggagtggaatggaatggaatggaatggaatggaatcaacagaaatggaatggaatggaatgcaatggaatagaatggaacggaatggaatgcaatggaacagaatggaatgcaatgaaatggaataaacccgaatggaatgtaattggaacggaatgttatggaatggagtggaatggaatggaatggaatgaaatggaatggaacagaatcgaaaccaatggaatcaactggaatggaatggaatggaatcgaatggaatcaatctgggtggaatggaatggtatggaatacaatagaatggaatggaatggaatggaatggaatggaattcaatggaatcaaccccagtggaatagaatggtatggaatgcaattgaatggagtggaacagaacggaatggaatccgaatggaatggaatggaatggaatggaatggaatggaatggaatggagtggaatggaataaacaccagtggaatgaaatggaatggaatggaatggaatggaaaggaatggaaaggaatggaatggaaaagaatgaaatcaacccgagtagaatggaacagaatggaatggaatggaatggaatggaatggaatggaatggaatggaatggaatggaaaggaatggaatcaactggaatggaatgaaatggactggaatggagtggaatggaatagaatgcagtggaatcaacaagagtgaaatgcaatggaatggaatggaatggaatcaacccgagtggagtgaaataaaatggaatggaatggaatggaatggaatagcatgcaatcaactttggtggaatggtatggaatggtatggaatggaatggaatggagtgaggaatggaatggaatggaatggaatggaatggaatggaatggaaatgaatcaaaccgagtggaatggaatggaatggagtggaatggaaacaatgcaatgcaatggtatcaacgggaatggaatgcattggaatggaatggaatggaatcaccctgagtggataggaatggaatggaagggaatggaaaggaatggaatggaatggaacctaatggaacggaatttaaacaacccgaagtggaatgcaatggaatggaatagaatggaatggaatcaacccgagttgaatggaatggaatggaatggaacggaatttaatggaatggagcagaatcatcccgagtggaatgaaatggtatggaatgcaagagaatggaatggaacagaacggaatgaaatggaatggaatacattgaatgcgaatggaattgaatggaatggaatggattggaatggaatggaatggattggagtggaatggaatagaatcaacacgaaggggatggaacggaatggaatggaatggaatggaatggaatggaatggaacggaagggaatcaacccgaggggaatggaatggaatggaatggaatggaatccacccgattggaatggaatggaatggaatgaaacggaattgaacggaatgtaatggaattaaatggaatcatcccgagtggaatggaatggtatctaatgcaatggaatggaatgcaacagaacagaatggaatggaaagaatacattgaatccaagtggaattgaatggaatggaatggattggaaaggaatggaatggattggaatggattggaatggaaaggaatggattcaacccgagtggaatgtaatggattggaatggaatggaatggaatggaatcaacgcgaatggaatggaacggaatgaaatggaatggaatggaatggaatggaatggaatggaatggaatagaatggaatggaatggaatggaatgcaatggaacggaatagaatcaacccaagtggaatggaatggaatggaatggaagggaatcaacacgagtggaatggaatggaaaggaatgcaatggaatggaatggaatggaatggaatggaatggaacggaattcaatggaatcaactgcagtggagtagaatggaatggaatgcaatcaaccccagtggaatggattggaatggtatgcaatagaatggaatggaatggaatggaatggaatggaattc

SEQ ID NO: 467449 - DNA, 1892 bp, Homo sapiens
tcagcctcctcctcacatggagcttttgagggacctgtctctgtctctgtcacacacagagtgtcacaacgtctggctctggacagccatgggtgatcagctgcccggccctctcctctcccttcgccccatgccccggagtcggtaccctgccccacggctggcccccagccccaggaccactcaccctccatgatgcccccagttgcgggctccggcggtctccgatggcgggaggcagcgggccccttcgggccagcgggcagagggacggtctccgggcacttggttgcgggctgcgcccctgcctccgcgctccgcaggtccggtcggtccgggcagaggtgagcagggggcgtgcgctcccaggccccgggccctggccggtttccctcccctcgggctgactggctcccgcgcagcgctgctgcccgcagggctcagccgcccgccgcccctcgcctcccgaccaggggaaggagggggctcgtgaggcgcagtcgtcatggcacccgcgcacctgtgcccgccgagcgagggcgccccgggcccgcctcccgcatggcgctctctccacagagcccgagcgcccctccgaagtaggggacacacccctcctcccactgcagccctggcagcggcgtcccgtaattccccacctctctcccgtgcctcatatgccagcctctgtccccactcctcatccttgcccaccctagcctggggtccagcactctgggccttcctgagaaggggatgagagacatttttcttctaccattaaaaccttcctatagtgtcaagtccacgtggtaccagacaaaacaaatttcatcagcagcagcattagattctcctgggagcgcaaatcctgttgtgaactgcacatgcacaggatctagggtgcgcactccttatgagagtctaatgcctgatcatctgatgtggaacagtttcatccccaaaccatcagcccccacccccgagtccgtggaaaaatcgtgttccacaaaaccagtccctggtgccaaaaacacttccaggtacttcctggttaaacccaatctcttccacaggccacccaagatgcccacggcccagtccttgtccatttccccaccctgcaatcctaccgcttctccctcccacctgacccgctcctcactgagcaccttgctgttccactaactgctccgcgccttggcatgtgctatgccctctgcctggctatcttttggtgctccctctcctgtccccctcctcacctgcccatcagcctgtctcttgtcccatcctctctgctcccacatctagaatagctcttagatcagtgattcccaaactgctgcactttagaatctcctggggagacttgaagtcatcacaccccataccaataaaatcagaatgtctcagtattcttcatctatataattgaaataatagtagctgcctcctgtgttgctgtgggggttaaacgaggtgagaagtggagagcacttagtgtggtcacagacacctggtgagctgctggtgatgcttttcacttcctctactcttttttgacacctctggttttttcctttcacgtcaagctttgggtggctcttgcctttctctaagagaaacacggagcagctgataaatttggtcccaggaatgttaacgctcaagataccctcccaggggaatctgttacaaggaaatatgacccaaaatctagaaaagagacaaagatgataactgcattgttcaacaggcctgcctgtgagaatgtaccactgtaactttgttagttactattaattaaaggcacagactctgtgaggttacttgttaacttatggattcctgtccggcagaaaaaaataaccccaagttgactttatcag

SEQ ID NO: 467450 - DNA, 3277 bp, Homo sapiens
ggaggcaaacagaggtggagagtgactgagtcctgaagacatcaccgaaacccttcaatcaaattgtgccagaagcccggtgacaggagtcctttcagctccagccagtttgagttgggtttcctttcttgggctactctcctggtttgaagtgtggggcacccccaccccttgcccagaaggacctttgtcaatcctccaaggctccactagtatgtggcatctgcagaaactgaatacagagaggtcagaatgtggtccaagaaaaagagtgatgatggtggcggtggtggtggtggtggttatagtggtggtgatggtggtggtgatggcagtagtggtgataatgatgctggtggtggtgtggcagtgatggtgggtggtggtggtggtggtgatagtgatgatgatagtaatgatagtagtggtaatggtggtggaggcggtgatggcagtagtggagataatggtggtggtgatggtggtagtggtggtgatggtggtggagatggtggtgacggtggtggtggtggtgatgatagtgatgatgatggtaatggtggtagtgatgatggtggtggtagcagtgatggcaacagtggagataatggtggtggtggtgatggtggtagtggtgataatggtgaggtggtgatggcagtggcagtgagggcggtggtggtgatggcagcggtgctggtggtggtgctggtgatggtggtgaatgggatgtatgtcaacgtaaagtagagtactcacctgttcaccaagtttcccccagttgccatgtttttactaggcacacgaccaagcagggtcaatcacagaaccacacatttctagccactatgattggcccaaaggatggccaagtgaaaccaaccagggacttccattagaatttttcaatcagagcttgggagatagaaattcttttgcttttgagtcactatgcagctgtgtataaatccatgaagctcacatagacaagagtttgtctgcagaagagaataaaattgactctggagagaagtggagatgagagatggagaaaatgaaagctttctgttggtgtttgagtcccttgggcacagtcatccctcggacagtctcaccctttctagtttagatctgtgaactacaatcctttccatctcttttcttaagtcagtggacttggatttccgttacttactaccaaagggttctgtctggccctgagcataggtgatcttgaaagtgcaaagatgatcatgtaagagagatcctaacagtgacaatggctgagaggaagatgaaaaaggtgaaggcaacatcagtgatggaggtggttgtgggatgggatggtgttgctgctaacagaagtgatggtaatcatggtttagattaaatggtggcattgatggatgacattggtgatgatgtcacattggtggtgtgattggtagtgaggatcatgaagatgccaaggctttgccagcctagaaacacaggcccaaacgacccaagaaaggaccacctagaaagagagaacaaattcttccaagatggcaggtgctggttcttttttaagctgggtaactcctagctaaacctggacctggaggggtagaaggaccacaggtggtatcccatagagcttcagaattatattgaaaccttccggaacagagagacctggggtccctaaccccatcaggtccttttgagaattccaagtgcctctagtcaagaggagtagccaggttcaaacaacaggcaagatgaacttgggtgtaggggttgcatttttggtcagtgggagaacaatcataaaaaagcactgtgtcttatgtctgaccatttacacttcagctgtgtatatctgtgaatatttgttcaccgtggtctacttggtgaaaatgagtcacttctggagaataataataactaatttttgttaagcgttactatggactgttctaagtgctttactatacacatcatctcgcaagatgaaatctgcacgagagtaggtatttctatttccccatttaacagatgagaaaaaccaggacttcagcctggcttgctgaatttgaccctgggaggtatagcctggagctgctgacagccatcttaccccaacttgaaaatgaagacaacaggaagagagtagggctgagaaatggaccaagactgctccctagtgacaatttgaaatcctggaacaagctgcacctgaagctagagctatgttgggctttttaggagtatggtctaatgaattctcttttggctcaagcctgatgagttgggttttcagtcactggcaaccccaagagtcctaacaatagggtgggcagtcgacttacctccacccccaccttgcctgacctaaaaactcctgatgtgttttgtgtgaggctcggactttcaacgagaaagctgtttccctgccaaatgcttctgcttgggggtgctgaaacatggggcctgttaagaaggaaaaaccagttgtccataatgggtcaaagtcatactgtcaggcaatctcttcctcctaggtaggaacatggtcattaccatgaaatgctggagaaggaggtgctccaaagggaggcagaagagaacggcaggcaaggtccccccttatgaaggcatcagcggggagctatgtatgggtcattccctggggaaactggcctggctgttgggaatgtttcccaggagaatgcacagctctgctgcacattcccactcaggcccttcctcaaatggctaaataaaccgaagggctttgctacgtatttttcattccacatactatttgctctgcctgcctgccccagacagccaagtttaacccaacagagacgttcttcttacagaattcaaatgtatcccgtaactcgaggcaccacatgtcaactgtcacactgtgtagctttgtgcccaattcagcagatatttctgaacatcttcagccaggcccaggtttggtcaggccctctgtgagcaatgatgtgagttagatgcagctcctgtttctcaaggagctcagagttgggggaagtaggatgtgaaagaaacgaactgttacacaaggtggagagaagtaagggcaagtgagaattggggtgggagccctgtgttttcagaatctcggggaaaggggtgtgtggggaggtagggctgacaggattcacggtgaggggtggcttggggcttacccttcgagggtgagagtttcactctggggagagggtggaagacttctgggctgagaggcagtggg

SEQ ID NO: 467451 - DNA, 1252 bp, Homo sapiens
cctggatctgaagccggcctttcaccacgagcagtaagcagagagtgcctaatgactccaagctgtcctggaacgttctcttggccctggggagctgctgggggagtctggctgctgtgcacagcagctgtgtgagctgcctgccggcagcaagcccagccaccagagaccaccagtggccacaaccaggggccgccggcagatggggccaggagagggcagctccttcttttctcggcttgggatctagggtcagccgggttagcaaggagcagggctgtgtggccaagcgggctcaggccctggctcttcctcccttcctgtgagctgatagaaagggcccagaatctcagactccctcctttctccagaagcatccagctctcccattatctccctcctcctccctcccagaattcttccgaattgacccttcactcgtcatctatatactcagttgatgactaattgccatcacctgtcaggaggggacgggagagggtgtctccacaaacaggcggtcccagcagccggaatggaacatgaggctctccttgcctgcactggcgaggatgccacgcagaatgcgctgacaggccttcgaaagccagagcagaggctgccaagatggggccaggcaggaagcagggagggacagaccccacagagggagacgagaggaggtcaaggaggcggggaaagaagcagagaggagggggcaggaccagagcagacacagacttggggagcttgcttccgaggctccaagctcatccgtcaactcagcagccccagtagcagtgccggcagcagttactgggtcctgagccagcctcagcagatgccctcctactggaaacacagggcctggttcctgttagccaagggctttaccagccagcgccaggccacacccagccactctgagaagaccaagaaagaaagagagttgcttcagggtggccccagtgactccaagtgccccagggagctctttcatggctctgctgagcctgtgcagccagtgccccatcaatcccggccaccccttgcacccctggccaccccttgcacccctgagtgccttgtaagcagttttaaggacaccagctgcatttgtgggtagttgacaggtggtttaatcagagactgcagtttctgtttgaagaacaagggaaaatcccagaaggaggcctgagaatttgcaaggaaatactggcgggctgactttctgtctgtcaaagacagtccc

SEQ ID NO: 467452 - DNA, 540 bp, Homo sapiens
tgccaaagcaaagggcaagcaggacacttcctggccttgataacatgacaagtgagtttcctcataggcaaaacgggggtcttgggttattctggggacaaggaagcacagtgcatgtaaagcacaccactcagcgcctgccccgttcttcctgccctggcgatatgctaaacaacagggtctccactaggccagatggggaggggaaggggaggagaagagacccatttcccaaaaatattgacttcgaccttgaacccaagcagctggccatgaaagactgttactgctgctctgcctatgtggaagctggcccagagaggttaagtgactcatcttgggtcacacagcctttcaagaccagctgcacattcatcatgtctgccatctgaatagaaacctggagatggcatgggcctgaagtctacagaaggctgccctgtaggagtaatagggcactctgcacaagtgtctaggctctggcgtcagggctgcccagacccaaatcttgtccctaccaccctcaagttgtaggagctt

SEQ ID NO: 467453 - DNA, 916 bp, Homo sapiens
ccaggtctccctgatgctcagccggcagctgtcctggtgtgtggatggccctggctggcgtccttctcagagaggaccattgttgcccaatcacaaaatcaacctcttggtgtcaggagtcagcacttcccaaacttttatgtgccgtgaatcacctggagatcttgtgaagctgcagctcccgggcgatgctgtgtcctggggccacacttggagcacaagggctgagccatccggcagagcctctgtcccttggttctcagccctgggacctgagaaaaatacttctcctgggccctacctccagaatctctgcttattggtggagagcgaaccagcaccgatccacctgcactggctcaggcttcgaggcaacaggattgaaaacacagcttttgttctgtgtctccaagaaggctcagctgctctgagcacccacagttcctgatctggactcccttgtggtttgtaacgcacttgagtcaatgtggggtcagtgttaggagcagtggtgatgagagttagaattcagtctggggctaggaccaacgggcattcttacaaagtcagggatcagactgcatccagagtccaatcaccagcccctggtaaccaccattctgctttctatctctgtgaatttggctcctctagttacctcacgtaaatggaatcatacagtattttttctatttgtgactggcttatttcacttagcgtaatgtcctccaggttcatccgtgttttagcatgtgtcagaatttccttgctttttaaggctggataggattccattgtatggatagcccacattttgtttatccatttatgtttgatgggtggttgggttccttccaccttttggctgctgattcttgaagggaatcctgactagttcggggagtttaagaaactc

SEQ ID NO: 467454 - DNA, 573 bp, Homo sapiens
gtgtgtgcacagagctgctgtcctttaggccaaaacatgctggctggctgcccagtggctggacaggggtgactctatgtcaacctcctcgccaaagatgcccatgcctctcactcaaagcgaaggaatcttgcattattttgagagctactcagagggtaaactgctcccaaagcaggatgtgaagttccaggaggcaaacacaaggcagcgtttgcagacccttggatttctctcccaagttgtgaggaggtggggcaagtcctggggaatccccagggccgtgggtccttgccccttttccactgggggtcccatcttccaggctggtctccttgagccgctgcccagaaatgaacggattcctggtgtgctgttcctgctctggaagcaaaaggcgattgtcgggagcaatgtcctgggatggctagaacggcagcccgagccccactctggggagacaaaggggctgtcaggctattggagggtaatttgcttgacttctggagatgaggcctgactgcaaaagttttcctgtacctcccggtgttaatagaaaggccagggtcattg

SEQ ID NO: 467455 - DNA, 632 bp, Homo sapiens
ttgtcaggtctaatgagcgtgatgtccagatgctggggctggggacagcttcttcatttattccagctaacccttctctactctgctttcctggcttgggctaaaagctggatctttggcctggcgctgaagccatttgatccagcggctgcaaagggtgtttccatcttttactgtcagctgttgcttctgagccaccagcatgtgtgggagacccttacatctgcagtcatggtgctccatggtgctggtgagggacatgaggtcccagaggagctgtggtttgctggacgtcagctggagggtgggagagtgggattcaaacccagcccatgctcttttgataacatcctgaaagaaagcagggcatctgacaaggatggacagagactggctctaagagaagtgtgcacgtctttggaggtgagctgggacaatgaggtcggtcttgacccttccgaccattacacctctctgcgcagcactgtggtgctgctcaatgagatgccatctgacgtataacattttgaaagatcaactggtattttcccctctggatttccttccccacccttctcggggtctgcagccaggctcctcagcggtggtgttcctcccttctgggaaaggac

SEQ ID NO: 467456 - DNA, 1169 bp, Homo sapiens
cagtcttgtaggtatttctaaagatgagggatcggaggctcagagaggctcgcttcgcaatcttgtttgcagcgaaggggcatagtggtctgtgcggcgcggtgcccagtcccgcccgccccgccgcgcctggccgggcgcctggcacagcccaggcgctcagcggaggccccaggcatggcaggacctacggagcccggtgaggtgagcgcgccaggccggccggctgggctggaggcagaggcccaggcgcccgccctcgtgggaaagcgcgcggagggcgacccgggtgagtcagccgaagagcagacgggctgcggagcaagaagaccgaggctggaggcggcagtgaacgccactctgccctgtgccctcatcttcacagccagccctctcccctccagctgccgcaccttctccacagcagttgtccgtggtgcctacactccccgcttcacggtcacccttcacccgccctgcctggccgcacagcagcctttgacacgattgaaatgctccccacctcttagctttcgtgcggctaagcttcccttccgccgtctgggcccctgctcagtcctctttgtcttctgagcctcttccccctgccccaggcctcccctcccctcgaagcccgccctccaaggctgtgcttcgacttctcttctcccctgcggttacttgcctctcctggagggtctcacccatcctggggcttaaaagccaccaatgcccatggtgcccggcctttgtctaccccagaccagtcctcagaactctggacccctgcacccaccggcctaccgtgcgtctcccgtgggctccctcacagtcatctccggctccattcatcaagactgaactcctctgcgccttctccagcgttctgtctgcagccaagcccctgattcctgattccttcctccctcaacaccacaacatccaacctcataccagccatgtggatcccacttccaaaatggctctctagaatccacctgctcctccccatctcttctgtcaccacctggtcccagccaccatcatctctctcctggacaactgtggaggcctccctgcctccaccctggccccccagaatccactcctctcaggagctagatgggatggcatcactcccctcactgaaacccttcagtgcctctcat

SEQ ID NO: 467457 - DNA, 2380 bp, Homo sapiens
gcaatgcttcccagagtctgggagcgcctctgctagttggctccacattgcaaaccagaaagccatggggtgggctgtctttctcgcccccacctggggttggctctcattcccctcgctgctcctcctcagtgtgcaggcccttgtgagctggcacagcagcctcaaggtcctgttgggcagctcttccctgccccagagacatcagatctcgatgctggtgcacagcagacttgtctgtggctttttggtctcctgtgccaaacacctgtccttgccccgggggctgctcttgactggctggatgatagaggaagccgaggctcaagttggggaggagatccagggtcatggaatagcaggtgagtgtcaggtgtcagggcacgcaaggaccaaggttcctgactcccaggcaatgttcctctcgcagttccaggcagcctctcctgtcagtggaaaggccaagcgtatgtgaacagaaactcaaggtcgtaaactgtgtgctgtcccgtgatatggtagctgtggcaacagcttcagaatgattaatgctaaaagtgattggtctaatggtggtgggaggtgaaggggcctgggggtactgagtagaggtgtttatgaggctcccactatgagggggagggctgcttaacttctgcgtgtcattgtcttctctgaaactgggaggccaactaagaaaaacagatgtcaatggcccagttagtgggatttgatgctcaaacggaaccttctggtgtttctcagactcaagtcaccagtgctgctgttttatccattttcaaaatattggagagggagagggctgctgttatgtacacattacttgtcatggaacattgaaaaaccctgcagtctaattttcttctgctttcagtagcatggctgatggggcagtagaacaggcccctttttagagaaatgtctggaggtgagatcgtttgttaggaccaagttggtctgaatgcaaactctgttcccaacgggtggctgaaggcctttgtcagcctttgctttttttttttttttttaatttatttttttattgataattcttgggtgtttctcacagagggggatttggcagggtcatgggacaatagtggagggaaggtcagcagataaacaagtgaacaaaggtctctggttttcctaggcagaggaccctgcggccttccgcagtgtttgtgtccctgattacttgagattagggattggtgatgactcttaacgagcatgctgccttcaagcatctgtttaacaaagcacatcttgcaccgcccttaatccatttaaccctgagtggacacagcacatgtttcagagagcacagggttgggggtaaggtcacagatcaacaggatcccaagacagaggaatttttcttagtgcagaacaaaatgaaaagtctcccatgtctacttctttctacacagacacggcaaccatccgatttctcaatcttttccccgcctttcccgcctttctattccacaaagcctccattgtcattctgtcccgttctcaatgagctgttgggcacacctcccagacagtgtggtggctgggcatatgcgcccctcacctccctgacggtgcggctggctgggcagtgttttcttcatttcaacctttcttaattctcaccattatctctttttttacttactcttttatttctctccctttccttttttctctatttttcctatttttaatattcccccttcttccttttcttttctttttctcctctttctttccctcttttttctttctctcttttctcctttctttccttctctcttcttttctcctttcttctctttttcttcttttttctctttctttcttttttcctttattttttttttcttcttttttttcctctcttttctcctatctttatctcttcacttttttttcttattttttatccttccattccttcttattctttttttcccctcttctcttttccccttttcacatccttgtcccttctctcttcttacttttcctttcccacttctcatttatctcctttcttctatttcatccttcccacctccttttttcttattcctctttattcttctattctacctcttatctcattttttttatctcttttatatctcttttatattatatccttccacccttcatatcttttctattattctcacattttaatacatctttttctcatccctatttctcactctcgctatctcaaactcttcattttattctctcattactatcatcattacatcaacatgatcttcttattcatctctttttgattatacctttctctcctatatctattttaaccacttcattgattatctccccc

SEQ ID NO: 467458 - DNA, 1002 bp, Homo sapiens
aaagtgtcccattggcacctcatgatgatctgtggaggtggaggttctgccaagagaggtacagccacctggctgctgcctttggccaagttccttccactttggcctgagcttcccaaccagccagaaaagcagacggaaaaccagagaaacctagccctggcggctcaggaccagaggctgcctgggagcatgactgaggacctactagaggctggcaaagcacacaggctgagcgctgaggagagggaccagctgctgccaaacctgagggctgtggggtggaatgagctggaaggccgtgatgccatcttcaagcagtttcatttcaaagacttcaacagggcctttgggttcatgacaagagtggccctgcaggctgagaaactggaccaccatcctgaatggtttaacgtgtacaacaaggtccacatcacgctgagcacccatgagtgtgccggcctttcagaacgggacataaacctggccagcttcatcgaacaagtagcagtgtccatgacatagaccctgcccttcctctttgaattcttccgggggaaggggtgactgaactgggagtccagggagggagctgaggagcccttaccctcccaccactcccctcccaagacccagccgccgccgttgagggctgagtccttgctgtgggatgtgccagtgtccccaccaacaccaggaatttagaccttttccctgcaccactctcttcatcctgggggctctgttacactaatttgaataaactctcccctttctttgcaacttcccagcaacaataatgattttcttgccaggccgtctcttgctccctaattcatttcccaggaagctgtgatacagggtgaaataaagtcttgtcttagaaaccaggaccctaaaccccacactatgtaatagaaacacatgtgtttttatgtctcaaataaaactattatatcacttggtctcaggctctagaaacttcttttccacaggtcaatc

SEQ ID NO: 467459 - DNA, 752 bp, Homo sapiens
catgtgaccgagtgaatgcagggtccagccagctgcactgagccatgacacaggaacaggctctgtgtggggcccacagccagatcagcctgatggacagcggcatgttggcagctcaggcggcccctttctccactctggcccgtggctcctggaccagcttggccctgctgcagcttctgttctgtggggcagctgccctccaccaccccgggcagcagagagcctacacttacctcctcaccacaaacctggtagtgggcagccagcctggtagtcaccaccgggagaagggcaagagtatggaaaatatgaagaaagacacctccttcctgtggggccactggggatatggcaattactatcacaatgagagaccgctgagcacattcttcactgaaatcattctctgctgcagcttttggaatccggtcactcttgaaaacaccaaaggccactggagcctacagctgcccatcatgtcaagatctgctggtatcacggtagcactcagcagtggcagcccattgcttcagctcctggaagaacaaaaggccatctgctgagtcagaggtcccaccagaagccaagtcagccacttctgaaaaccatttggcaatttcaatttcttatgaagtagaacagacacttacctatgtatcagcaaccccactccaagagaaatgaagacacgtccacacaaaagcctgtgtgctaatgttcatgtttgtggcagctgtgcttgaaaacaa

SEQ ID NO: 467460 - DNA, 1100 bp, Homo sapiens
ccccaccctcctgcatccctgccacgttgttcctcacaagtggtcatccacccctagtgtgacatggtcaccgataggtataaactgctcacattcaaaatacatacatatatatatacacacttgacggactttcacacgtgtatacagccatgtaaaaggctcatagatcaagatatagaacaattgcaacagcccaggagtttgattgtgccttttccagtcagtaacctgcccagagggattgcttttcaagaccccaatcaaaccccacctcctctagaaagtcagcccttctgctcacagccctggttgatattccctggctttggaggcactggtgcatatagcccgttcaatgccgtgaaagaacgcatcttggcttctgcatacaccttgtgggcagggacggtgtcttctctttcacatctgccccgtgtctcaggtgatgctggagctcgatcagctcttgtggactttcgaaggtagggtcgaggtgtggcccagtttgcctgagacagtcccaattgccacttactgacatggcatggttaataacagcccctcctgaggcccagaggagaggggagctgagatggaagccaaggggccgatcgggaagagaacacttgtttcagggacagaactgggtctagtactgacggcctcctgtgtgccatgtgctctcagatgaatccctcatcctctgcacctcagtttcttcttctgtacaatagagaaaataaatcttcacctgtctcaccgggcagttataagggtaaatgagccatcagatgaggctgtgacaggagacagtgcagacgtacagagaagctgctcctgtcttcccaaggccctgcttgcgacagggaatgtggtcacctgccctgtggcagtcccatgggccctgggagagggacattcagcatgctcagaggagggactggcatgccccagtgggggaagcctggccgagtgttaacatcagttcagtccaggtagtggctaaatgttcttttttgaatgttcaaaatatttcgtgaataatttttttctttattgagctataattgaaaaataaaattgtatatatttattcc

SEQ ID NO: 467461 - DNA, 805 bp, Homo sapiens
gatggctgcaaatcagccacttggtgcagtggaacaaacacagccaagcagctcagacctgcaggcctgtccctgacagtctccgtgaccttgcgaagagacaccgtcattcattcaggacacatttattagggagctggcctgacagctgggagatggatcaggctgtcccctgccctcaaggggctcaccactgagtgggagaggtggccccatgaacagtaagccccacaatgggtcacagggatggggatagcacatgcacccccccaaggaacgagggagcaaggggcaagttcagcaaagaggacccagcagtcaaagtcctcaggcaaagaaataaagatggcagttggcggttgggccagtgtgccctgaaatgggaaggaagaggggatataggtggagaaccaacagtgtttgctacagtggctgagtttttccaccaccaggggtatgtccaggcccatggggaacacatgcatgcttcctaccatatgacagcaggctggccctcggttctcacactccagtgtggcctgcgccaaggcaggcacctgaaagacctgggagatgtaagcactggcagttctcggaccctcacaagccccctcccctggaccccagggcgggatgagaaggggcagaggcataacagggcctgtgacctgtggcctgctcaaggtccacccaccctgcccaagcggcacgctggagctgcaggctgacagcaggcaggctgggggagaatggccctggagtagtggcctgcaggctcctgatgagctcctaccaaggaggctct

SEQ ID NO: 467462 - DNA, 794 bp, Homo sapiens
acgtatccctggttaagtattcaatgtggcaccatagtacgagtgcaggtgttttgaatttacacctatcctagctttcacttctgatccaactcatgggtttggagatggacgccgcacacggctgcctctccttgcaggcatgagggtgaaggggccttcagtggagcccgtggggatgggggtcctagtcccagccaggcagtggccaccgcagcatgtgtttccatgacaacactggacaccggcatttctctcacgagaacacaggtcttgcagaggatggctgggaagcagagcaggttacggggctgtcattgcagagccagcatctgtacctggctacaagactcagccacactccagcccatagtctccatcatgaggtgaagctttgtcccctcacattgatggccagacacacggggcgcagcagaagtgactcggggcctgttgctttgggaaataggggttttcacctcctacttctagagtcatttgctgttgagatccagcctccattctgggagccagcttgggctgcctgcctgtgtctgagccatcttggaagtgaaccccttcgaacccagcacccttgcttgtgccatggagcacacacaagctgccatttctatccctgacccaatggcagattcccgaggaaatcaaatgagtggtgacttccagccactaagttaccgtagcagttaactgatacacaaccgttagactgttcctaaagctgtgtttaaaataaaactttaagctggtagcgctatagaaataactgttga

SEQ ID NO: 467463 - DNA, 685 bp, Homo sapiens
cttaggtctgtgagcttctaagggaagggactgacttccatctccacatcccgttgccactatggggcatgcagaagtggacagagttgatagcttgagtcagaaatgcaactcatttaacttcctgcagaacagtgcttgggagtttttctcatttctggttcttttatgctggcgatacatcggtgtctatggtttcctaggcttcatcctgactgacctcttcatggtaggaattctatccaggactcttatttcaagaggaacccaaaatgagattcctttcaccagaagtcccaccagaagtacaaattctgacaaatttgtacatgggcccaatttttgtggtgcttctgttgaaaaccgaaatcccctcctgaataaaagggatatcccacttagacaattcagaagatcttatcttcttccatgcaactttctcatttccattagcacatccagatgactagtctattgttcctatatagaaatgctgcagatttttgtgtattaattttgtatcttgcaacattatttgtcagttataacggttttatttttgtgacatctttaggtttttctctatgtaagattacatcgtctgcaaacagaaacaatttaactttctcctttccaatttgaatgtgctttactaatttctcttgcctgattgctgtggttagga

SEQ ID NO: 467464 - DNA, 1505 bp, Homo sapiens
aataaaggtggttttggaaggataagctccatactggagccagctcctgcccagaggaagcagtgtgaccagtgtgatggccacagaagcagaggccaagaagccccaggaagcaaacatgaaggacccagagcccttcttcctcctccagcttgtgggcccatctggtgccctgtactgcaggcagcttgcaggtcccagctttggcatcctagatcccaagatgcaaagccaaagcggcagcaagccccattccctagacactcaagagctgttctctgtgctgcagctgaagctggcttcagaccccttgggcgggctcccaggcaacctacagtgcaatgacagcgtccatcgccccctctcctgcagaaggccacctgcgcgggaagaaggaagcaatgctgacttgaccttctgcagccgcggagggggagatggatgctgtcctggtgctgtaggctgcctgggagccccgccccgcggatctgaagagccctcctcccctcgggagctgtttaggcagcttcgggtagagatggaggcctaatcgttttcattatcttctgcatatccactctttattttctgaaatgcttacgaatttttttctttcatatttatcaccttagaatttggtagcagtattttggaaaaatgttaacgcctgtcattgttcggaaatttcaaagaacttctgacattgcctttttctactgatgacagcagtgcggccccaagctgcctgcctttgggagacagaggagccacacttgtacatgctttgaaagtgagaaacttacagaaacctagaaaaaggattttggacctcaggatctgaatggttcttggagttctttgcagatgaggcatttatctgatttcttactttcctaagagcccctccctgccttttctctcacttagcccttctcctcaaagccctcagtattgatgtgggattgaggagacgggatcagcgatgggatcggagagggctggaatctgtttctggtggagggaaggttgcatcagccacttccctcggctcccgtagaggccattcctagcgaagcacagtctttgcctctggctggaatgttctccccttgaagacacctccaggtctttgcagacatctgcttcccttgtctggccctgctatgcagctctgtgctttatctacagccatggcataggaagcagcctgagacatgacacggctgcctcatgcccagcttgttgagtaccacgtgacctccctgcaggtaaggacatttgtctgcattattttctgcttgctcaggacctggcatgaaagaggcattagatacatatttgctcttcttgcatttttttcatgattaggcatattctgttttggctccttgtagagctcttggattaggttcaatttgctaaacgtgtaaacctataaattttaggatgcttttatccagagctgtttcatttcatcatctttccaaccctgggaagtaagggct

SEQ ID NO: 467465 - DNA, 592 bp, Homo sapiens
gtgcattcccactggccacaggtgctttctgttgcaattacctctgactgcaaatgttacgttttgattatttccctttgcagtgaatattgccagaccctcagagatcatctgcatgtttggcggtgtgagcagaggttgccaccactgttctttttgccctaactgttctgagtcagctgataggaattctgattctatgctcttttgccaagatgggaagctggtttggaagacttttggatctatacatcccagaatacttcttccctatttaggtatatcagtcattttatttcctactaagaattatttgtatcattcagagttgccaagcacagaacataactgtgaaatcccaaggtttctggaaatttttcagataggaaagggggacaaaatgaaccaggcagccaaatttcactctttgctctttgaaaagcaagaatgtttctgccctctttgcttctttttcctctcttgcagccctttcttctatctctaacctgttgatgtttcatagagtatgatttttctctgataagcatacacatgaccagggcactggttgaaagagtaaggtcttaacaaa

SEQ ID NO: 467466 - DNA, 602 bp, Homo sapiens
ccgaggcatatccattacaccgtctaaagaatctggacctagggattcccgtagtaggtttctaggaaaggaagaccagggcgcagcactgacaaccgggatggttttgcacgtcacctgagaccgtgagaaatcatcaagagtcctgcggagccaccctcagttggtagctcatgggctatgagtctggaaattaagggaaaaaatgttaggacaaaaataacaaagcataagatcctggtgaaaatattgagcttcccagaggttaaaagcgtagtcattgccactgtgactgtggctaaagagaaagaggtctgtagcgaggaaaggccttgcctggggcagtcagatgttagtagtagtagtagtagtagtagacgagaaaatagaggaagccctagaaaccagccaaggtcattttatcttacagacaaaattatgaatgaaagctggagtccacacacactcacactcacacgcacatccacaactcttcctaaagaaaattggaaaggaagatctctaaacccagcaactctagatgagatagaaatggaaccaaagagaaaaataaaacaagaccatctacgttaatggtcagc

SEQ ID NO: 467467 - DNA, 1597 bp, Homo sapiens
aagccgccagcagctgcagttactgcaacaggatttctgctatttagaaacacttcactacatttctttagaaattttgataaagaccaatttgttctccatgtgtgatgtcgttgatgtattcttcttaaagttatgtgagatgcatgggacagacacaaggagccccattcagcagcaagacataaacagatttggtagtttcctaaaggtgcatccctcgctggtggcagatctgggtgtgaatgcgtcctcggtgaagctgggtcggctcctgggaagcttagcaactcagacacaaagatatgagtctgctggtgccgtgatgtggacgtccggcctccagaacagtgagacatcagtgtctgctgttgataagccacccagctgtggtattttgttacagcagcccaaagagactaagaccacagcaaatggaaggagaggctcctcagtgtacactgagcgttcttcttccgtggccaccaagctcgaactgggaagggccggtgtccctaggacccatgactggtatccaacattcataccccagcacacaggtctccttgtggtcttcaggccctccaaaaaggttccaccttcagggtcttctcctgcgacgtgagtgccaataatcctatctggcaggaagcatcagggataatcaccttgatttctattattattgctgaatcttagaatcataatgttagaaggaaatttcatgctcatcaattttaacatccttattcagagaagggaattgtgtcactcccattgagcagctgtggggccctctcccacatggcccaggtccaccactctgtcaaaggtcgcacagcccagacaaaaacaggacacagcagtgtgtgaatgagccgggctttctccttccctccacgtaatagaaggtgcctgaggttgttgaaacacagtccatttctcctgggaatgacaagaatttgagggatgctgactttcaaggaatactgcatgacaggcatcaagataaacctgatgaagaaaacataggccagaatctgggaatcgggagcaaagtaatacagcttcggggacaggcacgtaatgaggtcatgatgtaggagactccctgcaggactggcggcccctgttccctgggttgttctggctctttcagaacctgaccctggaacaggactgagcaggtgcctgtgtgcacagaagaccttgtgtgagtcctttggtaccacgtttgctgcacgaatgtctgagacacctcacagtcgcttggttcagcctctccctcctctctccgctggggaacatcatccctcatcactggaagaaattacaaggattgtgtaaacaattacaagtattctacaaacatattttacttaaaaatccaagtaatagtattctactgtattgccttgaagaagtaaattgagaaaagtcagaacacttatgtatttttatttaaaaacgaacgttttagtcagcacccaatgcaacaaaagcaaactagaaattgcatgtcagcaataaaataaccaggttcttagaagggcggcctaagtcagctctacagattctcacctttgctgatttagcc

SEQ ID NO: 467468 - DNA, 592 bp, Homo sapiens
gaggaactggatgtggttttccataatgggtgtgtgttacatgggtgtattgtatgatgctgagatttcggatacagatcctgtgacccaggtagtgagcactttacccaacaggaccagttctgcaccagtgtcagtgacagaccagagtaaaaacctcagcagaatttgggaatctggtgccctgcacctgatgagcagctctccctgtgaacgtgcacgagaggcaacctcaggacttcatgagggtctcgcgggagtagaacctggagaggaaagaagagcattctccggaaaaatgagaggaggcaatggggatgtgtgtgtccttattggcttgttcagaaaaatgatgatgtcggcaatacaagctcagcaccctgagttcctgtgggaatatcaaggtcaaggctacttccctcatggtgctgtgagggtggagagtgctcccatctctgtttctttccgtgtgcccgctccaccccctctctcagcattcttccctaatatcttgacaagcgtccgatgatgttcccataagagttgacttggctttattagcccattattaattgaaatagtttagatattc

SEQ ID NO: 467469 - DNA, 460 bp, Homo sapiens
ccaacagctggcactgtgtccctggaaaagccacagacactcaatgccagcccatgaaagcagccaggaggggtgtatactccacaaagccacagaagtggagctgcccaagaccatgggaacccacctcttgcttcagcgtgacctggatgtgagacatggagtcaaaggagatcattttggagctttaagatttgacttccctgctggattttggacttgcataggccctcaaagtgttgaaagtgtgccttggttcctcctgactgcttatagtaaacatgtgaaagaacagagagaatttgaaggagaaattgttactcaaatggatccaagtcttaaaaatttgaaaggttctcagcctgttcatattgggaaacatcagaaagcatatttagaagataaaaccaagggtgtggtaaattatgacttggaaaaaagcttatgagattatataagc

SEQ ID NO: 467470 - DNA, 564 bp, Homo sapiens
ggactcgaacggaatggactctaatggaacagaatcgaatggaatggcatcgaatggaatcgaatgtaatagaatggaatggaatggtcccaaaaaatcgactggaatggaatcgaatggaaaggaatcaaatggaatggaatcgaatggaatggactggaatggaatggactcgaatggaattgattggaacataatggattcgaacagattggaattcaacagaatggaatggaatggaatggacgcgaatggaatggaaaaggaatgtactggatggaatggactcgaatggaatggactggaacaaaatggcatcgaagggattggaattgaacagaacgtaatggaattgcatggaatggactcgaatggaatggagttgaacggaatggaaccaaaaggaatggaaacgaatgggattgaaccgaatgttatggaattgaatggaatggcacttaatggaattgaaaggaatagaatggaatggagggtaatggaaagatatcaaaccgaatggaactgaatggactcgaacggattggactggaatgcaatggactc

SEQ ID NO: 467471 - DNA, 502 bp, Homo sapiens
tcgggacttgtttctcctaaatctttttttttttttttttttgagacagaatgactttcactggaaccgtttgggccacatgcccatgccggagccaatcaccacatccagcctggccagacctggctttcatgaagccccttcaggaagcgagtcaaaaagacctgggttgggtcccagctctgccatttaccagctgcacgacatcagaaaagttattttcatcctggacaagagcagccaaggagactgtagacctgtatctttatgagggcaaggatgagaatataacctggcctgtttttatgcaccaaggtacctgctgttctcatgaagatgtcagcagccagccagccagtctctacaaactccacccccaacctcactatgctcctttccctggaactttccaaggggcccttagaatttgtattcagctctcacaggctgagaccagggtgacatcctggaaaacctgcctagtgatagccaaggtgtagct

SEQ ID NO: 467472 - DNA, 780 bp, Homo sapiens
accccagcaaactccaacagacctgcagctgagggtcctgattgttagaaggaaaactagcaaacagaaaggaacagcatcaacaaaaaggacatccacaccaaaaccacatctgtaggtcaccatcattaaagaccaaaggtagataaaaccacaaagatggggggaaaccagagcagacaagctgaaaattcaaaaaatcagagcgccgcttctcctccaaaggattgcagctccttgccagcaatggaacacagctggatggagaatgactttgatgagttgacagaagtaggctttagaaggtcagtaataacaaacttctctgggctaaaggaggatgttcgaactcattgcaaggaagctaaaaaccttgaacaaagattagatgaatggctaactagaataaacagcatagagaagaccttaaatgacctgacggagctgaaaaccatggcacaagaactacatgatgcatgcacaagcttctgtagccgattcaatcaagtggaagaaagggtatcagtgatggaagatcaaatgaatgaaatgaagtgagaagtgaagtttagagaaaaagagtaaaaagaaatgaacaaagcctccaagaaatatgggactatgtgaaaagaccaaatctaagtttgattggtgtacttgaaagtgatggggagaatggtttagacatgaaatccttgcacatgcctatgtcctgaatggtattgcctaggttttcttctagggtttttatgattttaggtctaacatgattgacttggc

SEQ ID NO: 467473 - DNA, 3748 bp, Homo sapiens
gccgcagcaggcaggggcaaaagccgcgacgggtaaaaagtcgcggcggcagggggcaaaaagccgcggcggggggcaaaaagccgcgtcaacggaggacaaaaagccgcgtcggcggggggcaaaaagccacggcgggcaaaaagccgcggccgggaggggggcacaaagccgaggcggggtgggggcaaaaagacaccgtggcgggggctaaaaagccgggtgaggaaaaagccgcggcgacggggagcaaaaagccgtggcggacaaaaagccaaggcagggtgggggcaaaaagccgcagcgggtaaaaagccacggaggcaggggggaaaaagccacggcggggaaaatgccgcggcggctgtggggcaaaaagctgcggcggcaggggggcaaaaacccagggcgggcaaaaagccgaggcggggtggggggaaaaagccacggcggcggggggggcaaaaacctgcggcggcaggggcaaaatgccgcggcggcggggggcgaaaagccgcggcaggtaaaaagccgcggcggcgagggggcaaaaagccggggcaggcaaaaagctgcggcggcggaggacaaaatattcattcgatgagtccactcgatgatgattccattccacaatccattccattccattcaattcgagtctattccattccaatccattccattcgggtccaatccattcaattccactcgagtcaattccattgcactgcattccattcgaatccattccattccattcgttttgagtccattcaattcgattcgagtgcattccattccattccgttccattggagtccattccattgcattccattccattcaagtctattccattctattccattcgagtccattcctttcaattccattagagtccattctattaaattccgttgtattccattcgagtccattccattccattcccttccatttgtgtccattccattccattcgagtccattccactcgagtccattccataccattacattctgttcgactcgaatccattcaattccattccattccattcaaatccattccactccattccattcgagtgccttctactctattcctttccactcgaatcctttccattccattctagtccattccattctggtcaattcctttccattccattccattctataacagtccattccattccattctataacaatccattccattccattccattccattccattccattccattccattccagtccattgcattccattccacttgagtccattccattccattccattagagaccattccattccaatccaatctattcgagtccattccattacattcgagtccattccaatccatttcgtttgagtcccttccattcaattccattcatttccactcgagtccattcccgtccattccattccattccattctatttcattcaagtccattccattccgtacttttccattccattccagtccattccaatccattgcattccattccaatcggttccattccatttcattctatttgagtccattccattccattccactccattcgagtccattccattccattccactccattcgagtccattcaattccattccattccattccattccattccactccattcaattcctctccattccattccattccatttcattccattccattccgttccattaatttcagatccattccattccattccattcaagtccactccattccatttgattcgtgtctattccattacattgcatgccattcgagttcattcctctgcattccatttcattcgagtcttttccattgcattccattccattccactccaatctattccattccattccattccattcgagtccattccagttcattcaagtccattgcatccattccatttcattcgagtccacttcattccattaagttccattccattccattccattccattccattccattccattcctttccattcttctcgggtccattcaattcaaatgcattccattcgattccataaccttccattccattccattccgttccattcccttccattccatctgaatccattccattccattccattccatcgagtccatttcattccattactttccattcctttcgagttcattccattccattccattccattaaattcgagtcaattcaattccgttccattccattagagtccattccactccattccgttcgagtccattccattccattggagtccattccattccaatgcattcgagtccattccattccatgctattccatttaagtccattccattgcattcgaggccattccattccatgctattccatttgagtccattccattccattccatttgaatccattccattccattcgagcccaaaccattccattccattcaatttgagtccattccattccaatccataccactcgggttcactccattcaaatcctttcgagtcaataccattccattccattcgagtccattccactgcattccattccattcgagtccattccattccattctattctagtccattccattccattcgagtccattccattccattctattctagtccattccattccattccattcccttcgagtccattcaattccaatggattccattccattccgttgcattccattccatctgagtctattccattctattacattgaagtccattccattccattccattagaggccattacattaaattccattgtattccattcgagtgcattccattccattccgttccatttgtgaccattccattcgattggagtccattccgttcgagtcctttccataccattacattccttttgactcaaatccattccagtccattcgattcgagtccattccattcttttccattttgtaccattcgagtccattccattccattccagtccattccattctattccattttataccattctagtccattccattccattctattcgagtccattcaatttcgttcgagtccattccattccattccattccattccattctaatccattccattccattccattccattccattccattccattccattcgggtccattacatttcatgccattcgagtccattccattccattccactccattctggtacattccattcaattccattccattcgagtccatttctttcattccattccatccaattcgggtccattccattgcattccattcaagtgcattctattccattccactccattctagtacattccattccattcgagttatttccattccattccattctattcgagaccattccattccattagagtccattccactccattccattcgagtccattccattcaattccattccattccttcaatccattccattccattccagtccagtccattccattccattcccttcaattctattccatttatttcctttccattccattccaagctattccattccattacattacattcgagtcaattccattacattccattctatttgagtccgttccattccattccactccattccagtcctttccattccattccattccattcccttccattccattccattccattccagtccattccattccattggagtccatttcattcgtttccattc

SEQ ID NO: 467474 - DNA, 704 bp, Homo sapiens
tgaaatgctgagctatttgccttcaattcgaccaggaaaaacagaagctttattatttctttggacaccacaatggcctctcaagtttttgccctaccaggctcttcacaagatccgttgtgtctgaagaaggagcggcgactttttgtctacatttttacttggttggaacaatcttctgagatatcttcaaggactgtattagtctgtttgcatgctgctgataaaggcatacccaagactgggcaatttacaaaagatagtggtcgagtgtacttacagttccacgtggctggcttcacaatcatggtggaaggcaaggaggggcaagtcatgtcttacatggatggcagcaggcaaaaagagagcttgtgcagaggggaagagaatttatctggaggtggtaaggagaacattcagttatctgactacaccctcaaggagcacaccaaatgcatggtacttttgcaccatcataaagtggaaaaatcataaagtaaacaatagaagaataggttgtatctatggtagattgtatctgccaaaattgcacacaatcttatctcatctcacatgctcttctgtagtgtgaccttgccactctcccatgaagaagtggaatctgcttctctatcctggaatttgggtggtccttgtgacttatttgactgacaaaatataatggtaattatcctgtgccattt

SEQ ID NO: 467475 - DNA, 565 bp, Homo sapiens
acaaattgatcaccatggcaatcatcacagactctcgccctgtggaggggcaaggtaaaattcacagagccgtggaggaagcagatctgattatctcagaagggttacctccttcgagtaggctgcagctgtccattaggctgctcctacacacacgcgcggagcccgtgccaaaacgtggaacgaggcatatggttagaaaccgagtggggaaggcatgccaactgctgatgcgcccagctggctgcctctgcttcattggtccgagtgagcactctgcaaataagacctgctcagaccctggaaagggtcctgacagatatccgaagaattgcagctgggttgaaatcagtgaaccactagcaacacaaggggctcagtactgcgagatgcagaaaagggagccttatgatgctgggtaatataattctaaataccatcaagcccataaaatggggagatttacccagccaccctccttaagaaccaattttttcctcagtatcttctccctgactgtcccttaccaaccaaccccttttctaaatgacttcttgtactttta

SEQ ID NO: 467476 - DNA, 462 bp, Homo sapiens
acccgaatatttggttactatgccgttatttgcaaaagcaaaacaacacatccactttaagagacaccaagttgtagaaggaagggctttattccgctgggagcatccacaagctactgccttaaaatccgagctccccgaatgcacaacttctggaaagagacctgcagttaaatttgaaatgatggacaacttgaccccaaaaagaccttgctgtaatttgaattcctgttggctgtctgaaagcttgactgggctaaaagatgcccagatagctggtaaaacattatgtatgggtatgtttgtgagagcttttctggaagagattagcattagaatcagtagactgagtaaagaagaacaacttcaccaatatgtgtggacatcgtccagtccattgagagcccaaatagaacaaacggtggaggaagggtgaatcattctgtttaaattgggtcattc

SEQ ID NO: 467477 - DNA, 506 bp, Homo sapiens
ctttcagagaaagagaaacagaatgctctggtgtatttcaaaatggttcctttctcccttctcctgcaggaagcacaaggggatttttctagcatattcacctatgaacctggtagaactctaggagataaaacacaaaattgtgcacctcttccacaacgacttggttaccctcaagtttttctctctgagacttgtctacacaatgcttccaacagtttgttaattatagttcagcactgggtacatgtgcacaacatgcagaaccatggtgattttcatggggtccagcaatttaccccactcatcttaagacagcttctgcccttcctggaatgcagtgtggctgccgccctggttttgcatcttcaagatagaagcccagagagaggacctgtgcatgatttgattggaaattagtccatttctctttttggttctatgagcttttgttttccatggtatcaaataaacaactatttataatatttctaatacatgctgag

SEQ ID NO: 467478 - DNA, 611 bp, Homo sapiens
agagtaacttttaaatgtgtttactggttatttatccagtccagcgttgcacccctgtactactgatctgccatcccggtttaccaccagcgaaagtttctgggagcacctgtgttctgcctaaccctacggatgtggtccttactgcagccagtggcaggtgctatcttcaaaaccccatcttatctcctgctttcacagaatacttctgggatcaactgtcgcaggctctagggcagaatttagggtgcacttggaggagacccatggcagagcggggaacaatgaggaggaaccctcgctggaatccaggctttggacaggaatgtgagcagcagctgaagaagtttagtgtactgaagagtatttcctttggagaaatgctcccaaagtggtccaataagaaccactcggggccaattgtttcaactgaagattgctaagccgctcttgcagtgctcatttccatgggtttgggatgaaagcagtatttctacaggctcacagagtcctcaacagattgaatgatgctcccctgaattggtgagggtgatcttctatactcagtgtactgattcaaatgctaatctctttcagagacacctttgtgt

SEQ ID NO: 467479 - DNA, 913 bp, Homo sapiens
tattgttttggtccttttttttttgccatgaataaaaaccatgaagtgaaaaaccaagccaaaaacactgtgaaaatggagaagtgcgtccagatgaaagcctgtgctcctttatatcactggagaactcttaaaccgacaccagaaaaggacccagttggcacctgctatgtagcaattcagaacttcagcgcctatgccgagttctctccttgccggaacagtaagcaacttttattccttgaaactgacattagctcaagtgcttttctatcatcatccaagaagcagacttcccgtcatggccaagaagttcacagatcattaacacaaagccagcttgttcatgagcatatgaatggagaccttattgtgggaggacctgggagtttctactggcaagcgatggtggtactgactgtaaaagaagagaaatttgagaaatactttggaggcaaaataagcagcctaaatgatgggttggatatatgctgggaatgtgggtctgctcatggagggcctgcctcttgctttcattcagttaacgtattaatttgtttaaacacaggacaagtgatcactgccagtgttgcagatatcattgcaaattactcattcaaggatatcctcaggaaactggcaggagaaaagcagacggaagtggctccagcttcctatgatgacagttaccttggatactcagttgctgctggggagtttactggggattctcagcaaggtgagaggcactgttgagtttaaatcacttataaagcatggggaaatggtaaaatggcatataaagttttttctatcaatgtgattttatttgctataccaaagggatattaatggagtcccagagtgcctatactttgtagaaaaaatactttgatacagcattttaagtctg

SEQ ID NO: 467480 - DNA, 1393 bp, Homo sapiens
cacgcagagctaactggccctcgtcatatggtcagcttttgtggaagcatggatcatttcatattcttcctgaatgcctgtgactgggcccttagtggcttcgcagtaattacctgtataaaccgagtgttcattgctcccaggagaggtccatgcagctcagatttagaaactccagaatcggatgaagataacactagtcagtgtaggagctccatggacgaagcgttcctgtggctctggatccttactccttccagtcgaagaacgggagaattcctaaggttaaaagccatagtatcccagagggagggttctggaggaactttgagctgtctagattacccgatgaaaacttgttcttttatcaacggccacttccggagctcgcgcaggggccgctcactagaccactgctccctgcccgtgtgccccagttcagaattcacactcagcatttttgtttccatagtggtgccaccgaacatcgcagaactgaagaatttggaggtgctcaacttttttaataaccaaatcgaggagctgcccacacagatcagtagccttcagaaactcaaacacctgaaccttggtgctttcattgtatacagaggaagccaagccttttcaaaggggctaagggcctggctcctggtcacccctgaggttagcggccaagctgggaagatggttctgggtctgaaggctccttcagaccccattgttatgtaccggggagccaaggtgaaggttatggtccctgaccttacctattggggcaaggctggttataaacaggaacagaccaatgaggtcacagatatgctggcggttgtggaccaacagggggaacagcaagaccggggagcactttacattggcttctctgaggaggtgacatgtcaggtgagggcccatgacagggagtccttagctgtgtgggttcagcttcacctgaggaaggaagagcagcaggaacagggctgtggacaggagtcctcctgggatgaaggaagtgcagctagcagtgaggtgtgggcagcctgggaaggaggcacaggccagagcagctggggcttgcagactgtgggagggagctggaattttactttaggtgcaatggggatctgccgaagcattttagacagagcaggagcatcacctcattggagtttgcagacatgcaggcagttcagtggagaacactatggctgctccggaattaggcctattaagaagatgtttcagtgggaacaggtgaaggacgatggagatcacctggagatggagccctctgggatatattttgaaggtagattggagtagttgtggagtgaagagagagagagaggaatcagagatgactaaagttgtaggcttgaaacattgaggt

SEQ ID NO: 467481 - DNA, 838 bp, Homo sapiens
tatcccagcagctcaggatgcaaggtggaaactactgctgggcaagatggcaacctgtctcaggacagactcaaacaaatacctacactcactcggactgggaccatatagacaagccaatgaccccattgtgacccagagcagagaagatgagcagcaaaaccaggagcttgtgagggcagaagtcggattacagggcacacagggctgcagcttcagagaaagcatcaaggagaaaaatccctgtcctcgtgggagaaatagcagggaaatgactgtgactgcgagcggtgagagtcgcacccatcatcattgtgtccccaggaagccctgggccatagattcactctggaagaccacaagccaggaattttctgctaaaaggacatcagcagaagcaggtataattgctctctggaggaccgaaccctcaacccattttgacactcaggaaaccacaatctgagattttattttaaaaacaggttacctcactagaatggattgggtcttccatgtggcctgaactgtggtaggcctcctttggccaaaattgaccaccctagatatcctgggaaaacacagaaaccagagacaactaggctcccaactggagtggattttcttaattccttgatttctagacttgccggtggcaactgtcattttacatgatcctttctttatccttgacctttgggagtttgattattaaatgccttaaggtagtcttctttgggttaaatctgcttggtgttctataaccttcttgtacttgaatcctgatatctttttctaggtttgagaagttctctgttattgtccctttgaataaaat

SEQ ID NO: 467482 - DNA, 614 bp, Homo sapiens
gtcgtgttctaacccccctgtctcgcgtggtaccagtgcccagctgcggaccaaggctggctttcctcctcgtgtttcctttacgcgatgtcaccaatcccccgtgcttgttctacttacacccctaagccggccccccacaccctcatgccaggattccaggcccagaacctacagctgccagaacaaaatgccttcaacagcaagtgtcaattctgctgtgacctgcacttcaggctgtccagcaatgacccgctcccctccaccaccccgactcatctctcagtaattccccaaacagagcttctagtgctgatagaaggggctgtctttctctcttgtaactatagtttgcttgctttccattttgcacctttgccctcgtttccgtattctatccttggaatattctttattttaccttctgtaaaagctacgagatgcactatctactcaagatctgtctctgttaaaatcatctttcctgacagtcatattgtttagattacgggctggaaccgtgtaggctctcagtgcctaagtggctaaaaagaaaagccctggccccagaaacaccaacaagtaacttatctctcttggcttgtgtaccctaa

SEQ ID NO: 467483 - DNA, 1671 bp, Homo sapiens
gtggtagtgaatacatctcatgagatctgatggtttgataaggggttccccttttcgcttcgttctcattcactcttgtcgccattttttgttcctgctccaatatccacatgtttttatcagcacaggcacagcaaaagcctctccgtcatggacggctcctcctaactgggaaagaaacagtgagaaagcgccagtgtaacactagatatgaacaccaaggtcatgaacaccagggacgtgaacaccaagaacatgaaaaccagggtcatgaacaccagggacatgaacaccaggaacatgaacaccaaggtcatgaacaccagggacatgaacaccagcgacatgaacaccagcgtcatgaagaccagcgacatgaacaccagggacatgaacaccaggaacatgaacaccaaggtcatgaacaccaggcacatgaacaccagggtcatgaacaccagggacatgaacaccagcgacatgaacaccagggacatgaacaccagcgtcatgaagaccagcgacatgaacaccagggacatgaacaccagcgacatgaacaccagggacatgaacaccagcgacatgaacaccagggacatgaacaccagcgtcatgaacaccagcgacatgaacaccagcgtcatgaacaccagggacatgaacaccagcgtcatgaacaccagggacatgaacaccaggaacatgaacaccaaggtcatgaacacgaggcacatgaacaccagggtcatgaacaccagggacatgaacaccagcgacatgaacaccagggacatgaacaccagcgtcatgaagaccagcgacatgaacaccagggacatgaacaccagcgtcatgaacaccagcgacatgaacaccagcgtcatgaacaccagggacatgaacaccagcgtcatgaacaccagcgacatgaacaccaacgttacgaacaccagcgtcacgaacaccagcgacatgaacaccagcgtcatgaacaccagggacatgaacaccagcgttacgaacaccagcgttacaaacgccagggtcctgaacaccattgtcatgaacaacagggacacaaacaccagggtcatgaacaccagcgtcatgaacaccagcgacatgaacaccagcgacatgaacaccagcgtcatgaacaccagggacatgaacaccagcgtcatgaacaccagcgacatgaacaccagcgacatgaacaccagcgtcacgaacaccagggacatgaacaccagcgtcatgaacaccagcgacatgaacaccaacgttacgaacaccagcgtcacgaacaccagggacatgaacaccagcgttacgaacgccagggtcctgaacaccattgtcatgaacaacagggacacaaacaccagggtcatgaacaccaagtatcatgagagacctaggagggatttttaccatatatattttactttcttttatttcttagtgccaagaccccccagaagcttcctttggttattaaaaaatactctatgcctacctagaattttatattctgaataaaatactagaaaaatataacttattgcttaaaaacacagattctgaagacagatatgagttagaattgagacttgcccactttctgtagaaccttgatcaagttattgtgcatccgttggtgagttg

SEQ ID NO: 467484 - DNA, 573 bp, Homo sapiens
tgctgagagtgagcgagggctgctagcacgttgtcatctctcaccatgacgatttacaaatgccatggcaacatcaggaagttaccctatagctgtcagagaagtgagggcacagggtacactgcggcccccaaaatcggagaaagagacaggacccagagaatcacaacttacccaagccgaaatctaccagcagaagcctctgcaggaacagagccaggatgggaaaacctgagctctccctggcaccattggggtggacctgttgattgggtccacagggatgggtctggagcctatagcctggcactatggcagacttgcagtctgaatccatggcggcaggcaggcctgggtcctgagtccatggaggctggcttggtgcctgtgtctgcaggagtggtcctgggatcttggtttgtcagggctggcttattactagagtttattgaagtaggactagaccctgggtctgccagaatacacctggaccctgggtcctctagagcctgaggccccaaggactggcctggagctagacagtggaatattatgtagcactgaaaagtaatg

SEQ ID NO: 467485 - DNA, 1068 bp, Homo sapiens
tccacaaccccaatttaccctctcccagaaacttgcaattgattcaaacttcagagacttaacacaaagcatgaggggtctctcagcatcgacacttgggccagctctatattcaaacttttccttgcattggaaaacagtcatccccagtggtcagacccacatctctgggtgtcagccatcttctcctagatctaagcttggaaaacagtttccagatttccttggtaggaggactatccattttcatgctgctaatatagacatacccaagactgggcaatttgcaaaaggaaaaggtttaattgaacttacagttccacatgactgggacagcctcacaatcatggcagaaggcaaggaggagcaagtcatgtcttacatggatgacagcaggcaaagagataatgaggaagatgcaaaagcagaaacccctgataaaaccatcagatctcatgagactcattcactaccacaagaacagtatgggggaaaccaccaccatgattcaattatctcccactgggtccctcccacaacatgtcagaatgacaggagtacaattcaagaactggaagttgccctggatgagtcagtgagtgagtggtgagtgaatgggaaggcctaaggtattatatatactaccatagactttataaacactgtaaacttaggctacactcaattgctaaacattttttaaaatttgagtcatccttagttttatgttacaactcttaaaaatgaaagtgaggacactattctatttttcttaatatttattttgaaatatgcatagattcacagaagttacaaagatagtacacaggtatctgagcacaatttatcctaatttttccaatgtttctatcttacctaattaaagtacaagatctaaactaggagtttagcatctgtgcaatgtgtgcagatccttatgctgcttctatttttctatactcaaaaacctgaaaatcctttttcagagtgagacactaaaaatcgaattggaatttacttgtgatgaacctagagaggtctttgttcattttcatcaagagacatatt

SEQ ID NO: 467486 - DNA, 888 bp, Homo sapiens
cgggtctttatttagaagtttggtgatgtttttgcaaccagaaatatgctagcaaaagaaattgttgacttacccggccagcagccctgtccgggaggtggggggcagcccccgcccggccagccgccctgtccgggaggtggggggcagcccctgcccggccgccaccccgtctgggaggtggggggtgcctctgcccggccgcccggtctgggaagtggggagcccctctgcccgaccgccaccccttctgggaggtggggggcccctctgcccggcagccccgactgggaggtggggagcccctctgcctggccgccaccccgtctggggggtgtacccaacagctcattgagaacgggccgtgatgatgatggcggttttgggtgttgaagggaaggtttcagatttaaattgtaaattggggaaagcctcactgagaagctgttactggagcaaagtcctaaagcatcagagagatgacagtgtgagccttgtggacatgtcagggaggaattttctaggaagaggtagcaagaacaccagtataaaggccttggggtgggagtgtggctgtggtgtttatgacagagctggtgatacaggagctagaaagaaattatttaggcagatagtgagggtaaaagagtccttggcaaggcttcccttctaccaaaaagcagtcctccagaatcatttcttttctaataaagagcagcctgaaaaatcaagctgcatagataagcaagctggaagcttgcacaggggaatgctggcagctgtgccaatagaaaagggctacctggggcccaggcatgtctaacatggaggctccatcttcccttttgctgttgtcatgtgcacagtaaaagaatgggcagtgtgaca

SEQ ID NO: 467487 - DNA, 666 bp, Homo sapiens
gaagcaggcaccatggcacccaccagcaccctgctgcagccaataagtatggacaccaccaagctcctgctgctgctgacacatgcaaaccaggatggatcccgctgccaactcactatgaaagatttggctgatgccacccatggaagtgtagtgactggcaatctgggagcccctcagctccctcagtgcagtggattcctaaccttgaggtgccagagaacaaagtcagggctcaatacgagtccccaagaaactcaccaagtggtgctgagaaaaagtggttgtataaaattggacacaaaagaaatccttgcctggtggtgcaggcttcaagaaagggagaaaagaccacagtggaaaaagcttaagcccacagccatttctgtatctcctatgaaacaagagtcttcattcactccaaaaatggcagaaaatcctctgacttatggagcaaagatattgccagaagcctgctctcaaagaagcatacaggagtgtggagaatctgaaaggagtggggtggggtagaaaaaagaaggatgaatgttttgtaatagcagaaagattttatatctttacattctccaatgaagtcatcacaaacaacagatgactattgataatttttcaatatggctagtgtgaatgaatttttaaatttca

SEQ ID NO: 467488 - DNA, 1201 bp, Homo sapiens
gcggcattagagaactcaagctggaggccattagtgcttctgtagtttgaaagtcacatgcaatagtgcaggagtgggaaaataagtcatgctcatatgtgctacaatgctcttatagaagatcaaaccagcctcaaccttcctttaagccaaaacctaacccagagcaagactctaactctctttaattctgtgaagggtgagagaggtgagaaagctgcaggagaaaagtttgaagctagcagatgctggttcatggggtttaaggaaagaagctgtctctgtaacataaaagggcaagatgaagcagcaagtgctgatggagacgctgcagcaagctatccagaagatcaagctaagatctttgatgaaggtggctactctaaacaacagattttcaatgccaaggaggctccttcctccttcccccttgtgaagatacagctagaaattgccatctatgaaatagaaagcaggctttcaccagacaccaaatcggtgggcaccttgaatttggatgtcccagacttcagaagtgtctttgttatggagaatgcctggggcataaccacagtgattattcttctcctcttctgcaagatccatgaaataaacattcttggatctttaccattagaacctggttgggtttctcaaaataaaacctatgaaagtgtggaatcttcctatgaccttgtcctgccaggagcttctccttcttatcagttaaccgtcgccctgcagtaattcatcaaaactatcatcttagtgttcctacccattcgtgggtgcaatgaaatctgtcccaggcaacttgtgtgactgttcatttggtggatttttcggagctccgattttctttctgccatttgataaattctctgtaaaagaggtataaacattttgacagtggctctgtgccagtgactctgtgccaatgactctgtgtgtaaatctgtctattttagaagtaaagtaatagaaatgcattgttactgtgcgtgtaagctacatacagccatacctcattttattgtactttgctttgttgtgcttcatagatgttgcatgttttacaaactgaagatttgtaggaaccctgcattgagcacatctgtgagcaccatgttttcaacagcatgttttcacttcatatcgctggtcccattttggtaattcttaccatatttcaaactttttc

SEQ ID NO: 467489 - DNA, 663 bp, Homo sapiens
ggcatagaaaaaatgtatttgccaactaaatggctgtatactgcttatctgaggccaaataaactacacagcaaagatgtcagatctggcacagtagttgtgcctgaagttatcatgaagaacgaaggtttgggtcactccactaggaaaacaacaaaaaacaaaaaaaaaaacaaaaacactcgacttgctgaggtgcttgctgaaggcaaagggaatagagaacgggtagtagaagaagatgatcaagccagcggcaacgttcctttcagtcaaagtccggtccagagcaaagccctaactctcttccattctatgaaggctgagagagaagacgattgccatcagaaggtttattactcacagttcctaagaggagagaacatgccacaccatggggggccacctgggggagcaccagggtgggtcaggaggcagagggagcggggatgctgcagacaagaacctttattgtgttttcagtgggaagaatcaggaaagggtgactttgaagatgtgatcaaggttgaggaccatgaaatgagagaagtcagccaagattattcaggtgaatttaatatgactacataaatcctcaaaagtaaagaacctatactaaccgcaaagagtaagaaagatgggagcacaggtggaaggagacac

SEQ ID NO: 467490 - DNA, 1029 bp, Homo sapiens
agaaaggggctcccacagtgcagcagcgggctgaagggctcctcaagtgccaccaaagtgggagcccaggcagaggaggcgttgagagcgagcgagagctgtgaggactgccagcacgctgtcacctctcaatatgatctaagtctcggttatgtctttaaagcagcatgagaacgaactaatacactccatgatgacttgccgctgcatgcgttactcttttcacactctagggaaggtgagattccagaatggctgcaaatgtgagcatttaatcatcagcaccaagacagatatactcaccacaatggacagtagaaccagagtgccaaacaaggttttaacccacaacgaaatatggtcacagttaacagactgtggtattcccatggtgagcagtgaccttgcaatttcctaccaagtatatgcaataaatatcccaattgttcctctaaagaatcatgttgctcttgccaaggcaactttttactggagaatgaaaaaatatgcagattttcaaaaggatgttaagtatggggttctagatgacttgatatttggagatttgaaaggctactatggttcaccagctagaatgggggtaaagatcaagtgataaatacaattctggttgaggtcattttacagacttgggtgaaatgtcccaccagacggtgtgatatttagtagcccagaaagctgccaaggggttgaatgacactatctgaagatatgaaccagtttgctctccatagggaggatttcatcaacaggaaacagatgcctggaaggcattggaaaatgaatattcaaagattgctgggcttagttcaagaaataaaacagcaacatattcttatgaaaagtttacatttttttctatttcataaacttagaaagttacttaaaaatatgagaaatactgttccatttaggttggtgcaaaagtaattacagttttgccattattgtcaatgggaaaagccccaattacttttgcaccaatctaatagctaaattgtcctaaga

SEQ ID NO: 467491 - DNA, 620 bp, Homo sapiens
ctgcagccagtgggatgaagcttccagaggaaggaacaggcagcaatctttgctgttctgcagcctctgacagtgatacccaggcaaacagggtctggagtggacctccagcaaactccagcacacttgcagcagaggggcctgttagaaggaatactaacaatcagaaaggaatagtatcaacatcaacaaaaaggatgtccactcaaagaccccagccgaaggtcaccgacttcaaagaccaaagaataaccagtatagagaagaacatatatgacctgatggagctgaaaaacacagcacgagaacttcgtgaagcatacacaagtatcaatagccgaatcaatcaagtggaagaaaggatatcagagattgaagatcaactcaatgaaataaagtgagaagacaagattagagaaaaaaagagggaaaagaaatgaacaaagcctccaagaaatatggtaatatgtgaaaagaccaaatgtacattgattggtatacctgaaagtaacggggaggatggaaccaagttggaaaacagtattcaggatattatccaggagaacttctccaacctagtaaggcaggccaacattcaattcggaaatacagagaacacc

SEQ ID NO: 467492 - DNA, 1562 bp, Homo sapiens
ggccgaataggaacagctccggtctacagctcccagcgtgagcgacgcagaagatgggtgatttctgcatttccatctgaggtaccaggttcatctcactagggagtgccagacagtgggtgcaggacagtgggtgcagcgcaccatgcgcgcgctgaagcaggatgaggcattgcctcactcgggaagcgcaaggggtcagggagttccctttcctagtcaaagaaaggggtgaaagacggcacctggaaaattgggtcactcccaccctaatactgcgcttttccaaagggcttaaaaaacggcacaccaggagattatatcccacacctggctcagagggtcctatgcccacagagtctcgatgattgccagcacagcagtctgagatcaagctgcaaggcgtcagcgaggctgggggaggggcgcccaccattgcccaggcttgcttaggtaaacaaagcagccgggaagctccaactgggtgcagcccaccacaactcaagtagacctgcctgcttctgtaggctccacctctaggggcagggcacagacaaacaaaaagacagcagtaacctctgcagacttaaatgtccctgtctgacagctttgaagagagcagtggttctcccagcacgcagctggagatctgagaacgggcagactacctcctcaagtgggtccctgacccttgacccctgagcagcctaactgggaggcaccttccagtaggggcagactgacacctcacacggccgggtactcctctgagacaaaacttccagaggaacgatcagacagcagcattcgcagttcacgaaaatccgctgttctgcagccaccgctgctgatacccaggaaaacagggtctggagtggatctctagcaaactccaacagacctgcagctgagggtcctgtctgttagaaggaaaactaacaaacagaaagcacatccacaccaaaaatccatctgtacatcaccatcatcaaagaccaaaagtagataaaaccacaaagatggggaaaaaacagaacagtaaaactggaaactctaaaaagcagagcgcctctcctcctccaaagcaactcagttcctcaccagcaacggaacaaagctggacggagaatgactttgacgagttgagagaaaaaggcttcagaagatcaaactactccgagctacaggaggaaattcaaaccaaaggcaaagaagatattatccaggaaaacttccccaacctaccaaggcaggccaacattcaaattcgggaaatacagagaacaccacaaagatactcctcaagaagaacaacctcaagacacataattgtcagattcaccaaggttgaaatgaaggaaaaaatgttaagggcagccagagagaaagaactgccttacagagctcctgaaggaagcactaaacctggaaaggaacaaccggtaccagccactgcaaaaacatgccaaatttaaagaccatggatgctatgaagaaattgcatcaattaacgggcaaaataaccagctaatgtcataatgacaggatcaaattcacacata

SEQ ID NO: 467493 - DNA, 985 bp, Homo sapiens
cactacacagtgggacctctaaggattgtgggagtaaggcaggaagttgctgtctgggtctttagcccctttgaaatgaagttaacactggaaggagagaatgctctggtaaacctgaatatcaatttgcagataattgacatctctcttttactgactcaatccataaacacagaaatattcaatccagctgcagaaactaaagaggaactgaatattaatcaccaagacaatggggaaaatgtctccagggcatgtcagagacctttgtgtaagccccttccatcacaggcccagaggcctaggagaaacaagcggttttatgggccaggcccagggtccccatgctgtgtgcagcctagggacttggtgccctgtgtcccagctgctccagctgtggctgaaagaggccattgtagagctcaagccatggcttcagagggtgcaaccctcaagccttgccatcttccatgtggtattgagcctgtgagtgtacagaagtcaagaattgaggtttgggaacctccacctacatttcagaagatgtatggaaatgtctggatgcccaggcagaagtttgctataggggcagggtcctcatggagaacctctgctacggcagtgcagaagggaaatgagggttgggagtccccacacagagtccctactggggcactgcctagtggagttgtgagaagagggccactgtcctccagacgccagaatggtagatctactgacagcttgcaccatgattgatgcctggtggcttatttagttcatttggtaaggtcatgttttcctaaacgctgttgatgctagtagacgttcttcagtgtctggatattgaagagttaggtatttattttagtcttcactgtctgggcttatttttgtatctgtccttcttgggctttctggatatttgaaaagacttgagtgttgtaaaaacttgagtgtctaagctgtatctgctttagggggt

SEQ ID NO: 467494 - DNA, 566 bp, Homo sapiens
ttttctgtttttgaaatatagatcatggaaccctcagatatttctcacttttgctatctcttctttccctcttttatgatgttcagaactctctccatgggctacttgagtccagggacattatttaatcatataggcttcctttcagtctacattgacaagggactgtcctgtggagcctgcagcagcagtccacctcctgcaaagggtctgtggattctctcagctttcctggtatgttcctgtgatagctcttggagcaaaagtttaagatgtgggtctccacatgctgctctgtctgtccgagtggagggagcactgactgcctgtgagtccctgctcaggctcttccttccctacatagacatctgtggtagaactgtgatttttgctcatctctttcggactcgtactcaaaactggctggctataacaagctgatagttgtgaagatgaggatgggggtggggagaaatccagcactatcatggaaacttagagctaggaggtgatatttttcccctttcagcctttgctatctgagtgaccttttccaggtctcttaa

SEQ ID NO: 467495 - DNA, 866 bp, Homo sapiens
gtcctagcttctggtggaggccatcaatccatggtgtttggcttatagaagcatcaccccagcctctgcctctccttaaaccacaagccagaaatgtctattagttccactagatcacagattccaaccccgggacacgatctagatctcaggatagaagacatggaacatttggtgcaagtgtatgaagaatcaactaaaagccccacagctattgctagaaaactagagaacacttttgaacattctcctgaaaccagagagatgcttccccagagggatggtcatggggtcatgggtacccccaacccccaccccactggtcatcaccctcaccccagcaactcctgtgcctcttctgagtatgcactgatgcttataggaaggtgccagagccagagaggaaacaatagacattttgatgccaaccagagccctcacttgcactccttgttgctaagatgtgtgggtgtcctgtgggaattgggcaaggatggatgaaattcagggcagctgtttttcttttctctgccatgcagttcccactataaattaagcctttttcaattttcttagtcttgagtttcaatggcattagcatcttcctcctccatgttcattatcatccctgacaaacgtttccagagaaaagtgtttcactgtggttcttgcaacattttctctaaaaataccttttgaggaaactgacactccaaaaggaataaagtttcatcatgaggtttgaaaggtcatatattcaaattgttgcaaggcctttaataaatagggcaaagaaagcattcagctttcaattatttaatttatgaatagcaggcatagctggaaggtagaacacttaaaaggat

SEQ ID NO: 467496 - DNA, 663 bp, Homo sapiens
cttctgcaggatgactaactgtggatagaagaggcagctttcgactgaggttgcattgtcaaagcctggcccctcttctgcatggctgctgcagtttgctggaggtccactccagaccctgtttgcctggtatcaccagcggatgctgcagaacagcaaagattgctgcctgctcattcttctggaagcttgtcccagaggggcaccagcctcatgccagttggagctctcctgtatgaggtagatgccctgcccagtgaagaggaatctagagaggcagtctggctgcagccgctttgtcgcgctgtgttgagttctgcccggcactttgatgaaatttctgtaggaaagaaaggggagaagagtgtatcaaacaacaaaccagaatgcagagagctgcagcccagaacacacagagaatgccaatggtacttttctattctgctgacaacccctccgagtctccaactggtgatcaagataaatggaggagtgcttatgggacacctgggatatatcgtctgcaccacacacatacaaagtgactggcagcagttcaaacctgtcccctgctgaagtctaaaatctcttcttcagtgaaaatgcatgatctgcctgaagggagccagtgttctgggtgttggtgcacagggtaaagccctt

SEQ ID NO: 467497 - DNA, 702 bp, Homo sapiens
cagccatgtagatttttggcttttctcctaacaagagaaagaaattgagtgatgaggtcaaggaagttttgtttgctttttaaactgggagaaataacagcatgttgctgcatttataggaatgacccagaagaaagagggaagatgatgcaggagagagatgggaaaattcctagagggatgtggacactgaaattactgaagccaagtactaaaagggatgagcaggaaagctggtgggagagttgtaaagtgcttgaagtcacagttttagaggggatgaagttttggggcaagatcgtggcttaccacgaaagtgaataccaatgtagggaaaaggacaagatcactaaagaaaaggttagtgaacgggtagcctgcccctccacacctgtgggtatttatagtcgggtgggacgagagactgagaaaagaaataagacacagagacaaagtatagagaaacaacagtgggcccaggggaccggcgctcagcataccaaggacctgcaccggcggcaccagcctctgaagacccagcacaatttgtaattacatattttcttgtgtatttgttcatgtcttacttagaatacaaattgcatgaaaatacagaatatgtctattttttactgctgtatcccttacgtcttggaacactcaataaatattgaatgaatgaaatgtataaatcaagaacta

SEQ ID NO: 467498 - DNA, 736 bp, Homo sapiens
tttattcctgaagctgggactaatctattaggaagggacttaatgttaaggctagtccgtggtcccaccccaccaaattgtaagccattacacggtaaccccttgttgctgattataaataatccccagacaaaggcccaagaaccctctatattcgaacggtctgggttaggagcagatgctgcaggacaggaccctgtaggaatcttctcgctgaggttagttaaaccactggttaacagtaataaaggaattcagacccagagtctgggagacacgtggaacccaacgctgtccccaagtatagcgagtccaacgtcctcctcccatctccaaaatgacccaaccggttgtggaagtagaaaacttaaggcaaacaatagctctagagacaggatatcaagatgcaaatgcttggctggaatggattaaatattccatccgcactttaaacaaaagtgaatgttacgcttatgtagttctatttgtttgtttttgcattatcccctaagcacttccacaagtggggtttgccattatcttaagatgccagagcttgagactcagacataggtgttcctttggctcattccctttaacagttaattgttttaggacatctctgctagtcccgtgtattattcttgggcatagcagctgagattatgtactcgtatttaaatgttaagtgatttataatcttcaaaaggaagatggaagccttcatttcagaaat

SEQ ID NO: 467499 - DNA, 577 bp, Homo sapiens
gcataatctcacttataggtagaatctgaaatagtcgaactcatagagtcagggagtagaatggtggttgggagtgagccacaggccctcatcaccacctcacgggggatgcgactccgccggggagggtgtgagtgtagggggtcaagacagccttcccctgggctggcctgggtgcttaccgtgtccaccttttatcgtgaatgcactgagttttcatcccctcctgctcataggacttctccaaagtgggaacaacgcaaaccactcggtttctgctcaggaaactacaatcactgctgcttctccttgaggctgtacgcagggcaccttggggagagtttggcggtttgcatattctctgatcaaatttgcctggttcgttcccacatggcctgccttcagcactggcagctccctctgcatggagagttcttcacgtgtttaggtctgtctcattctgcagatttgctcaaatgtcctttcttcagataaacctttcttcttctaaatgcgaatatactttagtcatttttgtttatagtggaaactctggaaattcacaattaacaccttt

SEQ ID NO: 467500 - DNA, 670 bp, Homo sapiens
agaactaaaatggttgggagccttagacatgaggatattattgaaatccagggcatttcttctaatccctccctcccacctccacatttcacaattgccagagccacaggtccctggagcacttgattgtccccgtgtgagcagccagtaccgcgcaggagagaactttggcaggaacaccgtgcacatctgcagcacagcaggaaggttaccagcttggctgaggctggggttcagccatctagagaaatgtgaaggggaactagccttgcctcttccctcccagggcctcagagaaattgccgcagccaccccagccctcagcaactacctcactaatgagtcagcagccatcaacatggaggactgtgtggaggtggaatttgaccctggagttgattcagtggagaacattgggatccctctgaacatgaactcatcaagaagggagatgacatcatggcgcatatgcctcgcttcaagccaaagcaccactgtgggagagatgcctgagccctaaagtaagtgggtctaactgggctgtatatttatggtctcctgcaacctagcagcaaatctgacactctcagttaccagaccctcagtagttattctgaatgcatgaatgtgttgagtgtgtctctgtgggacacagaaaagaccaggcacc

SEQ ID NO: 467501 - DNA, 1364 bp, Homo sapiens
tccaggtgaagtccaggagactggagtcgaaggccgtgagtcagccatgatggcagctgaagaaattaatgactctccagtagaaattcacgattatttgtcagcatttgcgaattccattgatgctgtggatgagatgctgaagaacatgatgtctgtttctagaaatgagttgttgcagaagttggacccacttgaacaagcaaaagacactggagtcgaaggccgtgagtcagccatgatggcagctgaagaaattaatgaggactatccagtagaaattcacgattatttgtcagcatttgcgaattccattgatgctgtggatgagatgctgaagaacatgatgtctgtttctagaaatgagttgttgcagaagttggacccacttgaacaagcaaaagtggatttggtttctgcatacacattaaattcaatgttttgggtttatttggcaactcaaggagtgaatcctaaggaacatccagtaaagcaggaattggaaagaatcagagtatatatgaacagagtcaaggaaataacagacaagaaaaaggctggcaagctggacagaggtgcagcttcaagatttgtaagaaatgccctctgggaaccaaaaccgaaaaatacatccaaagagactggagtcaaaggccgtgcttcagccataagggcagctgaagaaattaatgaggactatccagtagaaattcacgattatttgtcagcatttgcgaattccattgatgctgtggatgagatgctgaagaacatgatgtctgtttctagaaatgagttgttgcagaagttggacccacttgaacaagcaaaagtggatttggtttctgcatacatattaaattcaatgttttgggcttatttggcaactcaaggagtgaatcctaaggaacattcagtaaagcaggaattggaaagaatcagagtatatatgaacagagtcaaggaaatagcagacaagaaaaaggctggcaagctggacagaggtgcagcttcaagatttgtaagaaatgccctctgggaaccaaaaccgaaaaatgcatccaaaatgcacctcggtcccacactcagtgcaagacgaagcgtcttcggaaatcagcgtttatggttgtgttttgctaccacggcacagctcagtgaagccttctgtgctttgctcaggttcaagctgtgcctctgcttgttctccaggcggctctccctggaagtcaaaatgtctatggggatcgtgggaactcctgtagctaggatcacaggggtccatggagggaatgtgatgtctgaagttccttcatcaccacctccttagatctggtccagagctttgtaaatttcctggaaaatat

SEQ ID NO: 467502 - DNA, 784 bp, Homo sapiens
acttgtaccggccaccgcagcggctgcggacctcccagtcgtcatggcgactgtgaaatgtggggtggagggcgtgcagtcaaaccatttcgcccgggcagtccctgcatgtcccccaacgtgctctccagcggcgcgcagcaccccagcctccgcgcgtccccgagcgtgcagccttcctccccaagcccgcacgtgcagttcccacattgcgcgcagctccacctacagccccccacactctcccagccccactggcgcagaacccatcaccgctcgcccttcatgcgcttcactgggcatgcagccccgggagcacgcagctccacgcagcctctccgcatgctccccagcgcctgcggcctcctcttaacaacttttgccaggaccatacatacctgcccgtgggctgagtggattggcaatgacaatgattcctccccagtaagagtgggatgttaatagtacctcctttggcttgatatgaaaattcaataagttgatatatgcagaacatcttagaacagcgactaccttagagtaaatcttcagtaagtataaactaattatactatgtttttggcactgaagccacgtcgcagggaataactagtgcaagctgactccaagcacatccaggaatgcacttactgataagatattgaggcaagctgtaccagcagctgctggggatgtgctcagtggatggtacccaagcccctgcatttatctctttgtgatagtttaagcccctgcacctggaactgtttatatttctgtaact

SEQ ID NO: 467503 - DNA, 526 bp, Homo sapiens
tcagactttatcatcacaaccaaaagtcacatgctgatgagaggctccaaacaacacctggagcccatgccccagcaacttccagatgttgagttgggacagggaacaggcttgtctgctccaaatgaataccctggccagaaagagcatattcttgatcagaaaggagggaagaagtgcgtaggcatggggaggaggggcagggaagaagtcacaggaatgcccacagcagaggtctgtggagatgctgggctatccctggtggcaacactcttggggctggcgctgggtgaggatggcctccaaagcaccctatgctgtgactccagcccccaggatcctcctcagggtacagagaaggagctcaggtgtgttgtgtgcatacatgctcatatgtgtaatgagttagtgtgcatgtacctatgtgtgtattgagcatgtgtgtaattctatgtgtttgtgggtgcacatatatgtgtatttgtgtgtgcttaggtcagggtgactaaccaggacatccagagaa

SEQ ID NO: 467504 - DNA, 617 bp, Homo sapiens
gctgagaaagcttcacgttatgcttagtgtacaggagaaatgctcatgggaatcctgtccattatcacagagcaggtcgtgaaggtgttgattgtcctgaccccacagtttctgtcccgtgacaaggaccagctgaccaaggagctgcagaagcatgtaaagtcagtgacagtctcatgcaagtccccaaggaagatggagtttgtcccggagctgccgaaaactgtcactggaaagattaaacaagagggaccaccagggggccaccagaggctcagaaaagcaggagcagaaaaggccctgccgggggatgagagaagcacatgctgtccccttctcagccacccctggaggtcagcactggagaggcctctctgtgactgccaacttccgaggtgcacaaacccagaaactcacagggagataaacagataccgcaagcacagagacacagaggcacagaaccgccccagcttcacctgggcactcaggagtatggcccacggacaggcacataaacacacacaccaggaggacacagatacacacacagaaccatgagacacagccccacagggctgactctacacacagtggacacccacgtgtgtgcacac

SEQ ID NO: 467505 - DNA, 609 bp, Homo sapiens
gccagttggaatcgaagcctcttaaaatggcagatgatttggacttcgagacaggagatgcaggggcctcagccaccttcccaatgcagtgctcagcattacgtaagaatggctttgtggtgctcaaaggctggccatgtaagatcgtggagatgtctgcttcgaagactggcaagcacggccacgccaaggtccatctggttggtattgacatctttactgggaagaaatatgaagatatctgcccgtcaactcataatatggatgtccccaacatcaaaaggaatgacttccagctgattggcatccaggatgggtacctatcactgctccaggacagcggggaggtaccagaggaccttcgtctccctgagggagaccttggcaaggagattgagcagaagtacgactgtggagaagagatcctgatcacgctgctccctttaccctgagcaccacccaacagactggggaccagccccctcgcctgcctgtgtctctccccaaacccctttagatggggagggaagaagaggagaggggaggggacctgccccctcctcaggcatctgggaagggcctgcccccatgggctttacccttccctgc

SEQ ID NO: 467506 - DNA, 921 bp, Homo sapiens
ccttctggggacttgtgaccgcatgacattagaggcaggggcaggagtaagtcatttcttctggcttccctggcaaccacacagcctcacaggggtccaccccagggccagtgctgacggctgggccttcggaaaggctagtgtgaccaaggcaaggctgtgactcaagctacagctcaggcccctgctgcttggctgggtctagaaccttcccagctctggccctgctccctctctatgggctggcccagctgccaaagcttcccagttccaggttggagatttgcatgcagggacagacccccctgaggctgaagcagggcacacatttgctccttccccaggattgctcactcctgcagcccccccagccagggcttgcttgctggacttggtcccctggcactggaatcgtagccttggttgtgaccctgatcagggaggcaggctccagggccacagcaggccaaccctggccacttcccagtctttcccatccttcgggggggcaggccgtcagtgggacgttatattgccaggaagttcggcatctggcctatgccagtccacctgccctggggaagtgcccacccatgctgcgctttgctgtcctctcagcccctggtgcagggagggcaggagaagagccagaatgcagagctccttccctggcggagctggagacagatgggcactgggaaggtgagatactcacacaagaaagttcagagtgctgtggcgtgggtgcagctcaggcggggatgggcagcactcatgtggatgcgacgtatatggggtcctttgtgatacagcccagtggtggtaccgcggtctagggtggacagacaactgacagcaagttctgctgaattcttgggggagacagtgtctggagcagtggtctctgcaaggccacagctt

SEQ ID NO: 467507 - DNA, 4024 bp, Homo sapiens
ggctaggctaagctatgtaagatgttcagcaggttgaggattgacatcatgttttgccagaagtcaatgaaacgccctagtagaacagaacagtttaattccctcctcagatacaaggctgagaaagttcaaacaggcttccgcccgtgcctgctgtcccaatcggcctgcaagatgcccatattggaggcctgctggactgagcccttaatcaactgtccaccctcagaggatggcaggagtctcatgcttgcatttctgaattctctgggaaagccccaggcagccaccattgcagacctgctctcagtgattagggagcatacaccctctgctcacagtaacccactgactgctccccaaccctactggctgacatatcccaccctcaactactatctcttcactctgtctctttcctctttcagggtcacaacccttttcttaaagggccagacagtaactactttagaatttgcaagccacacgttctttgttgcaactactcaactctacccttttgacacaaaggcagccatagatatcacatggacagtgggcatgagctggagtttgaaaaaaatgttccctatcgattaagcacgttttgtgttaaatatatttctaggcattttatctttttaaatttttactgatgatgggatctttgattttctaattggttattgttttatataggaaagctagtgatttttatatgaattaattcttactagattcttaatgttttaacagtttttaaaaactggggtttcctcctgtgttttagaagtatacaatcagatgattaataaatgataattttgcatcctcattgcaatattgaaacttctcatttgttttctcatcttgcattggttagtaggtgggaaacaacatttaataatatttgttacaatgggtattactgccgcaataatgctgcataataatcatcaaagttcagagttcaaagcaatcatttatcctcatttaagtgtctgcaggtcgactgagggttgactgatgcaggttggcctcggctgggcttggttccaagctgcaggttgggtccaggtctgctccatgcattcctcagcaccctcggaccgtcttgcaacctctagcctctacttttcatggtaaggatggaaatgtaagagtagtaaatgggaacagaggatgcttctcaaatcttagactcaaaattggcactctcatttataccactttccaccacaatccacatggccaaattcaacatcagggggattggaggaatactctgtctttaggaagagaaactgcaaaatcacatggcaaatgacacagatacagcagggtgaagacttgcacaatgatgtaagggacaccattgggcaccctttacttgtccctgactgatgggaatgattctactgatatgtcattagaaatgatcctgggttttagcttgagttgtgatatctcaatccataagatcctattttgttaaaagttcttaaatcatgaaacaaagttggatttttgtcaacttatcttttagtatatatagagaattgtatggttttcttattgatattttaataccatgagttatattgattccttcattaaaaaaccatccttgcattatttaaataaaccccacatggtgttagcatatacccttttaaaatatatgttctgcttgctaatattttatttaaaaattttgcatttatgctgtcttaaagatcatactatagtcttttgtctcacccttttggcttttgtttttactgttttgttggattcttagatttaagttctcttctccctctctacaatattcaggagcagtttaaatagcattgagttatctgcttcttgaaattctgatggatttttacctgtaaagctttctacaagtagtgctttaatggatagtggctttttgacaacactctcaatttcttctctggtaattggactctttagatttcctatcttttctaaggctagttttcaccatttatgttttttcttgaaaatcacccattttgtccatgtgttcaaatttattttcaaagcattgagctcagtaatctattacaattcttttaatttcctctatacggggtaatttccccattctcatttctagttatgcatatttgtgcttattttcttgattagtttagctagtggtttttctattttccaaacccattctctgcttctcagaaacttgctccatgctttatcctctctgtgtcctgttcttttcaagtgtttccccttcatctttcctaatagctcataatcattctccagcttcttctatctcaaaggcctccaagtccaagttgccccctctagcagatgactgatagctttattttccaaggcttcctgggagtgctttcctgatgtccataccgtagagtatttcctgagtgttttccagagtaatttcatagaattactcctcaatgacaacatctacttttgtcttcatgactccaattaaactgctctagttgaggtcatctgtgatcttcctcacagccaaagtcatgggcattcacatctagttacttttcctgattttctgtgacatttgccaatactgactattctctccttcttgaaattcactctgccttgtttcctgattttccctactgggccacagatgatttattaaaaggttgcctggaccagagtccttaagggaattaagaagttggggagtaatgaccacatcaagtgttgtcagagcataattactgaaaagcatttttgactgaattttagatgagcattttgacaaaatataatattggaaacaatctttatcaaacattcatgtgtagtgtgagagataaagcccggaatccataattcatacggcgtgtgtattaccaagtgtgcatgagaggctgaatttcaatgaggctgcctgaacaatattttctgccagacgtgggctttcatcatttacattattcactaggttttccagaacagtaaatcttaaatatatatttgtgttgggaagagcttgtgtgcatgtctgtatacacacagagggacgcacacccgtttgggcacagaattggcggatacatgttccagctggaggggcaggcagtgacagcagggagcctcagcgtggcggatgcccagggctccttctggaggacggcccacgtcaccacggactccacagctcactgcacaggcattaaatccgcccaccctgtggtctccatcttcagacccacccagcacctcaagtggagtcctaaaataaaataggaccgagtgcgggcattgctccggatgctgaagagcagagctcctccaagttcaccctctgcaccgttcaggcggtcattgtaccgagtctccaagggctaacgttggaagggacgcttataaagattgttgaattttgtctcattgtgatatgagttggacagctcgtggaatagcctctgcttgtatacagtagagacaggagcacagggcctccggcattttccccactccatctctggagggtcacactgctcagaggtcttccttggaggtgagattgagcttcttctcatgatcactcactgttgctgtgccggtccgtgaggtcccgcagcacaagtctgcttcctggagcacaggcccatccttcagatctccgagtgtggcatcgcattgtgggatcatccttttccaggcctttgttccttcagcctttcctcacatcgcttttgtagtggatgctggggtgcactgcccagataccctctggggaccgaggagctcattctgctgcccagagtgtgggccgctgctggcttgaggctgagtccctcctcaggagttcccctgagcagggggcactggctcccccaaggtcttgcccctccccacatgtaggggaggaggacacagcccaattgaatgactggtagacacattctctgaaaagtcattcccagctctagagcccctggggcttggctgaggcctgtgctgc

SEQ ID NO: 467508 - DNA, 819 bp, Homo sapiens
agtctccgagcagcaggaaggcttgaaactcctctcttattctggcacatcctctgccgcatccctgaaacttggccatcggcactggtgctgccttccggggctgtgcagagccagtctgccatttgtcagagattggagagcaatgttatgtccccaagtcttctcttttgcagaggtcaaggtgtctgagatgcaggactgccaggtgggagtagcctgggtccccaagtcaccacttgtggaaggaccatgcacaaccactgccaggccttcctcacacaatgacaggagccaggtgcagctctgttgggttacaccgctgagatttgggggtttctcgatggcattgtctaccctctccttagggcccaggcctcatccttgtctgttattttttaactcacaaattcttaaagaagatacagaccccggagacataggcttcaaaggtgcttgtcacttgctgtcgggacttgccctcacctctcctgggcttgctcagccacagtggcctctaatgggcagagtcaagggtgcttctcggcttgcggtccctctggttcttcctgagctttaggactccatagccttagtttcttgaactctgtcctcttctaatcctcttctctttcctctggatcacattctcctatagccttacccatcgaaaggcatggacttagggtcaggcatccctgatctctcctgaacaaattgtacaatcctttaactgaggcatgggctgtccatctcctcagggcaccaagagctggggctcagggctattgccaagggtaacgagatcattctcatacc

SEQ ID NO: 467509 - DNA, 584 bp, Homo sapiens
catgtggctggcagggccagcttcgggccctacgcccatctgacttcaaagctagggctttgcccagagcctcacacacctcccgatgacctggcagggctctcacaggccgctggctgacaccaacaccatgcggcagtgcaggcccaagcagcagcacccagggacactcaggacagggcttcctgagttatttctgtcttggggaccctccttggaggacaaacctttggtggcccaaccctgctacgaagtggaccatgggcagtgtctacagcacctaaaagcccctggcagtgggcagggtgtgccgataattgatcagaaagagcagggacccagagaggagccccagttggcagagctactgccttgcatcagggacttgcctctgatcttggatcacgtgcacaaaggttctgcgggcgctggcagccacgtttgccagacccttaaacctgcctcctccattctgcctctcgggcctcgggcctctctcctgaacagggctggggtgacctggtccagccccagcattcaggtgcaggaaggccagatacctgccacatgcagcgagtgaggcc

SEQ ID NO: 467510 - DNA, 629 bp, Homo sapiens
cctcctgaggcttttccatgctccgcccctgcccccttcccacccatgaatcctgatagcatgttcttcgtgctttccttacacctctcatttacctgctcttccctgctgctgaactctggctggagtgctggggcctcccatgccaagcctggcactgacagcaggcgccatggagggcagacgactagctgggggatgaaaacctccattcacgacaatatcaaatccctggctccagagagggagacaggtttgctcccagttggagacatcgcggtgtatcctgtaaagcgggtacaaaggaatcatagactatcagtggtgagggccttgagcaattttttcattctgttttcaacttttgagggtaacccccgtaaagaagaggaaagggaagcacaaaaactggccaaggtcacatctctagaaggcttctgattgtctgcaaagaagtcacaaagaaatgagtcgaggtgagggccagggcaatagaggggcaggtttggaagccatttgtacattatgagacctgaatagaagttttggagtcaaaataaataagtaagcagctgatttccctggaggagactcaagccaccttttattatttcattggctcaggagcc

SEQ ID NO: 467511 - DNA, 5026 bp, Homo sapiens
gtgggtcccatcacccagtgttccaacagagccctgagttcacagagctgggaatgccagagatgagtggtcagacagaagtatgaggagcagtctggcagacagacggccctcacagcagaggagctcacagcctgcagagccatgaggattggagccagggtcctccatgagggccaggtcagcctcccatcccacatccagcctacagaggtggagccagcccacatcctaatggggctggaggacgcaggcctgctgaaagcaggaaacaacaaacccattgcaaagaagagcccacatctgctcctttggcgcaagaagctcagccttctaacagggtcccctcctcagcaatgtcccaggctcaccctgcgtgagcagcttaagcagcttacagctaatcctgtgccggctctcaggcaccttcccaaacaccgtggtggccagcaccaggtgggcagagctaggcttctgcacgaggactctaacatctttctcagaccttctcggggccaccattggcctctgtacagccccgagcctgctgcatcaggccccagagcattctcaacccctttccagcaagctggagtgcagggctggcaacattctccccaagatggcctccctggctctcaggcccaaattgattaatcatcacttgattccagctatcagctctgctgcaattggcatatttatttctaatcagctcttaaaaatggcatcattcaaaagtgcttaaccacattacttaattctcagcctgtattgctattgatttcaaatattctcctcaagatatggctcatcattcaatgcagaagtctgtttatataataatcttatctggttactaaaatctgtgaaatctcttcaattgcttctaatgcaagatcggaggctggttgctaaatgagtcaattttactttaatttggtttatttacagtacatgttttaatgttccgcattcccgtctttcgcagcaatgctgagaataaaggcaaacaggatgtgagaggagcgggaaccccagggtactgtctgcatctccccttcaccaaggcagatctaagcagcccccctgcatgcaggagaggctcagcctgccccctgatgctgcagctctctcttggtcagataacctcctctagctcatttgagaattttcatgctctcagtttgaaagttaagagtgactgcatgtgacccacttgcctgcaaggggagcctcttcccgtcactgtgcaggctccaccccagcccctttctcgtcccctccccacccaagccttgaaggaggagggaggaggactgtgtcttgttccctacacaatttacaacagcatcatcacattccgcagtgaataaaggatgcgcagtgggacctgctattcccttccagtttcttctcatccttcagttattggtgaaacccttagcccagtgtggctaaagaaactcttccccttcccccttcccccttcctccttccccctttcctcttcccccttccctattccccctcccctcccttcccttcccctccccttcctttcctttcccttcccttctctctccatcatttcctccctccctatttcctttcttccttctctccctccttccttcctcccatcttccttccccctccttcatccctccctcattccttcctttcatccctcctttcctgcttccttccctccttttcctgtctcctcctccctccctttccttccttccttcctccctttccttccttccttccttccttccttcctccctccctccctccctccttccttccttccttccttccttccttccttctttccttacttcatccctcactcccttccaccttccctctttccctccttcctatggggcttcttagatgctgtatcctagggaagatactgaggatgcaaaacgaggtccaggaaggaagccaactagaattcagatcattacccaaccacatgagggctcctaggcattaagggagctcagaaaaggggcctcaccccacaccgggacatgagggtcagttctgcagggaggcgatgccaggctcctccttcctgctggctgagcacctgtcatgttccagatgccatgctggggccctggcatggagtggtgagggcaggtcagacccctccctgcagggacctttctgcctgggggcttgcctggatctgcttggtcccagttggctgtctccactcacattgtacaggctcttggagcctcccctctgggcccctggcctctcttacccttcctggtctgggctgggccatctcatcttcttcagtggtcttctttactaatgggagaaggcactcattgtctgttcctatcattgctcagaattcagagtgaagagttcagtcttcaccttccgcatttcttgtgttctgctgagagtgtggagccaagaaggactgtgagcctgcccctgcacgtgccttgcagagggtctgtcctcagtgacccactgccaagacagccctgcagggatcctctctgttcctctcagagccacctctgtgtcctgccatatttcaagggcagttggggacccactttgaagaggaagagtaacttctgggttgagtccaagggaaacattttctccactgtacagaggtcttccctgcagctgtccctgtgcacacctttgttaaagtgccctgaactgggtggcactggggttctaaatcatatgagctcagctgagctcagcatgccattagtgcaacacagaagggaaatcaacgaacctactattcaaataaaattcaggtgtggggtggtttaaataatacaagcaacatggccactgttcttagcataggtatttgatcttttaaaataagaccttattattcgaaaccaaatttcaatgaaaaaaaacctgaaaaattaccaatttcgtgattatcagcttccatgttgttcaaatagaaagacaggatcaaaattaaaacttgggtttcagaccccaagaggcagtgtctggtatgtgaagggccaatattatccactgtgaatttgttgtgtgaccctgagcaagtcagcccaccttctgccccagtctccttgtgtacaaaataggggtgatgtcacctgcattgtgaggtgtggcaaaggaagtaagaaaagtgagggagtgtggtttttacatggtgtcatttgatcccttgtttgtttgttttctttatttttagcctttttcgaaccactcagtattggagactccaatgaaagtgaatgttgcccagatatgaggggtcacttccttttgcctctaactcatagggagacccaattttgaagaactgagaaatgatgacccctataaggagttcaaagggaagcagaggaagtttctatacttcaggctcaagatttcgacgcctcctacattcaaggctaagtgcaatttttgagggtcccagagcgtgttccctggtttagaattaaagaaacaataggtaggtttgccttcaaaagccaaccctggcttctgtagcctcctcactccatccggagccattgctttgaattatacatgaggcacttgtgggagctgtgatgctttttcaaatatttctctaattgatgagtgggcctttgataaattgctgtagaaccaagagcatctgatcacaagaaattctgtcttgttcctccttgacagatgtttgtttgacttaaagggggtgcaagatccaaggaactacttctccctcctggaactttcattgtaaacagaaaattctatggttttgtttttaaagccaaacaaagacagttctctgagatctgaagtctggtgcctgccctcattcagatgaagaacttggggacagagagctgaagtgcaaggtcttatccaccctgaattcttgctttatcccccatgtcttcctccctgctgcttaagggtactttctaaacctcagctccatggagagagacaaaatatttaataaccaggatatccaggcaccaactagccagaacatcagaacgaacaccagccacaggccaacaccagggcttgctgggtcaggcactaacctttacttgctgggaccccaggtcggggaaccacagtgctgaaatgtgtgaggaagatgggcagtgactcagaggcgcttgaacagtgtctttttcctaattggtatggaaatatttcaatattttcaaaattagtatgcctatcccagtatagtttttgatgaactccctactgtcctcccatcccccaaagaatacatccaaatatgtacatgacatttaaaatcctccaactccctccaaactgtctctcccacgtcttctccctcagtttcttcccatgcccatacccctgagttcagccacataggtctcctattcattatctgtacaagtcagaagcttccatgaagtcttgcctgaccccactctaattttggcccctgcctccagcacttcatcaccacttccttcatattgtcacaacattgtcacaaatgtttaatctagtgtttaatatatttcattgtgatttttctaatctgtgttagataataacctatgtaggacactggcctaataaattagatttattgggctctcattcccacctgttactgcaggaccatcaggccaccttccctccaatacttccctagtaatttctgaagtcatcagagtatagctcatgtgcagtcaccaaaaacatttattggagaggaatctcctttctctgacccctgcttccatgcagagggacctccgctagcataataagcttatcatctcttcatcttatgagtgagtgagaaggaactgggcatgcagggaatctccttttacttcccttttcttctgctgccttgacatctgctatatacagagagcacattttctcctccaagcaacatgacctgcagaggctggcttgtataaggaggactgtatttttcaggactgctatgattaggtgaataagcacaatt

SEQ ID NO: 467512 - DNA, 1319 bp, Homo sapiens
gggtatgatgatatcaagggtgaatggcccttccccaggaccacctccatgggagccacttcctccatcgcgtctaacctctgttatctttgcacacatgagaacagaattgcacccccaggaaggaacagccgggagattcaaatccagatcttgtcatccaaggtctggttccaagtctgcccctcagaacctgagcctcctggttgctcctccaaattatctcatcacagcgaattccacctgttcaattccacctgttctgaggaaatacccaggcaaaagggacagcagtgtcattagcagaaataagcaacagtggatgtggttgagcttggcccgttcttctgaaggcactggaaacagtggctgtgctgagaggcttccgtggagcttctgggacaaggattcctgtggaaagggacaagatgggaaggactggcaaaagatagaactaatgcagctgtcacagactggcggagacgactgctggttttgtttgtgtgtgtgcgcgctcatgcataacaacacctcagtcaacgacggaccacatacacaactgtttccataagattacaatgcagctggaaaacttctatggtctagggacatcctagccattgtaacatcatagcacaaggcattactcaggtgtttgtgctgatgctgatgtaaacaaacctagtgctctgccagtcatatcagagtacagatcatacagttatgtacagtacataatacttcatagtgataataagtgactacgttactggtttatgtatttactatactatacttttaattattttagattatatatatatattttatatatatatatatatatgcaagttaactgtgaaagagcctcaggcatgtccttcaggtattctgaatgaaagtattgctatcataaaagatgacagctccatgagtattactgccctgaaacccttccagtgggacaagacgtggcagtggaagacagtgacatggatgatcctgaccctctgtagacctaggctaatgtgtgtatttgtgtcttagttgttaacaaaaacttttaaaaagtaaaaaaccaataataataaaatttttttaaattaaaaaagcttatagagtaaggatataaagaaagaatacttttgtacagctgaacaatgtttgagttttgagctaagtgttattacagaagagtcaaaaagttttgaaaaggttatatagtaaaaaagttacaataagctaaggttaatttattattacagaaagaaaattttaaaataaattaaaataaatgtatttaaataaatttttaaaaa

SEQ ID NO: 467513 - DNA, 876 bp, Homo sapiens
aggtgtccggctggggtataaggtcagcgtccttttgctcctattttatggagaccacagtcataaatttagggatgcagggctgggagatgcagtgtgggaacagttcccgtgaagacaactctgagatctgggtggacccaggatcctttgtgtggtcagggttctgcagctctaaagaatgcttaggagagagagatgccggaaacgacaggctctgtgtacccctgtggaccagccagattcttgagcagattttcctgatctgtttaccaggaaaatggtatacccagcagtttcggcaattccagagtccttggtggcctggcagtaatggtgtctctccagtcacccagatgtccctatacagctctctacatcagggtttggccatgggccaaatccagccaccacctgtttttgtaaataaaagtgtattggcacaaacctgcatatttgtttatgtaatgtctagggctccttttgtgctacagcggcactgttgagtagttgtaagagagtctgaatggcctgcaaagcctaaaatgcttactatctggtcctttacagaaaaagtttgccaactcctgctctagattgatggttacaaagtctgacagaggatacagttacagggacatggcaaagccagaaaaacgaggaccgggagtccagctttcaacaaagccaatctattcaatctccagactaccctttgtaccaaggttagatccatccttcctttcccattaaaatatcttaacttttatgaaataaacgggatagtagacttgtagttttatttttaatgtccttactccaccagttaaaaagttggccactctatgtagagccccaaaataatttgaaaatgtt

SEQ ID NO: 467514 - DNA, 757 bp, Homo sapiens
agctgagaacaattgcccactctgaacctgaaagccggtggaggcccgctctaatgagtgtgcagctttcgctgccctcagaaatcaggcgctggctctgggcactcggcagccagatgattgaaagcccaattagagttaattcactttacgttatatatgggaggcacataatcttttcaaggcaaagtgcttttaaatgccttcacctggccctggtgatcccatcagtgatgcataaattgcatctggtcagtgattaccccatgctgcactggggcatctgtgcagtgaggggtccctggctgctaagggctccctgtcccattggatcctcactacaaccctgccaggtggctgggctgtgtgtcaccaagcacatgggcaacacagcttactgtaagggaaatgagggccaaatgggtcagtcatcgagaagcctctgcaggtggggctgtggcaatatccataccgagtctaattaaagggaagcaaaatcttccatgcggatatgactaacaaaaatgtcggccaccagtgttttacaaggcggaagcttagattattcattttagatcttttttcttttctaatatatgcatttaatgccgtttatttccctctaagcactgatttcactgcattccacaaattttgtttatctgtgtgtctctgtgtgtgtgtgtggggggggtgccaaccccctgtgcagtaaaaaatgtgcatataatttttactcccacactacttaactcct

SEQ ID NO: 467515 - DNA, 2070 bp, Homo sapiens
tccagttcttagaggaaaagctttcagcttttccccatttagtatgttaggttagggtttgtcatgtgtggccttttttatgttgagctcagagtgtgtcccgccatggtgcggcaactcgcatttcatcagcagccaggacacagagatcacaagagagggctgtgcattggaaagttgatattcctgtgtatcttggaggaggaaaggatggaccctgtgaactggcaaagactagttggagacataatcacagacaccttcagttgggctcatttaattgccacggatagagacctgctcaagcacctggagaatacaaggctatcatggggttccagatgcaggacttgcaccctagtggggcctcacaggattgagcccagtgaggaattacagtgctgtgtggagcagcttctttctgttcagaggaaccaaagatggataccacatgtggctttggggaggactagtgtaaagtctaccaatgtccaaggcatggccttggtagaaagaggaccactactgctactcactgaccaagtagtcctctggagtggaccaggatcttctagccttcaaaaaccctttataacccccaaacagcaccttcatcctgtcatccaggctcaaggagaaaccacagagcttgcaggaagaagaggccatgtgagtagagagtgagaactcggctgcctatgagcccatacgaagaagcctcaggatgaaagctacctgaccaacaccttgattttggactcttctagaacatgggaaataaatttttgttgttttataagctacccagtctgtagtatttttttaatggcagcttgagctgactaatacaggaactaccattcaacccactatggagtgggccagtggtggtggaggtcaggggcagccaatgctcctcttctcttccccatgggagcctttgagagcctttctgactttccagcatggacgccacttccccaggaggcattgagttcttatgcgggcgttcaatgggctccacagatctgggacaatgtggtggggtccccttgaattctgtgattgcatggtagcccctgaccatgccccttacgttttgtccactggcagcaagcttaaaccaactggcagtggaactgaaggcaagtgtctaacatttatggaggatgacaccttctatgggagcctgactcgtgacctctgtgggtatttttggcccagagaaagggctggtctgagctgtggctatcagtctaatagtattagagggtcactacagagaaggcagttataaatcacccagagtgggctgggaagtgagtggaacctttctgcctcttttggaagactcaacctggggaaaacatttcatgtcaagggtgggagggggaggtttcttagatccctgggctcggccaaatgtgaagtcagcactcccctcccaacctccccgcaatccagccttcctcctgtcctcccctggcttctataattccgtttgttgtgctcgcaaacaccgtgttggaagatttcatgctaatgaaagggtttcttgattaggttacgctgttactgtaaatgttccctcattatctatgttatggtaggaatttgaaaaagtataaattgagcgtcttgcataatttataaaacctgaatgtttcctaattagttcggttaggttaatgatggtgcagcgtcacttcttcctggtcccgttaatgacctttccactcttcattttgaacactttctgttatttacaagccccctcccaacccaaatccaacaaccagcttccggagtgtggccccatctagcctctgatgggaggatgaaatgccttgcagaatgtgaatggctccttttttctctgcatgtcccccgcccagctttgaggccaagaggcagcctgtttaaaggttggccagcccaaatttggctcaggccaatcccctgaagaatgccggtgaagtgcattctttcggcatttgtatagagattggtgctgtcccccattagcagccagagatgtgaaaatgccggaggaggtgggggagggaaaaa

SEQ ID NO: 467516 - DNA, 812 bp, Homo sapiens
gtgcaggtgcaggatagtgtaggaatggaagacttgaagttcaaggtgttggggaaagagaccaggtcgccaatagccagccctggattccgtgctagcttgtttgatcctagagcctttggagaatggcataattccaaccgtgggccactcctgcagcaagctaggaagaaattccagggaggagatgtaagactgggtagtcacctaggggacttctcagtcaatggtgtggagatcagcccatggcggtggagtctcagagagaaagcggaagagagctgcactggaggagcccaccaaggaaaacatctcaagaaggaggtaggatcctggcctgaatgctgcaaagacattaagaatttagatgaggatttggagacgtgcagtcgatgtgttcatcgggtccatggtgacctcggtgagagtgcgttcaattcaattgagtatgtgactgtgtaagcccgaatgcaatgtttaggagagaacgaaatgtgcagaattggatatggtaaacactttcagaaagcttggtcatgaaaggaagatgagaaggtggaagctgatgggagacagggcagcttgtgggtgtctctttcttctcctcctcctcctctttttcctacttctactccctctcttccttcttctcctcctctgcctcctctttcttctccttttcctccttctctttctccttctcctcttctcttgctcctttccttctgatttttcccttcttttctttttcctcctccttttcctcctttcccctctcctccttctttgtccccatcttctttcccttcctc

SEQ ID NO: 467517 - DNA, 972 bp, Homo sapiens
ctggcattttcttgcgacttgaactccgcaccgtgtccctgtcaccagcagccatcccacagggccacgggacaccaggacctcttcctcccagccagaagcaatggtgtgtcctctaacgaagctctccctgcgaagcagcagttcctgggatgaaaggagctcacgccggaggaggacgttgatctgaaggccgcaggtatttctgggctgctggactcagtctgagcaggtggggtgtctccatagagcttcagagagccacctgcagctcccagcacacggcagcattgcagcatggggcactcatgcatacgctttgttctgatcccacctcctactcctggctctacaggattcctgctgccatccccaacagcctgccttcgcgttccctggtactggatacggggagctgggagcctcaggcatgagaagcccttgccgtcggggcgggtctgtcccgggaaggcaggggcccccggcaaggcgcagtctggagatgtccgtgaaaagaggcagtttccgtgggaacagggtggtcaggagcccaaggaagcctcagcatgccctgagctggggacagaggaaagagtggtggacgcggggctagggaccttggaccttgagctggccatgcacagacccagcaccggctaccccgccatgtgcatggatcactgctacaaccacggctcctgcagaggcagataaatccttggccaaactctttcccctttcctccaccttatttctagaaggagtggcccacactggccattcacaaggaaggcagagccgctgggcttccatggttttgtgtttctgaccaaaaccgtgaatccgtgatctgagttgggttttgtgtttctgcccataactgtgaatctgtgatctgagttgggttttgtttgagccactggcttcagggggacattttcgcacctggagagtttcatgagcagaagtttt

SEQ ID NO: 467518 - DNA, 633 bp, Homo sapiens
tgggtcagtgtgcaccatctcaggctcttctgcacgcccatgtgggtggggtcggggttgggtgtctcggccaggtggaggctgggccaggccccaaagctgtgggcggcagatgctgcatccacctcctctggcttggatctagaagcttcctcctctctcttcctcttgcctgaattgacacaggagatgaagcctggggaaaatggaccagaactcagaccccaacccccaacctacaatgacattcaaggatgtccctttggccaaacccagcagaagccagaggggaaggagactcacagatgtagccccgcagggacacctaagctagcggggctgccagccacatcaccaaagcactctctacttgaaagcatgcagcagatgaaggtgtgcgcaggtgcagggcagcatgagaagggacccaacgtgacaaacttcattgaaaacaccatggcctctgacttccgtggtggaaaggaatcattcccatgactcttgttgaaacctcaaaaagcatttgaagatgcccattcgccttctggaagccctgggttgggggccaggtctgtgtccaggcctgaaggctgaccactctgtcacatttttttcctgtaggaaggggtgacc

SEQ ID NO: 467519 - DNA, 4647 bp, Homo sapiens
ctcgcccaagctacaggagaattccaaagtgattctgagtgccatgagctaggagtgtattagagcccaatggagtaggtcgaacgttagatgagagctggacagaagcagcgtttccaggccagcagcgagctgtgggccgtgtcatgcaggctggtgtgccatggaccgtgtcgtgcaggctgctgtgtcgtggaccgcgtcttgcaggctgctgtgccgtgggctgcgtcgtgcaggatgctgtgccgtgggccgtatcgtgcaggctggtgtgccgtgggctgtgtcatgcaggctgctgtgttgtgggccgtgctgtccagcacatcctttggtggttctcttgtgagggtgagtggtggaactgtcttctttatgctccctatgctgcagtgggtaggaggaaagttccatggtgaccgttgctacttcgatggggtctgcagcctgtccagctgctgtcccatcacaggccctgcttggctctttggtggcagagctgatgccatctgtctatgttcccttgacttcttttctatgctcctgctctcaagctcccggcaggcaggaactgaacctccttgctggatggctgctgtcaggttgcaggagcccgctctgcagcacacagatgtccacaaaggcctgagaaggcatgtgctgcaggggcagccccagttaggaccgcccagaggtgtcacccgcactgtcttcagaaccatgcgatttgtccacatcacactcctgcacagcctctgtcccctcctggaccagcatttaattctctcggggcctgctcctgcggaatccaacctcagcccacagctgtaaaatatttcgtgtacagctaaccctcggtttcactccttgtgtttacctttaaatttattttttatgtaacctgctttcaacttagacttgcattccttcagtttttgaaaaatattgccactatctgttcagatgctgagttttcataattctcttcttctggaactcctagtaggtgaacactggatcatttcgatctctcttccaagtttctttcacacttctaattttacggtttttctgtaccgtgttgtgaacgaattcctcatcaacattttccaattcacaaactctcctctcaactctttccagtctgggatatatcatattggttggattatttctttatttcaggaactgcattttgcaatctccgagatttgtggttggatttttttttttcacatttacctcttcttgttttatttctgcctgttctgtttcaaaattcctcactgggccttgacttatttctttgacatttacttacacttcagtacaagccctttgatgccagggctagggtctgcacgagacttccccagtggtcatcgccagcagctccgtgtcggactctgctgactgggggcactggggagagcaggggcagcaagagaagtgaggggctccctgctgtcattccgcagcagctgggatgccgagcacttcctattcatcatgatatctactgcctttcatttactctaaaattccattgcttatatgatgcaccagccatttgtgtgctctttagaaagaaacaatgctgccgattaaacaaggtcatgttgtttatggaaagatatgtccagacttcagagatgttgaaatatgaaaagctatggctaagatggtggggttttaaagtgtttgttagacagttttctaacatttatgttcagactgatggttttgtgtgctgtcttcttctttttgaagagagcctcatcctgcccctgtttgctatgtgtgcactcctgccagcccccgggatgagttccctttcctcttctttgcaccctgagggggcagggctgccacagccattctgaggaagaggtttctgttgttcagagatgcagcctcactcaccaagagtcacatgggagtaaaaatgcttttggttctccgcaagtgttctttttctttttccacttctttctctctactcgtttggatggtagacattaaacacctattcttagcagatgtcctagatattttaacatatatataattcatctagtcccggagtgccaatgctttcattctcctttttgaacaaccgtagatctttcagtgctgaaattctgatcgtctatttctgaacctcttgcatctttgtccgggattctttccccaccgactcccgcagagcaggccttgtttgtaatgagtcaatgtttgtttcaatgccatgagttcccaccatcttcactcttcttgcatcacggaccttccgtctgaggtccttcccttctgcccaaactgcattctttagaatttcctttgcctggggtctcttggtgtgtggtaggctgcaaaactgcccatacattctttccctaccaagcctgcttctccaccccttggagctggcttggaaaggggatactggcagatgtgtgtgaggtgcttgcctgtggcggtggaggggggcttgctctcctcctgctttggaccctgggccaccttgtgcatgaacctgaacaggagcgttcaggtcccaggcagcagcgggtgtggaaagggggccatcctgggtcacccagcagctgaccagatgccagctgaccgcaggaacaggggagagcaaaagtcagcttggcccctccatccgcagcccagcgaactctcaggagcaggtgcaggggagagcagaagtcagcttggcccctctgtccacagcccagtgaactctcaggagcatgagggtttacaccgtgaagctctggggtggtttgtgctgtagcaaagctaatttgcatggtgacaaacttagtgctatcttcctgaaatatctttgtttcatcttcattctagagacttctagcattggtgtagaattctaggttgaaaactatttgtcttggaactttgaagatgttcaactgtcttaacttgcattttgctattgagaagtcagcagttaatctgtttttcttttgtacgcaacagtccctcccccgccacccccagctatttctagatgcttttaagattgttttcattgtctttgatgttttttagtttcaaataatgcattttggtgtggattttataatattcatcctgcttgaaagttgagggggcggattttaggatctgaggtttagtgtctttttgtttttcgaacattattagctgttatctctttaaatactgcctccttctcatttttctctctactcccttttgaaattcaaatagattaatgtgagacctaattcatcttatcttccatgtcttaatgttttccatcactttcatactttccatctctttgtctctggactgcatccctgataacatcttctgacacatcttaccaagtttctctcaaactccagctagtctgctgcttttcactcatattttaccagaagttttatttttcaaatatcttgtttcttactaatacatttaatcttccttttgaaacttccttccaatttttaaaacatgttaaaatgttaatattatattaatgttatatgtctggtgtttccaatatctatggtcttactgaatctatttttgcttttctgtttttcccactcacttacactcatggcacctttgttccttgtgtatgttgtgtggggaactcatcttcctttgaattgggagttctttgagacctgggttgaagttgagaggactttttctccatttctccctccttttccctcccctcccatcccctcccctcccctcccctttcctttcctcccctcccctccccttctctccccttcccttccctttccttcctccttctttccatttcttcttattcctcttcctccttcttcttcctttctctctctttcaacttttgaggttacttgggccatctatatctggaactactttaaagtttatcctgaggttttcggggtcacacagggtagcctcattgatcacaaacctgtttgaggacccatttgctgttacgactacaagatgagattacgtttttccctttacataattccagggttgagacaggtaaattttctttctgcccccttctgagtgatcggtttatttgttgttcactcttacactgggcatagcccacagatggtcccagattcatctaggggtctcctgtgtttccctgctgtgggtgagtgctgggccccatcttcttctccccacagtgctcgggggctctgaggtgtggcgtgtacctgtggggtaagtgctgttggctgggtgcacccccaggctctgctttcacctccctttcagggcctgtccaggcattgccactgtgctggcccatggatttgaaataggttcaaaatatctcaccttttctctgtttcggtgtttctctgttcggtgtttctctgtttcggtgtttctctgtttggtgtttctctgtttcggtgtttctctgtttcagtgtttcagtgttttggtgtttctctgttcgatgtttctctgtttcggtgtttcagtgttttggtgtttctctgtttggtgttttggtgtttcagtgtttctctgtttcggtgtttcagtgtttcggtgtttctctgttcagtgttttggtgtttcagtgcttcagtgcttctctgtttc

SEQ ID NO: 467520 - DNA, 683 bp, Homo sapiens
gatcattggtgattctccttcactgtggtggctttcagtctttggggagggtccatgatgccagaaaagggcgagaaaattttcaaagaagttttatcccaaagtgcactgggtgctggtccccagaccctcccacaaggacctgccaggcccacaggggccccagacgtgcccccagcccagaggccgtgtcctcacagggaaagccaggtggggggagcacagtgttcgccaggcctggaggggccccagacgcgtgcccagcccagatgccgtgtcctcgcagggaaagccaggtgtggggagcacagtgttcctctgggcacagccatcatcaacccagcttggaggagacgtcctgaggccctggaggttaagctgctcgtcggggtctcagtctcacagctgcgaagtgtccctcggcctccgatcctcagtgccgagggtcactcagtgccgagggtcactcagtgccgaggatccctgtgcctgtgcgatgctgcagatatgcccacctggtacctgggaatgtgaccttatttggaataaaggtctttgtagatgtaatatattttaaaagactgctttcatgcaaagtatcttctgaccaccatgggatagaattagaaatcagcaaaagaaggaaatttaggaaattcaaaaatatacacaaattaaacagc

SEQ ID NO: 467521 - DNA, 573 bp, Homo sapiens
gagtatgacatatgctatgggatcttcatatatgctgtccatcacacatctgtaccaccgagtatgaaacatgctctgggatcttcatatatgctgtccatcacgcatctgtgccatcgagtgtgacgcatgtggctggatcgtcatacatcctctctatcatgtatctgcaccattatgatgtgtgctgtgagatcttcatacgtgctctctgtcatgcatctgtaccttcgagtgtgacacatgctctgagatcttcatacatgctatcacacatctgtaccattatgacgcatgctgtggggtctccatacatgctctcaatcatgcatcagtaccctgctgtgggatcttcatacatgctctctatcacacatctgtaccattatgacgcatgctgtggggtcttcatacatgctatcacgcatctgtaccattgagtgtgacacatgcggccagatcttcatacgtgctgtcaatcacgcatctgtaccatcgattttcatagtttatgtctttctagaaattttcccatgtcatccagttatgaaatgtagtgacatgcagttgttc

SEQ ID NO: 467522 - DNA, 1380 bp, Homo sapiens
gtgaatgctcacagcaactttatttgtaatagggtatatttgtattcgctacctcacaggctaaattctagacacattttccataatatttggtccaagcctgtctaatcacatggactgagactcctgtgataataggtggctgtcccactctaatccctggcatgtcatagggtagttccaagtcacgtatgccattgtgtttggtaatggaaggaaagcgagtttctgagatgtttccttccagctcccagtgcaagccagttaaccatgtcattagagcagctgtgcacatttcgagctgcttgccaaatgcctttggaaaccaggctttgagacgcctttgtgactcttgtttgcatgttttttggctatgatatcgaggcatttggttctgcatccacgctgctgtctatagcagctccctctcaccaccttgcatgggaagctcccaacatgcaggcagggtccctgtgggaagcatcttctcgcctggccagcatattgaggccggaagcttcgctgccagcaaagatcaagtccataaacatgaggtgcagccgaggcctctccccttggcgcgcatgcctggcaggctgcacaggcgaggtgttcttttgaccttgacctgctcccaggcacacctcccttctctggcacgccccttccgggcatgcctcttttctctggcacgcccctgggactctttctcttcctgcacctgcttgccctctctgagactttcggtggactttccctgcactctgtgctttctctgactttatcagccccatcctgtgcctttatcatggagttgcccactctggtgcatggcccaccctcagtcactatagggaaaagccatgggctgttgaaagcttccttccagattccacctaaggcttcgcatctccaggctccattccactttcacccagagtccaagttccagctacaccttccactcttgactctggatttttacccctggaacctgaggaaggattcaccttcccaggttgatgtcagctctatccttgggtgctcagatgttcaccctctgcccactgatccccctggctgtgcttgggggcactgaggccaaacccttgggtcagctcatggagctggcgctcatgaaggccccatgtaccagtcgtgaggcctcaatgcctgtgcagttggacttccctggagacgtgtgtcctgctgtatgcttcattgttctctttccaacaaggcaggtgatagcagaaccatcagtatgtcacggctttaatttcaaagcaaaagtatttcctatgggcacaggagacttcttcttccagtgctttgggaaaaaccataagtgggcatgtttggatttggcccccaccccat

SEQ ID NO: 467523 - DNA, 436 bp, Homo sapiens
actgtgaatggagaccctgcatgtagcctcctcgtatgacctgggcttcctcccagcatggcagcttcagggttcttgggtttttacaggtggcccagagctccaagacagacaaattctgactttaaatggcaagttaagtacattgtggggagcacgaaactgcaccaatcagatctgtgactgtggggagtatgactgggagaagggagtgttttgggaatccattctctaccaccacaatgggccaccacattcacggaaagaccacacccctcacaggcttcttctagccagaggccagcagggatatgaagacaggcccatgcctaggaaatctcagactcctcagatggctcaaggtctccccatctgcttggataaactttcctggaactggtctcccctctgaaattattctttcattttcagaaaa

SEQ ID NO: 467524 - DNA, 1397 bp, Homo sapiens
aagagccatctctttgttttcattacattgtaaaactattccaatgacagaaatctcaccttttgaagttcctcccttacccaggccctttactccaggcctaaaaataaacgacacgtgctctgaggttacaccgggcgaagcctccctcttactcccaggctcatgtgccgtatcacaggctccacggaggctgcatttaggagaatttggagtcagcgaggaccacacagtgtctgcagggacaggtccatgtttggcccaagaaccagggcataccaggagaaggctggttgctatcattcctgggggcaagctgctagtctctcagctggttcctgctgatggatctgaacactcagtttgggttgccaccccgaggctctgctccatgcatatgtgagggtaggtttgtttttttttggggggggaggtgtgtggggggacacagctggttcctggccagagccgtggctccagtctgaaagtccaggcatacctaagtcgtctcctgtggctccccaatgccatattaggctgccccctctgaagggtggaatctctgactcatcctccctccccaacaccccctcactcctgccagttttggccaagattagaattcactcaaatctgtgggttctaaggtttatgtgctatttcactttggcaaatgactccttcttgtttcaagttcgaaaaaaatcccttcccgaaaggggctttgaaaggcttttcttggcgacacagtgttttgggcaacccaaaagcaacgtggtgatttcagtgccctgagtcaggaagaagccgattgcatttctcaatatatcctggggttaatggatgagaagcaaggaggatttcgaatcagaagggcaacagcaacaccctcctgccattcttgagcacaccgcaggtttccagtgctgagctaggcactctctgcagtttattaacccacaccagttgttacccagtcccaacaggtatgcaaactttttcccattttaaaggtcagccacactttagagcctgggggagttgcctggttctacagctgctgttcagaaaagaatctttggtgttgctttactgctcagttctgccttctgctattgaaacttcttctttgttgccctgaatatctgcagtgggtgctgctgcctggaggacaggcaggtttagacaggactgccttcagccaggcaaaatgggcttttcattgtcacaactgtttgtatagagtcattggctgtgatgacttgttctgaccgatgatacaaaatcactattggaaattctttatgaaagaccaaacaataaaaaaaacctctttgttttgtggaggataaatgctccatggcatccacctaaatgatctttgcttttgaagtttt

SEQ ID NO: 467525 - DNA, 627 bp, Homo sapiens
gaatgtcagcctctcacctcccttccttccggaagaaccgcattgtttatttagcctttggtttgtggatctctgtggcaagcttgttaggaagagcagtgggcatgttgctgcaggggcaaaacggtttgaagtttggactttgcctttttcattcacagctctggctgctactgggtgagagccagccatcaacaaggaatttctgcattttggtgaaacctaaatccggcaagaggcaacgaaagggccagtctcatggggagtcaagaccaggccaggaagaagaggaggcttccgatttcctctcctgctgtgatcatgtgtacaaagatatacacagcctccttccagaagaggcagcaagtcaagtcacagaacaatctgaaagggcagccttgagcccgacttcaaggcaatttggaggagcccattcaaaaatcccagacacccggcataaaaaaagggcacaagaagggccctactccagaatgtcacttgagacatggacggcttctgctgtccctgcccagggtcgacagccaagtcatttcaaggctcctggggatgaaatgtgagagaagataaactttgctttcatctttaaaaccatgaaaaaataaataa

SEQ ID NO: 467526 - DNA, 1065 bp, Homo sapiens
gcaaaggggaatggctttcttaagaagacctccttagtcagaggagtccccaggaactgctcttgctctccctcttcaggtccccccgctcatcacccctggactgctccccatgccctaaatgggcatcttgccttaccagggtggagggaggagcgcatcgggcgccagcgcccccgtgtggccgcgagcaccgcgcgcgcaaagggggggcgagcgccgcccggggcgtgggtgacggggctggcatcaaggtagagggcggccgggcagggaggaggggcagccccgccagcgccgagcccagccctgaagtcgtttcggctgtgcagatgatgagcgacccaggtcgaggcgaatcaggagcccaggtgcttgcccaagcacagctggacgaaatgtctgttaccccgacggctggggcgcgggaccttgcagggacgtggtgctgcagcggcctctgcctgggcctggcgtgcggctacctcaggctaattctccattcgctgcgtggattcgcccccgggaggcggccccacgtttccagcctgtggatcaacaaggcggagaaccacctttgcaccctcgccgggaaaccagctcctacctccggccccctgttgggccttctggccctggtgttctctggcgctcctctcccaccaaggcccggcactcctggtgactgcagccctctctggccctccctggcgctccctggccctgcttggtgctctttgatgctccctggccctccctggcactccctggtgctccctggccatccctggccctccctggtgctccctggccctccctgatgctccctggccctccctggcgctccctggccctccctggcccttcctggcgctccctggccctccctggcactccctggcactccctggcgttcctggcttgctgctgcagcacttcagtggcttcagtcacactgcgttctccctgtgcgtctaagtccacacctttctcttgatataaggacaccagtcatattgaattagagcccaccctaatgacctcatcttaacttgaggacatttg

SEQ ID NO: 467527 - DNA, 983 bp, Homo sapiens
ccaggacaggaagcagcagcaggtctgcagctgggtgctggaaagccgggtcacaggaggctgagcaggggaggaaatttactttggatgtgggacccagatggggcggcggcctctggctgaggggccacccctcctggctctccaaatcagctgttgcccctcgagagtggtcctttcctcctcgcccagctctaggtcagcccacagcaggcactcgttaaatgaaacaaatgctcagagtttcagagagatattgctcctgcagcagcccacctccctgctggcccctggacaggcacaaaagctaagagtgtggccttcagtttgcccagtgttcctggccttttccctccatgaagcagccggggaaggcactgtgtgtccacagcgaccctacagtgggcagctgagggcccactgggattctgaagggcaggcctcaaaatggtgcccttgcctaccatgctgtggttcctattcacagttttcagccctgctagagtactggaagtttccattttccagggttttgctccttttcctcacaagtgccaaacctgggccctcccacctcttccccaactttgcccaagcttccaggagcctatgctgctcatgcatgaacaggttcaagggagtggaggcgaatctgagccctgggcaaaagggcttcccataataattaatgcggtagtttttgcagtcttcgtgcaaggtaaaaccaccctttggaagaacatcactggcaaaggtggccgtgaccataatagatctcaagatgttcttcctgactgtgttcttcgaaatgcccatattccagggtcaacgctgctcatatgctcaccagcccaagaagcacttgcctactcacgtgggaggctgtacagcatgaaagttatggcctgggttcaaatcctgactgctactctttgaccccagactatttgtttacctctctgtgctttggtttcctcatctgt

SEQ ID NO: 467528 - DNA, 825 bp, Homo sapiens
catcccaggacacagctgcgcctgcctgctctttccctgtgctctggcggcctgtcctgggccttacaccaacgcgatgaacaggggaaacggggtgctgagcctctgcctgggctacactctccctggggccattcagggaaagtcagaaatctctttctccccagaccgcagcagctgggccagagaaatgggagagttgaagaatgtttcaggaatcacaggagatgtgacatttgtgctggatctggaacatgggtgggatctggtgggcatagatggagatgaagcccggctgcagggagtcgaggagtcctggggctggagctggggaaggtgcatgcgtctgagtggccggaaacttgtcagaaaggaagattccctgggttcacccccagagggtcccattcaggatgcaagctctgatgaaagggggaactttgatcctgctctcactcagccatccacagggaaggaaaagccaaggagacacctagagccagtaaagccggagcctgccatgggtggaacagagtcagcagaatgcaggctcctctggaagtggaaagagattgttgcctggggcttactgaaccctccagaaggttccattttaagaaccatcatgccttcaggttctgctttggccccagaagcccagagaaaccctggctgtgcagtcttcatttcagaggttctcgagcactactaaaatggcttggtttgacccacatttattgagtcattcagtgttcactgagtgtgttctctgtgtgtagagcttgttcctgtgtagaggaggtccaaacccagcaccaggtccag

SEQ ID NO: 467529 - DNA, 604 bp, Homo sapiens
ggtcaggcctgtcatcctggataccctttcctgtaggtagactttctcccattcgcccccaaccaccactaccgagatgggaaatatgacagcatctggcccttggcgcttatctgcctttatggatccttttctgttgcttgccacctaccagcttcctttatcaataccaggaagctctctacacatccttctgtgttccccttcatttttctccttcaccaatgcactttataaggaaggccacaggctcctctgtcggacctgcctcagaacagcctgggctagggctgatgagcaatacatttccacgccttgcactgacctgttcccactgggtcgcagaggccgagcagctgagagcgtgtgcatggctgatgaccgggacactcagatagtagctgtgggggacagccctgctcaggtgtgccttccattctgtttgctttcaagtaaaatgatgacctcagcacaggaatcactggagaaaatgtctgtacacctcactacagtcactttactcacagggttctgcacaagttccagactagattccctcttcatttgaccaaacatgtgtgggtagcagcaaataaatgaggga

SEQ ID NO: 467530 - DNA, 685 bp, Homo sapiens
ggtctatagaccacaggagaatacaacttattcgaaaacgattgctctatatggattcttctttaagataaagggactcaaacatgatactacctcttatagtttttacatgcaggagggtgcttgacttctccgtagtgctcctgctggactttaggagaggcaggagaatgtcatatttaggagtggagagtccgcaggtgaacggccttgcgagctataggacctgggcaagtgccaggaactctcctctgtgcagtttcctcacctttaaggcagagaagagaataaagcacacagacctggaatctccctctgcggtctacgagcacaaccacgtcagcctgcgagcggcacgcctggtgaagtatgagatcagagcagaggccctggttgacggcaagtggcaggagttcaggacaaaccagatcaagcagaagtttgggttgaccacggtggaacgtgccagacccgagagtgcatttaccagccctgccccacagaaccctgagtccagccctgactttttgccctctcccagcaccagggaagcaacagcagtggcaacagactgcagccaggagcatggaagacttcccttaaatgcagctctgcctgctacacagaacaacatgcctgccaatcgtccctggcagtttgggctcagacagaacaagagatagga

SEQ ID NO: 467531 - DNA, 515 bp, Homo sapiens
agtgacaaggtgatacggtgtagatatttgtcccctccaaattccatgttgaaatgtgatccccagtgttggacatggagcctgatgggaggtgctgcagagctgccagtcactgccttgctggagacaaaggcccaccctcgtcatccagctgcaactgtgcttgcagctggctttgagcaagaggaccagggaaggggcagccaagcaacaccgaaaactcttagacagcagccactctactgcagccagactataggaaaagctgtggccccactaccactcaagccagcaaagctgagtggaaagcttagatttcccccatcagcaggctgcaatgaagctgaaaaatacaataagcaaaatttaaaactctgtgaatggattcaagaacagaatggaaaagacagagaaaagaatcatgatcttgtagtcccagctactctggaggctgaagtgggagaatcaactgagcctgagaagtctagattgcagttagccatgatcatgtaact

SEQ ID NO: 467532 - DNA, 650 bp, Homo sapiens
gatatcatcatacaccgtggagcttctgaaaaactcctctgtgccctgcctcaggcacatggcttgagctatggcggcacgcagtatggccatcacccaggaaccaaatctccatctacgggaaggtcccggaagccatggtaaggatattggtgtttctaaaggtgcccaagagagcaggagaggggaggagaggtcagaggtgccccaaaaggggtctgtgtccagagagctaactgagcacacatgtctatttccctcttggttccactttcctttcatgacttacagtgcatcattaagaagagtatgtcttagagagaactggatgattagagaagaagtggtcattgaactaaaacttgtgatgaattcttggaaggtagacagaggtgccaaagcccaagatagacatcagagaaaagagaggggaagaacaattaaatggagtgatgatagtcagttgaactatctactgccacgggctgtggtctagatgaaccgagccttttcaacattatcttcaaaagtcatgattttctttttctgtgaaaggagaatattattcatttaactcattgcaatgaattttctgtgatttttatgcatgaccctgttcaatgctgtggttttgtacagtgctatggtgg

SEQ ID NO: 467533 - DNA, 985 bp, Homo sapiens
ccccgcagactggtttatgtccatctgaggtagtatccggtcaaagaaatctttatgcagcaaagcattcaagaggtgacttgggtgatgttaaaggcattcagtttcaaaagagaaacagagcacaaaagattagaaaatttgcaaacagacaatgcaatagaaaagaaaaactcattttctgaggaaaaattcaagccggctgcagaaatttgcataagtaaaaaggagctgaatgttaaacaccaagaaaatggggaaaatatctccaggcaacatttccatcgtgaggccattttcaatagaagcgaaggattccacgggtatcctggcagccgtcagaacaaaaccagctcatggctgtgtaactgcagtctcaggcaaggcctgccttctagccctccagacgccctccaggacaaggcaatgacagaaggtgacatgggagtcaccctagaggcttccacagaagctgatctaaaagttggaaactcctgtctagagcctgtgcccagcagaagaagcaagctgagaaagcccaagcctgtccctctgaggaagaaagcaattgaaggagagttctcagatgccggcactgctgtggaaggcacacctctccccaaggcatcctaccacttcagtcctgaagaggtggatgagaacacaagtccttctttgttaggaagtgccgggttccagaagtctcctcctgaccttaaagaaactcccagcactacgaaagcccttccaaggaaacttggcaagaaaccgggtagcaaactgactcacaagatacaaaaagatggtatcagcatagagaaggagacgtgccaaaaggtggaagaagacgtgtccaccatgcttcctgaagccatggtttttagtttctgtctctagtgataagcagaaaagacggatgaggaaggagctttactgtcccaaccagaaacaacaactaagaatccatgactgtattctctccctc

SEQ ID NO: 467534 - DNA, 917 bp, Homo sapiens
cggcacaccaggagattatatcccgcacatggcttggagggtcctacgcccacggagcctcactcattggtagcacagcagtctgagatcaaactgcaaggtggcagcgaggctgggaaaggggcgcccgccattgcccaagcttgagtaggtaaacaaagcagctgggaagctcaaactgggtggagcccacacagctcaaggaggcctgcctgcctctacaggctccacctctgggggcagggcacaaacaaaagacagcaataacctctgcagacttaaatgtccctatctgacagctttgaagagagtagtggttctcccagcatgcagctgcagatctgagaacgggcagactgcctcctcaagtgggtccctgagtcccgagtagcctaaccaggaggcaccccccagtaggggtggactgacacctcacatggccgtgtactcctctgggacaaaacttccaggggaacgatcaggcagcagcatttgcagttcaccaatatccgctattccacagccaccactgctgatacccaggcaaacagggtctggagtggacctccagcaaactccaacagacctgcagctgagggtcctgactgttagaaggaaaactaacacacagaaaggatatccacaccaaaaacccatctgtaaatcaacatcatcaaagaccaaagcaatggaacaaagctggatggagaatgacttcagaatatcaaactactccaagctaaaggagaaagttcgaaccaatggcaaagaagttaaaaactttgaaaaaatattacatgaatggataactagaataaccaatgcagagaagtccttaaaggacctgatggagctgaaaaccatggcacaagaactacgtgacgaatgcacaagcctcagtaactgatgccatcaac

SEQ ID NO: 467535 - DNA, 895 bp, Homo sapiens
ggcttactgtctgttttgtcagtaagccggcactgacatcacaagacaaagtccttctcacttttctctctgctttccacaggaagaggaacctcttccatggtcatggccaccacaggcctacatgggatactgccaggctaccaccaatgttcactttaagaccaagcgtccttcagtcagcttatggtcaatgctgccaggcctgggactcacccttcagggcagtgggctcccctctggcccagggcaggtccagaaatgtcatccaagagccaaggcctttggaatcagggatcccaggagcctgctcggtgctctgcccactgaactgagctggtacacaaggtgcaagactaagcccatagcatactacctggatatcactgctggttcttcaggacccaagggctctttactcagaggtgatgaatcctgccaggactttgtccttcccttcaaggcagtgggttcccttctggcccaggagagagaaaaagagagagagagcaagagagcacaggtaggacaaaaatgttacctggtgactccaggcaaacggtttttggagggggactgtgttactcctaaaaccaagtgggttctgcccgctcaggggttcttggctgcttggatttttgaagcaaacacacactcatccaagggctgtaaacagtgcaggtgacacagctgactgctatcttggtttaaaaatggagactctggagctggatgattgaatctctattacacccccaacttgggtgatcttggtcaagttctttaacttctctaggcctcagttcccttatctgtaaaatagtatgagaatagtcgctgtgttctaagattgctttgaagattaacatgagttaataatatctataatacttat

SEQ ID NO: 467536 - DNA, 797 bp, Homo sapiens
tctgctaaagtgtgggacctgctacacaaacaaacgctgagaggatttgctactgcaaagccatcactacaagaactgctaaaagtagctctaaatcttgaaataaatctttgaaatacactaaaatataatctccttaaagcataaatctcacaggacctataaaacaataacacaatgggaaaaaaaggaacaccaattagtcttatattttgtcacttaacaaagcaagcaggagtagctattcttatatcagacaaaacaaactttaaagcagcagcagttaagaaagacaaaaagagacattatataatgataaacagactagtccaaaaggaaaatatcacaatactaaatatatatgcacccaacactggagctcccaaatttataacacaatttctactagacctaagaaatgagatagacagcaacacaataatagtgggggacttcaatactccacagacggcactagacaggtcatcaaaacataaagtcaacaaagaagcaatagacttaaactataccctggaacaaatggacttagcagacatttacagaagattctacccagcaactgcagaatatagattctctgcatcagcatgtggaatattcttcaagatagaccatatgatagccacaaaacaagtctcagcaaatttaagaaaatagagattatatcaagtactctctcagaccacagtggaataaaattggaaatcaactacaaaaggaaccctcaaaaccacgcaaatacatgaaaatttacctgcttttgaatgaccgttgag

SEQ ID NO: 467537 - DNA, 626 bp, Homo sapiens
ctggcctgtatggacacccagaacaatctgaatgaatctcaaatgcactgtgcttgtgagagtattggtctccaaagtatatactggatgattctattagcatggaattgcctaaaacacaaaactgcagtaggggagaacagaatgcaagggagatcagtgggggatggggctgggacagggggagggtgtcaacagcacacgagattttcttgtttgggggatttctttttagatcatagaacagctgtgacagaaataaggcttccttggctgccttctgtcactgtgttcgggatggaaacactggacctgggtcactgtcctccatctggtcatggtcctccagctgcaaccgtgtggactagagatgcactgacagaatggcacagtgatgagacagatggcttttattacagtgatgtatgtctcttgtatgtggattttgctgagggttttaatcataaagtggtgctggattttgtcaaatgctttttctgtgtgtattgagatgatcatgtgatgtttatttttaattctctttatgtgttgtatcacatttattgacttgaatatattaaaccatctctgcatccctggtatgcacttgaaacccacttgatcac

SEQ ID NO: 467538 - DNA, 1195 bp, Homo sapiens
tctgctacacctggaccattcacccattgaaggctctctggagagctcctggagacccgcggtctcctgaaggggatgagatgagaaggatgcggagagatactgaggggctccccacccagcaccctgctgagcccccctttctccctgtggaaggaaagacaagcctcacccaggcattgaccatgggtgaccactcattctgcaagcagtcactgaaattaaatgagggacaactacacacacaaggagccttcacccctgttagtcagggacactgctcggcccatgccccacctccacatctcctccctatcctgctgtggcagagcctgccctctagccctctgcagccccgacccaagtccagctcccggctcccagtcctgcagctgcagaggcatcctggggaggggcagctcctggcccaccccaaagcagagtttggtagctatgttgcatctggcatctgcattggactaagagatccatcaagttcaactaggggaacagctccttcatgttctgtttggctgactaattcaatagcagacacccaggcctgggctggcagaggcactcccaaatccaatgaaggtctcgctctgcagccagtctggcagcattacctgggcattttgctcgctcagcatagacctgagtcaggccccagccaccgccacccccaggagctcacagggccatgctactgccaccaggcctccccaagcaagcacccttcctcataaataagattatttatggtgggcaaagattagaaaaacccaggctatctctttgtagtggtgaatgttttaaaattaaaaccaacagaaagtaacacttcccaagggaacattcttacagtgactatgacctaaaacttgtaacattcatcacttctaaaatatgttgaggatatttaatatataattgcattgtgaactcattaaatatttgcataattataaatagaaaacataaataaaaggaaaggttacaatatgagtaaacacataaaactgatatttaattcactgtgctgattagcagtgcacttatttatattggtacttgagtttaagactatatgcatacttttttctttgtttcaaatttttattttttaaaataaaattatatatatttaagtgtacagcctgttttgattcatatatgaatatctatgtatgtg

SEQ ID NO: 467539 - DNA, 514 bp, Homo sapiens
caaccagcctcctgccaggggaagtgatgccctggatagcacacccaagcagaccctgtccatccaggatcatgcccccaatcccccccaacacttgccccactgccgccagcagtgcagcccgggatagtgcacccaaccagtccctgccatgggcagtgcagcccaggataggccccgaaactgccccatgctgtgggaagagatgccttgcctggaggctggagcctgcggcactgcgactcgcctcgccgcgctacagttggtggtggcgacagagactgcagtgtcgcggaagcggtaggagggccacccacagcgggagctgctcctgtccggctagacgacgagaaaggggagccatctgcggcacgttggaagctggggcctgtgacatcgcacctcgcctggctgcggttggtggcggagaaggagactgctgcgcagctggagtggtaggagagaagaaaatagttttggggtacatggagggataaagagggtggttggcctc

SEQ ID NO: 467540 - DNA, 991 bp, Homo sapiens; identical to SEQ ID NO: 459619

SEQ ID NO: 467541 - DNA, 664 bp, Homo sapiens
tttcttgatactgtcaaataaattcagatgaaggaggggcataaaggtggggtgtatgttagctcagactgaagttggaccagagtccgggagcctgaggaaaggagagaaacttaaatatgtgtccactctgagtggaacgccaactctttctggccttgtgtgtgggttggcgattattccatctgctccttccgggcagagtgtagtcattatccagaaatttgataagtcaccagatgagattactctgggtctactgggtgacctgcttcctttgggaacatcactaggagatcaagataacagcacatctagaatcacaggaaaggcctatagggccaggaataccatatctccacacacgaaggcagtgttcagccttagtttctacactaatagaccaccatggaaattaacaaaaactggtaataataacaataactatagtgaaaattaagtagaaaatgaagaaatcaaaaagaaaatgaaaaagggaaaagtctgcatctataaaacagacagattttggatttctagacctaaattaaacacccagactgtctcctactgtttggttcaccttggacagcttaatagccaaatgtctttgagtcccagtttgcatatttttcatatagggaataattgtattagaactttc

SEQ ID NO: 467542 - DNA, 1886 bp, Homo sapiens
cttctcagaagaatctttatggtttgctgcccacaggaagagacagggggagatctgcctttgcaaacatgaaggatagaggggctttatctgctttgggaattaaatggattaaaggtgctgtgaggctgatcttgcagttctccccatacctgtctgtccctggccatgtcctgtggggaagcaatgatgttcagagggttctcacttcaacaagaagcagctgctctatctttggagaagcagggggcacttcagctttggaaaagatccggaaggactgttcaccccctcaccatccaaaacagccccattctcaagaattctacaagcttaagaatacctttttttacctctccatttgtcctgaaatttatgaccaaacactatctagcaaagttatctgcaaaggaacgacaccaggctgtggaagctgtgctcttccagacactgctgaaaggcagtaccaagataatgttgtctgtcccctctgcagccagagtggacgctcgagcaatcccacaggtcgctgacacataggaagcaaccagtaaataaatgctttgaatgaattggcctaaaagtcacttctctttatccaagggcatttgagaataaaggctgacactgacaaatatacaaagaaataacattcatacttatatctgtggcaaactttgtatatcctacaaactaaaaattcagtaagatataatttttctttaaacatgaatatgttccccatatgggttaagtaggcaagatagtctctaagtctgtttatatctgcaaatatttctttcaccctggcaggtaacattcttgagtgtgtaaaggattcttgggcctcagtctttgtcttccataggctatacaaccatgtacttgcagctggttagatctctgccagtctatctaattcattttccttgatcggtaactatttttttggcgagaggttgttctttctcctcgatgttaagtaattttacagaatatagctctaagttttttcaaatttgccttcaccttcagaactgccttagttattcttggaccttcaggttttgaaataaattttagaaccgtcttatcataaaactactgaaattgtattagaattacactgactctgtagataaacttggtgaaaattgacatgggcaatattgaatcttttatttcatgcctatagcaaagctacaatatttagctgcatctatttttaatatgacataaatttctaaattagttttctgtccaaaaagttttctgatttctactgcagtctactctgtactgtggcctatttagaaatgtaatccttaattttcaaacatttggagattgttctatttatcctttgttattttcattatatatattcatagaatatacttggtatgatttcagtcatttggtatttttagaaagttactttataaaaatttatttaaataaatttgttttataaatatcaaggctttccattgctttcatacagcttttcatttttgttttttcattttgtcaacccttataagtctaaaagctgaaagtggagtttaaatgaggataataataacctccctgagagctatgagaattaaattagataatatataaaaagtgtctggtgcaggtgcctacctcataataaactgttagtaaatgacatccactatagctgttgccttaatttacccatgtgtactatttgtgtttgacctgtcagtgccactagaccagactggatttatttttgcttctaaattacaaacctagatctgtgattttctgatgaaagaaaagccccggttttaatcatacattacagatcgtctttgggaatgcagctggttcgtttgcctgtgtggttgtgcact

SEQ ID NO: 467543 - DNA, 3219 bp, Homo sapiens
ggactcgaatttaattcaattgaacggattcgaatggaatagaatggaatggaatcaaatggaatggattggaattaaatggactcgaatgggaaggaatggaatgcacacgaatggaatgaaatggaatggagtcgaatggaatggaatggaatgcaatggactcgaatggaatggaatggactcgaatggaatggaatggaatggaataatagaatggaatggattcgaaaggaatggagtggaatggaatggacttaattggaatggagtcaaatggactcgaatggaatggaatggaattgaatggactcaaatggaatggaatggaatggaatggaatgcaatggaatcgaatggaaaggaatgtaatggaaagaaaaggactcgaatggaacggaatggaatggaatggactcaaatggaatggaatggaatggaatgcaatggactcgagaggaatgcaattgaattgaatggaatggacacgaatggaatggaccggaatggaatagaatggaatggaatggaaaggattcgaatggaatggaaaggaatggaatggaatggaccaaatttaaatggaatggaatggaacggaatggaatggaatggaatggaagggaatggaattgaatcaattccaatggtatgcaatggcatggaatggattcgaatggagtggaatggaatggattcgaatgcaatggaaaggacacgaatggaagggaatggaataatggacatgaatggaatgaaatggaatggaatgaattgtggaatggaaggaatggaatgcctggaatggaacggacttgaatggaatagaatggaatggaatggactggactcgaatgaaatggaatggaatggaaacgaatggaatggaatcgaatcaaatggaatggattggattggactcgaatggaatagagtgaaatggaccagactggaatgcaatggaatgcattcgagtggaatggaatggaatgcaattgactcgaaaggaatggagtggaatggattcgaatgcaatggaatggattggaattcacttgaatggaataaaataaaatggagtcgaatgaatgaactcgaatggaatggaatggaatggtgcggaatggactcaaatggaatggaatttaatggactcgattcgaatgaaatacaatggaatggactcgaatgtaatgggatggaatttaatggaatggactctaatggaatggaaaggaatgatttgaatggaatagaatggaatggacttgaatggaatggaatgcaatggattcaaatggaatcaaatggaattcaatgcactcaaatagaacagaatgtaacggaatggaatggacttgaatggaacggaaagactcgaaaggaatggaatggaaaggaatggaatggaatggaatccaatggaatggaatggaatggaatcgaatggaatggaatggactcgaatggaatggaaaggaatcgactcgagtggaatggaatggaaaggaatggactcgaatggaatgcaatggaatggtatgtactcgaatgtgatggaatggaatggaatggagtgcactccaatggaatggaatggaacgatgaaatggaatggattcgaacgcaatggaatgcaaaggaatggactccaatggaatggaatggaatggaatggaatggaatggaatggaatggacctgaaaggattggaatggcatggaatggacccgaatggaatagaatgaaatgtaatggaattgattggaatggaatggaatggattggaatggaatggactggaatggaatggaatggtatggaatcgaatggattggaatggaatggactggaatggaatggaatggtatggaatgcaatggacgtgaatggaaaagaatggaatgaaatggaatgtattcaaatggaatggaatggaatgcaaccgaatggaatggaattgaaggtattgaactcgaatggaatggattggacacgaatggaatggaatggaatagattggacaagaatggaatggaatggaaaggaaaggaatggacttgaatggaatgccgttgaaaggaatggactcgataggaatggaatggagaggaatggaatggaatggaatagaatggaatggaatggaatgaaatggactcgaatggatggaatggaatggactgaacacgaatggaattcaatggaatggactccaatggaatggaatgcggtggaatggactcgaatggattggaaaggaatggaaaagaatggaatggaacagaatgtactcgaatggaaaggaatggaatggactcaaatggaatggaatggactcaaatttaatggaatggaatttaatggaatggactctaatggcatggaagactcgaatggaatggaatggaatggaacggaatggactcgaatgcaatggaatgcagtggaatggtttcgacaggagtggaatggaatggaatggaatggagtggactcgagtgaaagggaaagcaatggaatggaactcgaatggaatggaatggaatggacacgaattaatggacacgaatgtaatggaaaagaatggaatggacttgaagtgaatggaatggaatggactcaaatggaatggaatggaacggtatggactcgaaaggaatggcatggaatggactccaatggaatggaatggaatggaatataccgaatggaaaggagtcgaatggattggtatgtaatggactccaatggaaagccattgaatggaatggcatggaatggaatggactccaatgtaattggatggaatggaatgcattcgaatggaatggaatacaaagaaataggctccaatggaatggaatagaattgtcccgaatgaaatggaaaggaatggaagggatcagaagagaatggattggtatggaatggaatggaatggaatggaatagaatggaatggactggaatggaatggaatggtatggaatggaatggacttgaatggaatagaatggaatgaaatggaatgtattcgaatggaatggaatagaatggaaccgaacggaattgaatcgaatggagtgaagttgaatggaatgggatggaatggactcgaagggaatggaatgaaatgaaatggactcgaatggaattgaattgaatggaatggaatggactggacacgaacgtaatgaaatgaaatggaatggcctct

SEQ ID NO: 467544 - DNA, 2368 bp, Homo sapiens
tggaaaggagtcaaacggaatggaatggaaaggagtcaaacaattaaatggaatgtactcgaaaggaatggaatgcaattgaatgtaatcttatggaatggaatggaatggactcgaatggattggaatggaatggaaaggactcgaatggattggaatggaattgaatggactcgaaaggaatggaatggaatacggtggaatggactcaaatggaatggaatggaatggaatgcagtcaaatgtaatggaatggattcgaaggcagtggaatggaaaggaatggactcgaatggaatggaaaggaatggaatgaaatggaatggaatggaatgcattcgaatggaatggaatggaatggaatggaatggaacggactcgaatggaatgcaatggaatggacttgaatggaatggaatggaattcactcgaatggaattgagaatagaatggattggaatggactcgaatggaatggaatggaatgtactcatatggaatggaatggactcaaatggaaaggaatggaatgggctcgaatcgaatagaatggaatggaatggactcgagtggaatgaaatggaatgcaggcgaatggaatggagtgggctggaatggactcaaaagaatagaatggaaaggaatggaaaggaacggaatgcaattgactcgactggaaaggaatggaatggactcgaatggaacggaatgccctcgaacggaatgaatggaatggaatcaactcgattggaatggaatacggaatggaatggaatggactcgagtggaatggactggaatggaatggactcgaatggaatggaatggaacggaatggaatggaatggacccaaaaggaatggaatggaattgaatggactcgaatggaaaggaaaggaatggaatggaatggaatggatccaaaaagaatggaatggaattgaatggactcgaatggaaaggaaaggagtggaatacaatggactcaaatggaatggaatggaattgatggactcgaattgaatggaatgcaatggacttgaatataatggaatgtcctcgaatggaatggaatggaatggagtcaactcgagtagaatggaatatgtaatggaatggaatggaatggactcgagtggaatggaatggaatagaatggactcgaatggaatggaatggactggaatataatgtgatggaatggactcgaatgtaatggaatggaatcaaatggagtgcaatggaatggactcgaacagaatggaatggaattgactcgaatggaaaggaatggactcgaatagaatgtaatggaatggactcgaatggaacggaatgtaatggcgtcgaatggaatgcaatggaatggactcgaatgtaatggaatggaattgaatcgaatggaattgaatggaagagaccctaacggaatgtaatggaaaggaatggtgtggactctaatggagtggaaaggaatggattggaacggactcgaatggaatgtaatggaattgaatggacataaatggaatggaatggacatgaatggaatggactcgaatggaatggaattgaatggattcaaaaggaatagaacggattgtaatggtctcgaatggaatggaatggaatggactcgaatagaatagaatggaatggactcgaattgaatgaaatggaatggagtcaaatggaatggagtctaatggattcaaatggaagggaatggaatggaatggacccgaatggaatgcaatgtagccaatctgaatggactcgaaaggaaagcaatgtagagaaatgatatggacacgaatggaatggaatggaatggaatgaaatggactcaaatggaatggaaactaatggcatgaaacggaatgcaatggaacggaatggaatggaatgcaatggaatggaataaaatcgaatggactggagtagaatgccattgaattaaatggattcaaaaggaattcagtggaatggaatggactggactggaatggaatggaatggacttgaattgaatgaaatggaatgcactcgaatgtaaaggaatgccctcaaatggaatggaatcaactcgagtggaatggactcgagtggaatggactggaatggaatgaactcgaaaggaatggaatagaatggacccgaaaggaatggaatggaatagaatagactcgagtggaatggacctgaaaggagggcaatggaatagaatggactcaaatggaatggaacgtaacggaatggatcggacttgaatggaacggcatggaatggaatcgaatggaatggaatggactggacccgaatggaatggaattgactggaatggaatggaatggaatggaatttaccc

SEQ ID NO: 467545 - DNA, 3854 bp, Homo sapiens
gactcgaacggaattgaatggattggacccgaatggaatggaatggaatggactcgaattcaatggcacggaacggactggattggaagggaatggaatgtaatggatttgaatgtaatggaatggaatggattcgaatggaatggaatggaatggaatggaatggactcgaataatggaatggactcgaatggaatggaatggtgtggaatggaatggactcgaatggaattgagtagaatggactcgaatggaatggaatggagtggactcgaatggaatacagtggaatttaatggaatggactctaatggaatggaatggagaggactggaatggaataaaacggactggactcgaatggaatggaatggaatggaaatgactcgaatggaatggaatggaatgaactcgaagagaaaaatggaattgaatggattggacccgaatggaatggaatggaatgtattcgaagtcaatggaatggaatggacaggattggaatggaatggaaaggaatggattcgaatggaatggaatggaatggactcgagtaatggaatggaatcaaaaggaataacatggaatggaatgccatggaatggaatggacacgaatcgaatggaatggagtcgaacagaatggaatcgaatggaatggactcgaatggaatggactcgaatggaaaggaattcaatggaatggactcgaatggaatggaatggagtggaatggactctaatggaatggaatggaattgaagagattcgaatggcatggaatagaatgtactcgaatgaaatgggttggaatggaatggactcgaatggaatggaatggaatggactcaaatggtatcaaaaggaacagaatggactggaatggaatgaaatggaatcgactcgaataatggaatggaatcgaaaggaacggagtggaatggaatggactcgaatgaaatggacacgaatgcaatggaatggactcgaatggagtggaaaagaatggacccaaatggaatggaatggaatggactggactggaatggaatggactggaatggaatggaatggaatggattggaatggaatggaatggattggaatggaatggaatgaaatggagtggaatgtaagtgaatggaatagaatggatggaatggaatggactcaaatgtactggaatggaatggacatgaatggaatagaatggaatggaatcaaaaggaatggagtggaatggaatggactagaatggaatggcatggaagggactcaaatagaatggaatggaattgaaagaaatgtaatgaaacgtacccaattggaatggaatggaatggaatgtaaggtactggaagggaatggaatggaatggaatgcagtggacttgaatggaaagaatggaaaggatcggaaaggactcgatgggaatggaatggaatggactcgaatggaattgaatggactcgaatggaatggaatggaatttaattgagcggagtctaatggaatggaatctaatggaattcaatggaatggactcgaacagaatagaatggaatggactcgaatggaatggaatggaatggactcaaatctaattgaatggaatggactcgaatggaatgtaaaggaatggactataatggaaaggaatggactcgaacggaatggaattgactcaaaaggaatgaaaaggaatgggatttcttcgaatgaaatggaatggaatggactcgaacggaatggaattcaatggaatggactcgaatggagtggaatggactcaaatggaatggaatggaattgaagagattcgaatggaatggaatggaaagtactcgaatgaaatgggttggaatggaatggaatcgaaaggaatggaatggactcaaatggtatcaaatggaacggaatggattggaatggaatgaaatggaatgtacttgaatggaatggaatggactcgaatggaatggaatagaatggaatggattagactcaaatggaattgaatggaatggaatgtagtgtgctagaatggaatgtaacggaatggacatgaatgaaaaagaatggaatggaatcaaatggaatggattggaatggaatggactcgaatgaaatggacactaatgcaatggaatggactcgaatggagtggaaaagaatggacccgaatgtaatgtaatggaatggaatggattggaatggaatggaatggactggaatggaatggaatgaaatggagtggaatggacatgaatggaatagaatggatggaatggaatggactcgaatggaatggaatggaatggacacgaatggaatagaatggaatggaatcaaaaggaatggagtggaatggaatggactcgaatggaatggcatggaagggactcgaaaagaatggaatgcacttgagtgaaaggcaatgaaatgtaacaaattggaatggaatggaaggtcctggaagggaatggaatggaatggaatgcaatggacttgaatggaagagaaaggaatggatcggaaaggactcgatgggaatgaaatggaatggactcgaatggaattgaatggactcgaatggaatggaatggaatttcattgaacggactctaatggaatggaatctaatggaatggaatggaatggactcaaactgaacagaatggaatggactcgaatgaaatggaatggaatggactcaaatgtaacggaatggaatgtattcgaatgcaatggaatggaattgaatggtgtagaagggaatggaatggaatgcagtggaatcgactcgaatggaatggaatggaattgactcaaggggaatagaatggaatgcacctgaatggaatggaatggaatggaatggactcgaatggaatggcatgaagtggaatggactcgaatggaatggaatggagtggaatggaatggacttgaatggaatggaatggactcgataggaatggaaaggaacggaaaggtgtggtctcgaatataatggaatggaatggaattgcatggaatggaatggactcgaaaggaatggaatataattgcaatgacgcgagtggaatggaatagaatggaatggaaacgaatgtaatttaacggaatggaatggacttgaatggaatagaatggaatggacccgaacggaatagaatggaatggatcttaaaggaatgaaatccaaaggaatggaaatgagtcgaatggaatagaatggaatgcaatggaatggaatggaatggaacggaatggactcgaatggaatggaatggaatggaatggactcgaaaggaatggaaaggaatggactcgaatggaatggaatggacacaaacggaatggaatggaatggactctaatggaatacaatgcaatttactggaatggactctaatggaatggaatggaatgcacacgaatggaatagagtggaatggactcgaatggaattgaatggaatggaatgcacacgaatgtaatggaaaggaattgtctccaatgcaatagaaatgagtggacttgaacagaagggaatggaacggaatggaatggaatggaaaggactcgaatggaatggagtggaatggattggaatggaatgaagtggaatggaatggaatggaaaggaatggaatgggatggaattgaacggaatggactcgaatggaatggaattcaatggacccgaatggaatggtatggaatggaatggacttgagtcgaatacaatggaatgcaatggaatggactcaatggggatggaatgcaatgtactcaaatcgaatggaatgcaacggaatggactcatatggaatggattagaattgattc

SEQ ID NO: 467546 - DNA, 865 bp, Homo sapiens
tgcctgtgtgcacagggctctgcccacggagcttcgagccacattcgcaacttactgagaaatgcccgtgggattgttcaccagccatttaactaacctgtatgtgctgccatggcctggaccctgtgcccaccctgggttgggagtgtctggtgtgttccctcacctaccctccccgggatcccgtgagccaggggtgatgcagctgtttagcagatgtggaagcagattaactgcaaggttttctcatgcctcctgccaacacaaacccactctggtgtggcgcattttgccaaccatccagggacagcctttgccttgtggggagcctgtgtgcacccagacataccccaggaaagaaaaggttgcagaaaaatggtttccagccctgctcaaagctcttctcagagtcagcggttcacagcaaagggacttttccagaagttccaaaaggctcacaggaggttttattttgttttttcacaattaccaaggaaaaggaaaataaattaacttgagtgaaagcagaaacccctgcgccctgacacacaacacaaaccaaaccaaacagggaagtggtcatgcgctttctcgtagccatgacgcgcccagccccagagctgttaaagacgcagcgttggtgcagcgggcctggtggacacttctctttgctctgctcaatgccccgtgcctgtttctcattgaataaactttctcatgaattaaggtcttgaaattaaatatatcgatcccaaaggggagctttcaaattaactagtcagagtcttacacaactactggttttcaacaagccggatgaaggccactcagccccagccccgtgttattagtggggttcaggccc

SEQ ID NO: 467547 - DNA, 805 bp, Homo sapiens
ggaaggaactgtttgagacgctgggagtttttggtgaatttcaaatgagaagtgctgtcttttgtgcatctgtgggctgctcaggacggcgatgcagtctgaagatggatttcactatattgaacgtgtactattgcatttaaaattagagacaagagaaaagaaaccaccactcactgatgacaagtgtctggtgaaatggacacttgtacaggctgcttgtaaaagtacattctgttatgagacatgggaaaaacaatttggcaacaagatgcaggggacttcctctgattcactagttcacctcctggtgtctatgggaccctgtgtggagacttacaggtcttcaaggatgcaaaatttccagccgggagagcaccacatgggcctctgttctcccaaagacacggccaatcaggatagctggaaaggcctccagacaccggcacctttgcaaagccttcttcagcactcggataccccatacctccctctcttctctgaaccctaacactttctagttgcaccattatctttttaaaatactaggtgcttagcccatcctaatcacccttatcatgctccttccacaccctgagaaaaaatggcctcgcagcagacgtttgaaggcaccgggactggaaaagtctttcaaatggcacctgatttggctacatgcctgcagacaggtgaaagttagtgcccccatttcacagaagtggaattactggggcaaatgacataagcatttccagttctcatggcggatgctgtctaattgcttttcagaggagtcaatgccttc

SEQ ID NO: 467548 - DNA, 1848 bp, Homo sapiens
ggtgtccagtgtggactctcttcacgttaagacacttcctgtgcagcttctcggacacccggcactgccggctttgggggctgtttgagccccagttggaacttccaaccagagaccaggcaagaaaagaaaaggagcttagcttcccctttaagtgagaacatacgatgtttggttttccattcctgaagaatgtgagttctgcaagcagcatttctcttctcttcactactgatggtgaaggaatatcaacaggatggagaaaagtcaatggtctgaatatggtgtttgctctcacctgttgtctgtccctggagctgcctgctgtaggcatgttactgacagcaacatcatgggacaattattccttgtgtcttttacatacatctgtttattgccagtccccatgtggggatgtcttggcagttgtgtatgttggcctgaacctcaggagagaaatctcagccagagataaatttggggatgaagaagccaagaagataaccagggacagggctgatggtgagaactacactttgaaaaacactggtaaaaacattgtagacccagttataggaaatacccagaacagtttactgcgatatgtggccgtttaggtggcacacaatatcaccagtgtggtcccattttatatgaaaaattaaattctatcctggtatccctcaacatcctggatgagtttttaaattagcatacaatgaagctccccctttgtggtgtatgcgcctatgggttttgacaaattcatgaagccgtgtatcaactacctcagtaccatagagaacagttccaatgacctaaaatagaacgtgtgtggtccctttttagctgatttctcctctaatctttgacaatcactgaactgttttccatccccacagttttgccttttccataatgtcatacgcctggaattatataacatgtagtcttctgggtctggcttcttttatttagcaaaatgcatttaagattcatccacattgttgcaggaatcaaatagctcattcctttcattgctgagtagtattccattgtatggctagatcccggtttttaaatatatttgcctgttgaaggtcatcttggttgcttccattttttagtgattatgaataaagttgctataaacattggttagcttgtttttgtgtgaacgtaagtttctgattcacttgattaaatacctaggcgtgtgattgttgatttatataagtctgtgtttaactttataagaaactgccaaaccgttttccaaagtgactgtaccactttgcatttccaccagtgataaatgggaattcttacggttctctgtcttcatcatcatttggtgtcgtctgattgattttagcaattctaatcagtgagaagtgatatctaattgtggttttaatttatacttccctggtgacaatgatattgatcatcttttcatatgcttatttgtcatttggatttcttatatgatgaagcgtctgcttaaatcagttgcccattttttaattgggtcatatgtttgcttatggtaaaattttaagagttctttatatattctgaatacaaggctttcatcagacatgtgatttataaatatttcttccagtctgtagctagtcttttcattctcttaacagtgtctttcaaagagcaaacatttttaattttgatcaagtccaactaaacgttttttttttctttcatggattgtgcttttgttgttgtgtctaaaatgttattgccaaacccaagtcctgctgattttctatgtttacttatagaatttcatagtttcattttttacttttatgtctttgatccatttta

SEQ ID NO: 467549 - DNA, 531 bp, Homo sapiens
agagttaattcggtggccaaatgggaagcaaatggattacaaaaaccccagatgagaaatgggaggcccctgcgagaggaacaagagtcgttctgggagaggacctggagcgtgcaggatcagggtgggtccatgcaaagccggataagggaagtgtttgtcaatatggagagattctcccattataatcgcattggcccaagggaccaagtcttggtgggatggctttgcaggcttggaataagtgatgggcctcaaccagctgaagcagagatgctaaaaatgccatgggcttactgtggaggagggaatctgaagactcagagagatgggcctgctgcaatggacttgctatataagaccaggacgaccaccagccgacattgggaggccccggaggacaccctgcttacaaggggataaggaatgtgggttaggggagcaccagtactgctggactctgcaggccaggacggttgagatggcagagagttgcaggctacatgttgggttccctcttgctaagtctgg

SEQ ID NO: 467550 - DNA, 915 bp, Homo sapiens
gagattggcagggaaagcaagggaaggcagggaaggaagtggttaggaccttgctggcccaaatccatttgtcatcatccctgcagagctctggtccctggcagtgacacaccctgacatgactgtctgcagcgagtgactcaagccctggattctgcccagtctggttctgtctccatgacccactctgtgtcgccctctgtgacactagcctcctccaaggtcatccttgctgtgctggggaacacatgtccttgtggttctgagctcaccaaggtgtcccttccctcctcccctccgctccctgctccctggggcttcctgcactcatcggagcagaagtcaccattcctcttccgcataggaacctcaagacccaattctcccttctatgtgacacatcaagttttctgtccactaggggaccacagaatttaccattcaaaccagatacttctgagcgtgaaagggggtgctattaataattacaccaacatagtaggtgtaaaccacgactgtcccaaatgggatctgatggccatcccactgtttgcagactcagaccctgaatcagaagtacaggggaagtttctagaagagtggagttgctggatcgagttccccaaatcctttaacagtgagtttcctgggccccctgaaccacctaccatccactagttcatctttgctccctccacacttcttcctctcttatggtctttgcctttttcacaggttggtccctgcctgtcccctgggcaggtgtatccagccctgtgatatttcccctctcactctgaacctgcctcctctgctatagcccacatatgggttgtttatagaaatgtcactttcctccacccaaaggttaccccagccttctatttttatttttctactgaaagcactgttatc

SEQ ID NO: 467551 - DNA, 616 bp, Homo sapiens
gtggacgggagcagctttgccaacccctgaaaagtgactctgaagaagacgacaagccctgctccagtcacacccggaagctgactggtccacgcatggccgaagcatgaggaaactcattgcaggactcattttccttaaaatttgtacttgtacagtaagtacttcaactgaccttcctcagactgagggctattcccggtgcatacatcaagtcactgagaacagtggtccccaaccctcggaccaagaaccagtaccagtccatggcctgttaggaacagggccatacagcatgagatcactggcggcattagattctcataggagcacgaaccctattgtaaactgcacatgcaaaggatctaggtttcctgctccttatgaaaatctaatgcctgatgatctgtcactgtctcccaacacccccacatggggccgtctagttgcaggaaaacaagctcagggatcccactgattctacattatgtgtctcccaccaaggctcccgactccttgcagaaacacatgccatccagtccccagagcttctcttcctggtgtgaaatgcactgtctaggtgtttctcacgccattccatgtgctccagtggaag

SEQ ID NO: 467552 - DNA, 755 bp, Homo sapiens
tgtatataatccttctgagacatgaagatcccaggatgtcactacccgaagaacagtatggggggagccactcccatgattcaattatctttcaccaggcccctccctcaacacgtgggaattatggaagctacaattcaagatgagacttggcagtggtttgtagttctccttgaagaggtccttcatgtccctttatcaccagcagaggctgcagaacagcaaaaattgctggctgctccttcctctggaagcttcatcccaggcggcactggcctgatgtcagccagagctctcctgtatgaggtgtctgtcaaccccagttgggaggtctctcccaatcaggaggcatggggagtgggcaggcaggaatgtttaagtctgctgaagctgcgcctacagcctccccttcccccaggtgctctgtcccagggagatgggtgttttatctataagcccctgactgaggctgctgcttttctttcagagatgccctgtccagagaggaggaatctagagaggcagtctcgctttgccgcactgtgttgagttctgcccactctgaacttcctggtctccttagcactactatattgtgcttcttgaatctgtggattctttttatcaattctggaaaattatcaactattactagccaaatactgctgttttgatatccttggttttttatttcctttcataagactgattacatatacagtgaaccttttcatttctgtcctccatatttttaa

SEQ ID NO: 467553 - DNA, 1219 bp, Homo sapiens
gtgagaagtagtgcggcacgctcggagggcatctgtccccacctcttcctagctgcgcctgcacgctgggaaggctggtgtgagtctggctctgaggcctagccctccctggcaccggcggacccgggctggccaggtcctgctagtgcagatggcattcccagcctttgtgctcgtatctcctctgtcgcgggctaggtgttcctcgggtgatggagcccacctccccagcaccatagccctgaaagccacattctgagtcagagagaaaccaggctggcagcagattccacagccgcggctgtaggactgttctgtttgctctattaagggactctcctcttaactgccgggagggaccccgatggtttttccatttctgtttccataatatgtaccgaaacccacacttcattgaaagcagatggtgaaagcggccctcgacatgcgaggagacgccaggctacgacgcctctgatttgtctgccttctgggcagccctggcaccgatgggggccaggacactggagccctgggactctggacatgagagcaggaagctggataatggaaaacaaacggcgggcctgggacgggaagatcaaaagggaagggaagaaaaaagccaatggaagagatgacatcgggactctccaagcctctcattcccgtgtcctgagtcttacagtgtcaaattcttgggaaagtagtgtgcatcaggcagccgcccctccagaggaaattgggaaagtcatagaactggggttgctagaaaaacagttcttcacctggactcgagcaagggaggaggagcctgtggccatcattaaggggcctcacgcacattccctttctctgggggcacacctagaatggcactgccctctcacctggagctcagggtacatagagcacccacaaactgagaagaccaaaggctcacagaaaaacaggaaaatgatgaatggacagaagagaaaatcaaagtgagggtgtgggggagtaggctctctcccatgttgctggtgggagtggaaatgggtaaaatttaattgaagaaaaatgttgcatatctataaaaattttaaatgcattaccctctgagttgtcaattggctcctaagaatttaccttatggattgcactcttctatgcaaaatgctgtattgtttataatgccaaagcttggaaacaaccactaaaatgtacattccatgaa

SEQ ID NO: 467554 - DNA, 561 bp, Homo sapiens
tctctgtttcatgccagtcttccaaatgccctatgagaagctggcagcccacattttcacctgctttttaattttaaacagccatttcttcaagacaccctggtcccttctatcagagaatggtgttagaaaccacaatctaggtgctgggtgtgtgtgttgttactgggtagtcattccttctaggctcactcagcagacggcaaagaaatatgtgtgtatactaacccacgctacttatttgacctccatgttctcacttattcccaatggctacgcatcaggtgagaattctaccactgaactatccatgcctccttatggctgtgtgacaaagaggatgaccgaagtgacaccagtgatgtcaaacaaggaaggggagacaatgatggagtggatcaaaaaaccaaagaaccctggaaccagatatgggaatatctcttggaagtaactaggagatgttaactggatcactgtgtgttagagctggagggtcctggactgtcatctgacccactcacacgttttgccgatgaagatgatgtagtggcacagagaggt

SEQ ID NO: 467555 - DNA, 757 bp, Homo sapiens
gatcagcagtcatactgtgcaccaggaaagaggtccaagccaagctggagccccttaggagacagtgtaggaactggggctcctacatgtcccactcccacgggagctcagtgagagcccctccagggccagagacccttgctgacacttgttgaacaacagggagacctcaagccacaggccacagaacctttgagcctgtccttcttcctggcacaaaaagaacgggtatgaaccctcttctgcaaagcagaagagcagcaacatccatgcagggtgtcttctgctctcgtgatccccctccagccttgcctcgtaaatcagcccgcgacctcgcctccctggggctgctgcgcttctctgaactcgctccagtgggtccacatctttctgataatgaggtgccagacaggagcggaggggcctgctgcgatccgtgggagcgttcaagccctgtcctggggagcgctgggggtggagcccggtgtcatggtagggagggggccctctggaagcttcagtgcctgaagggctcacataaggcacctcacttctttattcttgcagaggcccttgatggtggacagaccccagcacggccctggacagattgtgaggcacagagaagtcacctgccacctccccaccgtcagaacaatgatggcagacaccaccaggtcctgaggctctcctggcctttgggcactgttcctgctgccttacagacatgatctcattgaacactcatgaacactca

SEQ ID NO: 467556 - DNA, 774 bp, Homo sapiens
tgaggaactcctcccttctcaggcccagtgccaaagagcaaggctacttgcaccagcagcatgcgccagcaagagagcagaagcaggaagaaagccagccggaagacacctaccctggccggaagacacgtacccccgaagatcgagaaagaggctgtccggaaatccacactcagttacaaaagtgaaagtggcctgagaaagaaggggatggcaacttctaacaagatcggacagaaagctgactatctaagtacatctaaaaccatctcagcagaaactgccagcttccatgtgggaggaaaaatgcaaggaactcgcccaaggacaggacactctcctcatatctgcactgaatcctttcatcgacaccccagtcccttccatcctggagggtcccagtcttctggacacagtagggcagtgctggctgtgacccatgagaagttctctccaggaaccctcagccagggctatgctccaatgaatgatggcacggagctagaactcaaatatggctccgggtcaatgatgggctgtgaacacagccagcagaaggagttcaacttttacaaggcaggaggagaacgtggacagcaccagcacctggaagctgttggttcaggtggctgctgcctctccgcagccaatgcccagacaaagtgggctacaggtacccaaaaggcaggagaacccatgggatttagggatactaaatagggcctgagagtctaatggaaaaggtgatatattctgatttcccactacattttc

SEQ ID NO: 467557 - DNA, 3859 bp, Homo sapiens
caggcctggcagtgaggccagtctccataagagccagcttgggttatggccatgggacccctgagaggctggataaaccctgatgcgactcagggcctgagcagccatttctgtccggggatcttgttaccgcccagagctgggccgaggagtgggagacccaggattcctctgttgattgatttccccagaacttttttccccctaccggaggctttggcccagagagagcaacacatgggacctcccttggttgaatcctcaaaatctatgaatactcctgacttcttttctggctcccccgatggaaggctcctattgggcatggtggtcttgctgcttctctcaaataacttccttctgcccgcacagaaaagctgcaagagctcctcaaaagagcccgtggctgtcatctgtgtccttctgcaagggcccgcacaaaggaacagatacagtgaacttcccacatataacaccctggggggagttggacagttgggggagggggtgaaaaaaccaccctgggtacagactgagagcatcttgacaaagggaattcatgtaaaaatcattccacaaggaaccaaccacccagaaactgtggccctcatgctaactcaatgtttatatttcattaaaaacgatttcaagggtttgcgtcttgcacttcatggcccaactcccatgcatacagcttttcatctcactgagcatgtcctggagcagacgagcattcctcacctcttggtttcagaagaaggagcttcttggggaataattccaggttctttttttgcatctataatctaatcaagaatctgtaggtcctaccatcctaggataaatgagaagaaaacaaggatgcaagacccaacaataaaaatattagaattttaaaaatactatactagagtttgcttttaaatacctagtaaagctacaataagtcatgaaattgatgaatggaaagttatataatttcagctgtatattagttgctttttgctgctataacaaatcaccacaaactttctccttgcagctgctccattcctttgtttatggcctattctccattttcaaagccagcaaagttgcatctttttaacttttcttctgcaggaatatcgccttccaactatggcaagaaaaggttgtctgattttgaagatttgtgtgattcatttaggcccactaaaataatccaagataatcttcccatctcaagattcttaatttaatcacatctgcaaagttccttacaaaagcaacatattcacaaattgcagggattaggacgtggacatctttgggggatccatattctgcctatcacaagctatttccagactccaagtagtaaagagagttgaaattcaaaagctcatcagtcaccttttttcactgtcattccttttagcattgagttttaccttaggaaataggacagatgttttcaatacctaaaaccttaaacatagaacaattttacaaatgtcatgaaaccagaatgaatctcttggctgaaagtttttcaattttcaaagaactaattttaattttactagtaaatttgaaatggatccagcttgcctgctgtacttttatatgagacactaaatcacggttctttggaaacggcaacattgaaagcataaactgtcattttcccagaatgtgtggaagggcggatgtggttgatataatgtgtttcttaacacatcttttcaccctgagctcactcccaccatgtgtttatatgcactgcagggcatacagcagccttggtcggtgcacgtgttcgcaagtagtttcgcctatttctcaagcatatattcctacgggtgcctagcaaatgccttagctgaggacaaggtgtccaaggaataagtacttgctgctgttttccaacacacaccacaatttcggctgattctcagcaaagggcatttcttctactctgggatctgtgaatttgctcatggtttttaacaacctgcagcccggctcaagtcatagtctggatcccaatttgaaattagctacattttattagtaagtgtccagaaatggcttggcgggtcattttctgtcttgtaaaatgtggttcttattggcagtaacatgctttttgggcactgactcatgttctctcttcaagcaaatgattccttcaggaggcacacgctatatctaggtttgctgtgtgcaacacatcagatcctggccatagggtgacttagcaaaggtacaggcagtttattgcacacctatgtacacttcaggtcccgtgctaagagttttaagggcattatctcatttaactttacaaaaccctgtaagatagaatctgttaatcatcccattttcagacgatgaaagcaagatttaaaatgacttgcacaacctcatgaaaccgacatgcttgggctggactatattgagactaggtgagccttagtgattatacaccaggatcctctggtgagcttttaaaaccccccacccctggagattctgattttattagtcttgggtgtggcctgagcatggtactatcttagagcttcccagatagttttaatgtcagccaaggttgaaagccaccaagcaaaagcatgttttaagtggaagaaatttccagaagtttggtgaggttcaggtgtgtgtctgctcaagggatgacctgaacaagttcttgttttttcccttaattctttgactttatgaaaaatatttctgagaaaactttgacaatttataaacctctgaaaataaatcataaaaatgtccaagttaggttcttttcgtggtgttcagatgaccgaaaaatgagagacttagaggcatcagtaagtttgcagtcagagagaagaaagtcacactgcagggatggcttcacagttgtaacttggccaaaggtggagaaagtccctttctggacacagacgaagacagggcagtatggaagaaggagaaagggcgtggctttggggtcacacagacctatggttgaattcaagttctgttatttattaatgtgtggcctggaacaaattcttaacttttctgggtctcagtattttagttttttaatctataaaatagcaactatatagcaactttctcatagggtggtcatgaaggttatagtgggataatgtatgtatgattcctaaacactggtcaaagataactgcattttttaaaactgataccagcagttcttcatacatggcctttgcagcatacttacttcttgatttgctttcactataagggacccacctatcctaactatactccaagttagggcaggtggattctaagaccagccctgccactccccagaggcatgactttgggcaagtcacagctttgcagagccacaatttaagccttgtttaaacacttggaagcctctcctaacttcaaaaatctctaaaggagatctttttccttgcttggaatttttgatattcaaattaaatacatcacgagaacatctcatatcatgatttttaagagctgtaatttatagtgcctattatgtgcatatgcatgtgatagcatttaaagttcccaacaactatgggtagtacagggtagtcgatattcctatcctcagtaatgcgtgagggaacagattcaaaggaaaataatttatccaaaggtacacagttgatacattgcacaactgaaatttgaacttgattccaaagctcttggtctcaacatgcctgattccagagcactgctggttgttaaaacagccccgattatgcaaaggtaaacccttccatttgaggaccatgcaagctttttcattttcctcttctttcccacttcccaaattctc

SEQ ID NO: 467558 - DNA, 513 bp, Homo sapiens
aggaaaaccagagacccttgttcacatgtttatctgctgaccttccctccactatttccaccgtgcaatttcaaagcaaacatgggcaaattatggcaagtggataaaaccaaatcatctctaaagaaccctaaccctttagatcctcataagagccctctggattacagatgttcatcatctcattttacaaatgaggaaacagacagagactttaatgaacttacccaggactggatgatagcaccgggcttcgactctgcctggtgggagcgggtgaagggaagcctagaagcaggtctggggaaagagcctgcagtgctccatggggaaggagagacaaggtcgggtcactctgctcatcaccggaggctggcatgctgcctttctaacaggaccatccagctctcagcgctcaccgtcaccagacagcggctgccgagcagatggagcccgcacctgtgcatactctctgtcaaaaagacttcccagaagctgttgtgtcaataacaa

SEQ ID NO: 467559 - DNA, 1098 bp, Homo sapiens
cgaatatgattccagccttattctaaagaaacttggatgagggagaacaagaagcatttgtccttttgtgacagagggtcacagaaacaaggagccagggtgaggagggagtggaggaaaattatatgtttgaaggaagaagatggagaggcagcaaggatgaacattaaaggaggaggggggagagaatacagatctagaatttctaaattacccttggcgcaaagatctggtttaccactcaaacagtataattataaagttggcggatgtgtagctttttcaatcctggccataacattcttcttcatgctcttctcaatgtcctttctcctttcattaggtaaaatggagatgatccccagggccatcttggaaacagtttttgaagttggtagagtctcgggcccgcttaactgctgaaagagtaggaaggggtccgtttcattagcgcgttcaaccaaagagcgctgttaggtgagcaaaaacaaaccagttgtgtctgagccaacacccgtttgtctatgggttgtagcagttggtccacctaatcaaggaagtgccgagagcacaggacatgaaaagacacagcgctaaggtttcctgcaccacaaggttcctttcacttaaaaaaatttttttttatattacaccatctttatttgtaccttaccgtctaaggctatcaatcaaacttcagtaagaacagtttcagcatcaactaacgaacagtagccaaaccagagagcagtcaaaagtgttttaaagggagcagcatcagctgatgttctgccaagtctctgggtgttcaggaccatggtcccccggcacttccaggcccctgtgggctgcaggtggatccccaggagccaaagggccgctcaggaaagggtggaacttggcctcgcaatcagctggcttctgcctattatggtcatcttctttccagaggtcttgctatctcagtggacgtggctgtcatccagccgtcctgggctgttttctcatagaagaggatctccctctgaaaactgtgtcatccttcaattcctgggccaagtctggggacacatcttttcttaaagcttgctgaagctc

SEQ ID NO: 467560 - DNA, 1856 bp, Homo sapiens
cttctgctcttaacctcactcttttgtgcgcctgcgtccttgttctccttggctgtgagaccacgaacctcgggtgatactccagacaacgaagccatttcaggctgtaacccagagaatctggttcttcctggagtatttcagcagggatcagcttaaataggtctacttgaagttcacaactgccaaaaccgcgtgttcagactgaaaggctgggagcatttcagacgcatttatgaacttccaccaagatgatccggcaggctgaaatcgcagggagagcgtctgttcaacaaaccctttcttcttgattgaattagtgttacccactaacaggatgaggaattcccactccacaagctgactttttttcctctttccacctcccgcctccctccattaaaatgtaaacttgattcctgtgtcctttgccggagcctggcttccctgtaagcccatcataaacatcttgcctgcaagcagcagctggtgcccagcgtgcaaatgtatcactaccagcaccagaggttaacagatactacagctggagctgcagaaagagcctcctgaggagctggactctgcagatgagaatgaaagcagtgactttatggtgtacagtctggaccttcaaattggagggggtgaggagaaccctaaagcccaggcatcgatggggaattctggagacaaaagctaattaaagttcatttcaaacctgtggggagaaaaattctagacataaacctaatgtaaagaaacacataaaattttattggaagacaaaagaaaagtggaatgagcacacatatcatgtttttggatggtaagaataaaaattgtgaaagtgtcaatttttttctaaatcatctattaattcaatgcaacctcatgaaaaattacaaagggattgttttagtccattttatgttgctataacaacaccacagactgggtaatttataataagcagaaatttgtttggctcatagttctggaggctgggaagtccaagagcatggtgccagcatttggtgagagccttggtgctgcatcatcccatggcaggagttgataggacaagagagagggctagagcggcatatctgcagttgttcgttcctcctggtgggctcatggtctcgctggcttcaggagtgaagctgcagatcttcctggtgagtgttacagctcataaaagtagcgtggacccaaagaactcaggagcccagctggcttcacccagtggatcccgcacaggggctgcaggtggagctgcctgccagtccagcaccatgcgctcgcactcctcagcccttgggtggtcgatgggactgggcgccgtggagcagggagtggcgctcgtcggggaggctcgggctgcacaagagcccacggaggcgggggaaggctcagggatggcgggctgcagtcccgaggcctgccccgcaggaaggcagctaaggcccggcgagaaatccaccgcagcgccggtgggccggcactgctgggggacccagtacaccctccgcaaccgctggcccgggtgccaagtccctcactgcccagggccgttaggaccggccggctgctcggagtgcggggcccgccaagcccacgctcacccggaactccagctggctcgcaagcgcggcgcgcagccccggttcctgctcgcgcctctccctccacacctctcttgcaagctgagggagccggctctggccttggccagcccagaaaggggctcccatagtgcagcgctgggctgaagggctcctcaagtgccaccaaagtgggagcccaggcagaggaggcgccgagagctgtgaggactgccagcacgctgtcacctc

SEQ ID NO: 467561 - DNA, 606 bp, Homo sapiens
ggtttctgagtggagctgacacttctgtaaggggaactaagtgaatgtggcttccatttcacactcgtgctttccggactgataccaaatctatgagcctgagctctcgaactgtgggaatgggtatcctcgagtatctggcaggggaggagaatggcacagatgaattcaaaccaggaataccgcgtgcaggccagtcagccctgaaaggaaggcagttatcaaaaggaacgcaggcaaagcaggtgatagcagatgaaactcggcgattattttcaaaagaaccagcaggctctgaagtctgcggatgcttctctggcacaccccaaatcttcccctcacatccagtttggtgccaagctgtgcctgtcgtcaaagttcaagagacgattttgatgagaaatgacagtccggtgcctcatgagaaactcaggccggtgccacaggtgaaaactctgaggtcattaccccttctgaattttcctgggaaagggccttggagccactctccactgtgactgagaaactcaagaggagccattggtgtttcaggcttttaggggagatataaatggaggcctgactagtaaaacctgccacccaaag

SEQ ID NO: 467562 - DNA, 1217 bp, Homo sapiens
agacctgaattatttatagtcctccttttgctttacaagccctggggcaagtggttcaggctggcaggatgaaaattggcgtgccccctactatgctacctaaaaaagccatagcctcaccctggacataccttcttcttacttgtgatctgaaattatactatttttacttgtgtacttggctgttgtccagttttttccacttgagtatttctctgattttaaagacatttcccaaggaagtcaaacctgagcctgcaattacactgaggacccttgcaggggaggccaaggggcagtgggcacagaaagctctggaatgtgatcttcagccgggatctctgctttgggatgaacaccaagtggcaaacgggaaagctccagtgggtattcggagcccagaagattctgtaactgggctcttgagcccctatgctccagttgctccctctctgtggagtgtactttcgtcttcaataaatctctgcttttgttgcttcattctttccttgctttaagtttcattatgatgtgttttggtgggaatttcttttagtttatgctgtttgggtttgcccaacctcttggatttgttggattaagtcttttgctaactggagacattttcagccattatttatttgactcccttttcagcttcacattcttttccctctcattctggcagttcaataatataatttttttaaacttacatttttgttccataaatgctaagaattcattcattaaatttttttttagtttattttctttttgaataaactaaagttcaccaattctattctttgttgtctccactttaccactgaattcatacagtggggtttttttagttttagtaattgtatttttcagttctataattttcacttgtattattcatttctataatttcactataaattatagttttttttaaaaaaacgtttctgtttctttgccaagattttctattttatttcttcctagaaaatatgtaagtgtagaagcattttaatgatggctacttaatgttctttatctgataatcccaagtcatgattcatctcagtgctgctgtcagctgatggtcttttctcacttttgtgttttttatggttcttcctatcattaatggctttctgttgtgtcttggatattttgaatattatgcttggcagcttttgattctatttcaacttctgtttaagttt

SEQ ID NO: 467563 - DNA, 868 bp, Homo sapiens
gagagtctctgctctggagaaaagtcaaagtcaactctgttagtacaaggagaaactgcctgcaaggacttcagttatagctctatgagcagccttagaactataactaaaccttcagatgtctgttggattcactggatgcaggaggactcagggaaaataaatcatcctgggcagaggaagattaaaaaagagatgtttgaagttcagtccagaaagaatggggttctcattgcctggagcactggagccatctttgtggtggaaattgcagagagctcaggtcccagagcaactttgaagagaaacctggtgattctggaggacaacgcccatgtttctcaggcactctctgcaaatgtgagcaccgatagggcctttactaaggatgaagttgtggctctggatctgttgtcaatagatgtctcgtctgagagccacgtggctgctcaaaacccacagcagcgctcagagctgaaggacactcgactgactccagcaaagggggctgatgctccctgaccatttaagtgctctgccagctttagaagcctaagattctaaatatattgctggctttgtcgtgtaatcagatacaaaggtgggaccattcctattgacatttcttactctgagtctaagcataagaggtttgttgaaatagaaattggctaattagcatatttccatttctaaaaagtacattgacttcacttccctttgcacttgtgtgttctgcatgttttatgtggagtatttggtgaagactgtctcacaagaaggtcctagctttagcaacttgggggaattcttcagttgaaactccagtttttttctcaagtttacaaaagtacttttgtcatctatt

SEQ ID NO: 467564 - DNA, 1164 bp, Homo sapiens
gttcatacacgcaaacttcacggccagtaccaggcgaccaggatggtcagcgtttgggtttctttactgaagctttggagacgtagcgttcattgtcggcagaaggtgcaagagaaagcacaagagcagggtgttggtggtagtggtaatgacactgatggagacagtggaggtgttgatggagatggtggaggtgctgatggaaatgataggggtactattggagatggtggaggtgctgatggagacggtgcaggtactgatggaggtgaaggaggtgctgttggagatggaggaggtgctgatggagatggtggagaggttgatggaggtggaggaggtactgaaggagatggaggaggtactgatggagatggtggagatgttgatggaggtggaggaggtgctgatggagatggtggaggttctgatggagatggtgggggtactcatggagatggtgaaggtgctgatggagatggaggagatgctgatggaggtggtggaggtgctgatggagatggtagaggtgctgatggagatggaggaggtcctgatatggatagtggaggtactgatagagatggtggaggtggtgatggagatggtggagataccaatcacaagtcccaggttgttttacctgtgcttatgaccaaccactataaatcagggatcccacaaccccctcctctggttccagtaatttgtgagatcgactcacaaaactcagggaaatacttacatttacttacattcattataaaacgtattacaaaggatacggatgaagagatgcatagggtgaggtatgaagatatgacagcagaacaagcccatcaaaacttgagtgtctgtgtattgcaagaactggaattggtattttggggcctggaagagctgaaaatcaaatcaaatgcccaggtcattgattatgtcacatgcattgaacactgagaaacagtcttgggaaggatctcgatccttgtttggaatgtctcctgcataggagatagtgaggaattttacctgtagattaacaggaaaatgacttgcatccaattgcatctgtgaggcaagactttgaatatataaagagcaatgtttgcatacaatttatttttttctctacctaatgctctggaaataaggagctggaggagt

SEQ ID NO: 467565 - DNA, 594 bp, Homo sapiens
aggagattgtaaaactgcattagatttcagaatgagggggcatagattccatggaaacctgaaaaagtaccattatacctgtgatacagtcccagaaggaggctgctacctggcctgtcccagttccactccaaatgacatttttccatgttgggatctgcttgtccctggtgttaaagaatgtctcctgcaacacttgcaaatgtgggatgaattgtccagggtttctgcagacagaccaaaggtgatgatcccacatcagcaacaagagtcaggaggaagtcttcagaagcaggaatgcatagatccaagaaagggctcacttgcctggcaaacacctcgcggggaaggcactcatcctcctgagagcccagaggccaccagcacagaggaaaagaccctggttctgcccctgagtcagaatccaggttctgggacttgctcctgtctagatatgaacgagtgtcagggtttatctaaaactgtaggaattggaccccatgtaaactttctcatctgtacaggtcacaagtcacctgagattcctgcaaatcattcggatacctgggccccctcttgaggatttgggattag

SEQ ID NO: 467566 - DNA, 1058 bp, Homo sapiens
agtaacaagagggagtgggtatctagcaccacatgacctgacttgaagactaggggagcctctgatgagtatggtcaactgtccgttcccagagctttggtttcctcatgctggcagatcatcactgatgtccattccttccaggtgtttacggttgacgttcactgttctcttccacttgcggaagcagcaccattgcccctgggaagacctgcactctcccgagcacagagaggtctgctccgaggctgattccttccagtacttcctgggtccttgtcccaggaggagttattggggagagagtaatactgcctggtgggcttggaaagagaattccttagtctcctctcagtcccgcaggcatttggctcatgagataaggaaactaagacataccagcaaccagcgccagcattactggctgagaaatctcgttgacttcaggtcctacctgcatcactttcccatgtccaaaatatcaagaaacacattcaggaaacttaaaaaataaaagcaccttcttgagataagaaatattttagaagaagcctaaaaataaaatatagtcatgatctacatctgcccaggtgtcagattgacgtgtctgaattttattggagaagccctgctgcttgatcgcaggcaagaagttttaatctttgaagttccatttcttaatctataactgctctggccaatatggtaggcacttaccacttgaacagtactgtagggggaaaatacactctggacttcaaagatatagtaccaaaaaaagaatgtaacatatattatgaatatattatcaagcatttatcattgataattttaataacaattacatgaagagattattatattttggacatactgggttaaagaaaatatattattaaaattttttaaaagaatgcaatcatgatctgaatttagccagactgcccttgcatgctgaatgtaaaacaattctggatttgagaagagattaagtaggacccagtgaaatgctatgtttctgtgctaactatggataggtgagtccagagagagaaacc

SEQ ID NO: 467567 - DNA, 610 bp, Homo sapiens
cctggagaggaacaaggccatgcatgtggatctgctggagaatgaggctggcaccaggctctgtttccataacctcaggacaaggcggaagtcgctgttcacatgagagcaccttggacaagtgtcacatgggcagacagctgggccatgggttgggaacagaggtggagcacaggagtgtggggaattttcaccaggtttgcctgcatgagatgggaagccatggagttttcacaaggctgctttacctcctcagtcacgttgggaagaaacaaagaagtgcccccagagacaaaagcaaagactgtcccagaagctataacaaacttctttttacaactctttgtacagattcacatcacatggtcaaccacggctacaggtgtggaaactatacaaacaactaaattttctcctttgatgattttattttaaatccttattttttttttttagtccatctggaatttcttttggtgtaaaccatgaggtaaagctctaacttcgtgttttctagggtcaacctgttatcctggcacaacttagtaatcatctattcccctctaaatgaccttgctacctttatcatacgatactgaatttgggggga

SEQ ID NO: 467568 - DNA, 944 bp, Homo sapiens
tccacttccgcttaatgaatagaaaggattactcgcgcctcgttagaatcagacatggcttcaggggatgcaggacgctcccctgagctgcctgtcaccgactaagtggagcagtgtttcttccgcagactcaactgagaagtcagcctctggggcaggcaccaggaatctgccttttcagttctgtctccggcaggctttgaggatgaaggctgcgggcattctgaccctcattggctgcctggtcacaggcgccgagtccaaaatctacactcgttgcaaactggcaaaaatattctcgagggctggcctggacaattactggggcttcagccttggaaactggatctgcatggcatattatgagagcggctacaacaccacagcccagacggtcctggatgacggcagcatcgactatggcatcttccagatcaacagcttcgcgtggtgcagacgcggaaagctgaaggagaacaaccactgccatgtcgcctgctcagccttgatcactgatgacctcacagatgcaattatctgtgccaggaaaattgttaaagagacacaaggaatgaactattgaagtcctcagcacatgttcttcatggaggtcatctttccctggactgcttggctactttagaagtcaaatcaagactagaagtatgaaagccaatcacaatttcccaacaattaggatccatcattcaccatttggttggtccctgctgctaagaattccaaactacaagggaaaaagttaaactcagctagatttccctgcctgctcaagaccacaaccccagtggcaacataattcttggtgaggatgaaaaaacgaaatctatacttgccttgagaaagcattcatgcaaaataaagcccagattcataagtaatctgacttcagcatcacttttcaaaacagtatcctgttaccagct

SEQ ID NO: 467569 - DNA, 850 bp, Homo sapiens
aggcagggctgtgcacagtcaccaccgctggatttcaaagttcctgaaccaagatcgtctgacctgttctccggctctttggcaggttctgtctccggcaggctttgaggatgaaggctgcgggcattctgaccctcattggctgcctggtcacaggcgccgagtccaaaatctacactcgttgcaaactggcaaaaatattctcgagggctggcctggacaattactggggcttcagccttggaaactggatctgcatggcatattatgagagcggctacaacaccacagcccagacggtcctggatgacggcagcatcgactatggcatcttccagatcaacagcttcgcgtggtgcagacgcggaaagctgaaggagaacaaccactgccatgtcgcctgctcagagcagaaaataaaccgttttaacttctctttgccacatccaggagtcctctccttattgaagggagatacatcccaagacccccagctgatgcctgaaactgcagataatacctaaccctgtatatactatgatttttcctgtacatagataccaatgacaaagtgtaagttataaattaggtacagtaagatgttaacaatcaataataatgggataattataacaatatactgtaataaaaatatgtaagcaccttctctctgactctcaaaatatgttacattgataaaactaaccaaccactgctgagtgtaaatgaaaacttggaaaatgaaactgcagataagggggaactattgtacaagataatcagtatatgggtttgaatgtttgaatgactgaataatatgttaagttacctagtatattgtccctaccct

SEQ ID NO: 467570 - DNA, 874 bp, Homo sapiens
tcagttcctggggttggaaccactctgtttgctttagctggtaacaggatactgttttgaaaagtgatgctgaagtcagattacttatgaatctgggctttattttgcatgaatgctttctcaaggcaagtaaattaatcactaatgtttattacaagcctggtttgtgccaggtgattaacatgcttctaatacggttgctagtccttaccatggctgtgcatggcaaatactgttattcccattttacaggaagtgaaacagagaggttcagtgtcttgtctgtgctcacaccaccagtcacagaggagttgggcttagctctggcagtctctcaagggcgccctgtctactccccactctgtttgcacagctattggctttgctccatcaccagggacagaagacctggagctaagggaaagatgacctccatgaagaacatgtgctgaggacttctggtgaggttcagaggagaataaacagtgagaagaggaagggctctttgcaaaacttggcctagagctccaggcctgaaaatggtactggacaacctcaatatccaaccataggggagagaggaagtgaatcacaggtcagcttttggaaattattttctatctattctacaaagaatgtagattattgttatgaacagagcctaaccaataagctacatttcagatactttatagccactcatggctagtggttctcatgtttgacagcacagatggaagacattttcatcatcacggaaacttctattagacagcactggtttagaaaaaaaagacagtcattaattcactaatactttaagaaggattggctcttaactgtgggatcaccaatgctcttaagtctttgctgc

SEQ ID NO: 467571 - DNA, 600 bp, Homo sapiens
tcttaagaagtcctatccctatggggcttctgtcatatgaacgcttgttgcccgctgcgcgccatggccgtgttgctggcggtgctgggcccggcaggcagggtgggcgcctgggtccggccttgcgccacatggctcctgggcgcgaccaccccctgtgccccgctgcccctggccctggccctgctcctgcccaggccagatgcccggctgctccgcacagccgtggggactgccgcggcagccaggacctcagccaggccacggagagaacaggcagcagcgtcagctgcacagaggagaaaaagcaaagcaagtcacagcaactgaaaaagatttttcaagaatatgacactgttggcgtgtcgttgtacactggaatctcattcatttccttggtcatattttacatggttgtgtcaagtggtgtggacatgtctgcagtcctgctgaaactcggatttaaagagtccctcgtacagtcaaaaatggcagcaggcacaagtacctttgtggtggcctatgcaatccacaagctgtttgcgccagtgagaatcagcattacgttagtctctgtgcccttgatcgtcagatagtttc

SEQ ID NO: 467572 - DNA, 1484 bp, Homo sapiens
cggtctgccggtctggagcaccggacaagagacagtgaagaattatgatccctgaaagacagaaaacaaatgaagtgagtcctataatcatcctcattttcttcatggagacattttccaaaccacagaatatgaaggatcttgtgcaacaagagaggccagagctggaattggacccccttgggatctgctgtgggatggaggctggagagcccatatcgaagaatcagaggggcactttgtttcccaacacgtttcagcatagatgggacagttacctgatggcagcaggagctgagaccgggcctccttggaatctgctgttcactgccagaactgatgtcagcaggcaggtgagcctttccaccaagatcctagtatgtacaattcctcctggacctttggaagatggttttggttgtaggctcaaggccaaacagggctgtagtcaaagcccttgtgggactgggccatttctgtgcttgaacttgggagcacactcaatggattagctacctggctgttggtctgcaatctcaaaatgactctcataggtcttgggctcactggggtttcacaaactccaacccgaataatgaggctcctgcagagagacttttgactgtgaataggtatagaatccttattagggggttaggagcgcattaccttctattccaccatcttactaatgtccaattatacttcttttaaaacacttttaaatggttgccccagagtttgtaatacacatttacaacgaatacaagtctactttcagataacattattctgcttcagtggtagtgtaaatatcttataagaataatgtattcctaattctgtccttcattcctttgatcatttctgctatttgtttcacttatgtgtaagctataactgccaaatatattgtttttatttttattttgaacaaactgttatctgttagataagaataaaaaataaaaattttcattttacctttacttattccttctacagtgctcttcctttctttacgtagataggagttcccaacctatatcattttcctcctctccaaagaacattaagatttcttgcaaggcaggtctgctgccaataaatcccctcaatttttgtctctttcacttttgaaggataattttgcaggatacaaaattctaggttggtgttttgaactctcaacactctaaatatttcactccactctcttgttgcttggttagtttctgaggatgagttgaatgtaattcttatctttactcctcaataggtaaagtagttttctcctttagattctttcttgtttttctctttgtttttctgatgtttgaatatgaggtgcttggtgtagtattattattataattactgacatttatcctgtttggtattctctgagtttcttgggtctgtggtttggtgtctgacatcaatttggggagattttaagtcattattgcttcaacaatttcttc

SEQ ID NO: 467573 - DNA, 618 bp, Homo sapiens
ggccagttactcctgcgggccaaagccatgcggctgctgtactacctgaagaccgaggaccctgagtacgacgtgcagagcaagcagtggctcacccatttgctcgatcaatttaccaacattaagaacatcttggccttgaaaaaaattgaggaaggtttagaccttcgaaatctggcaagtgacgattcctacatcacaccatattttaacgtagaggagaattatttttcagattatggtcccagggttatggttattgttactaaaaaagttgactactgggataaagatgttaggcaaaaactggaaaactgtactaaaatttttgaaaaaaatgtctatgtagataaaaatcttacagagttttggttagatgcatatgtgcaatatttaaaaggctggtcttgaactaccgacctcaggtgatctgtatactggaaattttaaagccatgcacatgctcagggcaggacacgtactcagaaaagaactgcacaaactcaaagctttaacctctggctaatcactacagtccagcaggaagtgaaggggatgctgtggctcccttggggtatgcctaccaaggcgatgcttccctggggtacttctcctgta

SEQ ID NO: 467574 - DNA, 1249 bp, Homo sapiens
taatgagccatgatcatgccactatgctccagcctgtgtgacagaaagaccctatttcaaaaaagaaagagagagagagagagagaaaggaggaaaagaaagaaagagagagagaggaaaggaaggaaggaaggaaagagagagaaggaaagaaagaaagaaagaaagaaagaaagaaagaaagaaagaaagaaaagaaaagaaaagaaaagaaagagaaagagagaaggagggaaggaaggaaggagaggaaagagagaaagaaagagagagagagaaaaagagagagaaagagagaaaagaaagagaaggagggaaggaaggaaggagaggaaagaaagaaagagagaaagagataaagaaagaaaggaaagagagagaaagaaagagagagaaggaaggaaggaaggaaggggaagggaaggaaggaaggggaagggaagggaagggggggaggaggaggagcaggaggagaaggaaagaagaagggaggaaggaaggaaggaagaaaggaaggaaggaaggaaggaaggaccataaatacccgaaagagggagggaaaatatatatatattccatatatattccatatgtatgtatattccatatgtgtattccatatgtatgtatattccatatgtatatattccatatgtatgtatattccgtatgtatatattccatgtgtatattccgtatgtatgtatattccatatgtatatattccgtatgtatgtatattccatatgtatatattccgtatgtatgtatattccatatgtatatattccgtatgtatgtatattccatatgtatatattccgtatgtatgtatattccatatgtatatattccgtatgtatgtatattccatatgtatatattccgtatgtatgtatattccatatgtatatattccgtatgtatgtatattccatatgtatatattccgtatgtatgtatattccatatgtatatattccgtatgtatgtatattccatatgtatatattccgtatgtatgtatattccgtatgtatatattccgtatgtatgtatattccgtatgtgtatattccgtatgtatgtatattccgtatgtatgtatattccgtatgcatatattccgtatgtatatattccgtatgtatatattccgtatgtatatattcccttctaggatctgtggcttgattttttcccatcatatttggaaatttttctgcctttatttcttaaaatgttttta

SEQ ID NO: 467575 - DNA, 1432 bp, Homo sapiens
aactaacgctccactttgacctcacacaatgttctaccaagtggagatggggcaaggaggtgggaggaaggacaacaggaaagatttcttcacctacaagagtgtggtctgtggacgagttgcaccacgttgcaatcagaagatgttaaaaatgcagactttgcaaaggctccaattcatttcctccatgaagaataattccaaaagccagtcaacttctctagctcttctcaacagtggaagacagataggtctgaaacggttgcaattctcacaagtcagccttcctctgaatttcccacatggaaaactacatggcagggaactatcaggcaaggctgcagatgcctctaagctccagtccttccagttcagctggctgcatgcaaatctagaacacagtcccctattcctttctccacataccaccttccatcccatactggccttcaagagacactagaaaagctgctgtatcttacttcaggttaattactgctctgtgtcctctactctctgcatgggttgcctagaagcggctgttttactttgctaatttgaggatttttgtttggatgccttagagtaagtgacaagagaagagaggggaaaagtttattttaatgctgctgaatttaatgacaagtaattggttccacaggtactgtattcattgacctttttccatatggagctctcagaaaattccattgctattgatcccctccgattttaatgctataatgatgttgttcccacacacaagggaaatgattatgtgctgtgactgctacactttgaattgtgtgaataattgtgtacatatttatatacatatctttgttgtcctagtggagttctcaatgcacttgaaatggtttgtgaacgtcttttctaaatcccctccagatgtgtcaaatagcatactgtaaatcagacttttctttccatttttttctttttcctttggtctgctggtatttggttttaacgtgccaagcattttggattatacaaaggagattactatagaaggggtttgttctctctgctgtttctccttctcttccaaataactcttttcaatgtaagaagtcaacaagcttcctgtgttattctttggatttctccctacaacattaaaacctttgtctaggccagaagaagagttgaggaggctccctccagcctggcagccagctttcagtctcccctttccaagtgaagaaataaattaaagctgacacttggagtgtgtgtatgcctgctgcctttatgtttgtactcgaatgagcttatttattttttgtccattgcaaaaagatttatgacccttaattatgaattctgacactcttgtgctacatggatgcgcttagattggtttttcactttctgatggctttgaaaagctttccttttcaacttgaaa

SEQ ID NO: 467576 - DNA, 825 bp, Homo sapiens
tgtttgacctctcatctcctccatcacttctgtgaccaattctctctacttgggaagctgacgtgagaggatcggttgagcctgagaggtcgaggctgcagcgagctgtgacggcaccaccgccctccagctggggcgacagagtgagaatctgtctctaaagaaaaaaaaaaaagcagcgaggcagcggaggaggatctgagaacaatggaggaacaagtcagaggaacttggggtgagactgttcagggagggagcaaaggaggagagaggaatggagcaacttcagagagtgaagaagataatgagctggactgtgatcccctgagggagagtcaagggcctcagcattctgaacgaatgggatcccacagcagggccccaggatgtgcatttactcactgtatcccagaagctacttcgtctaagtggaattataagacgtctgtcattttgtttggcttatgtcacttagcacaatatcttcaaggttcatccatgcggaggtctctgcccactcagcaattgaccacatttgaccttttgagcttgggcaaacttggaagaatgcgctggcagggagttaactatatggagaaagatgactcaggatccattttcatccttgcctaccataccttaaaggaaaagaaattttcctaattgtggttatttacagcagtgtaaatcaagcaaatgccatgaagtgccaatacaaattttttaaaaatcagccttaaatagctaaactctcaacagcagctcataaagtgaggcttggcagttgttaggtagttatggttgaattgacagtcctttggggaa

SEQ ID NO: 467577 - DNA, 1466 bp, Homo sapiens
tttcgctacttatatttgcggtaatgttaggaagcaaagtatcatcaatcagagaatctgtgcgaagggaaaagccccgtctgctccacgactgcaaggccggcggatctgggagccgcgcccggctccggaggactcggcgggcccggggctccccggcagcggctcctctgctaggggttaacagcagcccccgcggccgggcgggcgcggacgcttcctctccacccgcccgggaacgtggataccgcgcccgcaggatgttcgccggctgggaccggcagtcaggaaacatgagaaggcctcgctattcctgttcccgggcggcgcgcgccgggctggcgcgctggagcccgcgtggagaacatgcggcggggatgggagtgcgcctagtctcgaggcgggagagccagccgccctgcagccggccgtcggccccgcagccacagccgagccccgctgcggagctcccggcggcccagccccgaggctctgcggccgcgccgcgcgtccctaccaaccgacaccatgaacaccatcgtcttcaacaagctcagcggtgcggtgctgtttgaggacggaggcgcctcggagcgggagcggggtggccggccctacagcggtgtcctggacagtcctcacgcccgccccgaggtgggcattcccgacggcccgcccctcaaggacaacctcggcctgagacaccggaggaccggcgcccggcagaatggcgggaaggtgaggcacaagcggcaggccctgcaagacatggcgcgacccctcaagcagtggctttacaagcaccgtgacaacccgtaccccaccaagaccgagaagatactcttggccctcggctcgcagatgacgctagtgcaggtgtcaaattggtttgctaatgcaagacgtcggcttaagaataccgttcgacagccagatttaagctgggctttgagaataaagttatacaacaagtatgttcaaggcaatgctgaacggcttagcgtaagcagtgatgactcatgttctgaagatggagaaaatcctccaagaacccacatgaacgaagggggctataataccccagttcaccatcctgtgattaaaagtgagaattcggtcatcaaagcgggagtgaggccagagtcacgggccagtgaggactacgtggcaccccccaaatacaagagcagcttgttgaaccgttaccttaatgactctttgagacatgtcatggccacgaacactaccatgatgggaaaaacaaggcaaagaaaccactcgggatcttttagctccaatgaatttgaggaagaattagtgtctccatcgtcatcagaaactgaaggcaactttgtctatcgcacaggtaagtccgtgctttctgtagtaattcctgcgatacctgtttaaagcacaattaaaactgcatcagagggatttattttaacaggtataaagacatcaga

SEQ ID NO: 467578 - DNA, 1165 bp, Homo sapiens
atatgatatgatatgccttaagtttattggctttgtaaaacctgccacttcatcctgacaacattttggatctaagaagttataagttgaacaactcagcatcagttgtttttacactgaagtgttatttaaaagaagcagatacagtcaacttcacaattttatgaacacttaaaaaaaatgaattgacaagaagagacagagtctcactctctcccaggctggaatgcaagtggtgccatcatagctcactgcagcctcgaactcctgggctcaagggatcctcctgcctcagccttctgggtgactaggagtacagagctccagagcaccaccccactgtgcctcattcaggaagtgctgtgatcaagaaaccactactgctgctggtgccaggactgtgattcccatcaacagcactgatggcctgcacctcacctctgacacccatgggactcttgtatgtggacaccagaaagtctgctaattctggaacaaaaacctgaaatgtctccatgagatggactgctgaaagaaatagaaaaccacagaggtgaggcctccaccgtacttccaaatgctgtattgcacatggaatgcatttgatttgtcagatcaatcactttcagaatccaagctgcaaaggagttttggaaacacagaccagagttttccagcctctgtcagacgagaaggctaaaaaagattggaatggatgatgggcattcatattcacataaattcgacttctatatatgtgatgatgaccttgctctgttgcccaagctggaattcagtgggaaggtcgtcctctttgaccaagcatgcaatccatctcttgaacagaggagtggtaaggaatttgtggacatatttcagaaccaccacaattgccatcagaggacagtgaataaagaatgtggagggctgggcctgccgttctggctctatttggaagcccgaggctctggacagcaaaagagtgctcaggaagtaccagactacctgaggcattttactggcttcctgcacaggcaccccattaagtatcagccctgtgggttggatgacatggatcccaccatgttccagtctacacatgacccaagcaagtcagcataaatccatctccttactagtgcctggttctccagggatgaacaca

SEQ ID NO: 467579 - DNA, 942 bp, Homo sapiens
gcggctttccacagtgcattactcaagtcctagcaggcccctgaagtcacccctatcatcacccagtaggctcatgaacaaagtggccgtggtgccagggatggaggtgccagggatggggtcagagaaggaggatgcatggactcagcagcatggacttccactcaccaaggttgagctggctacagttgctgagtacccagtctgcctgtggcagagattaacacttaagtccccaatatggcagcattcccagggtgatcagtcggatgggtggaaagttgattataatggaccattttcattatggaagggacagcattttgttatcaatggaatagacacttgctctggatgcaaatttgcaattcctgtatgtagtgcttctgccaaactactacctatgagctcacagaatgtctaccatcgtgatattctgcacaggattgattctgaacaaggaactcacttcagagtgaaagaagtgcagcaatgggcccttggtcgtggattttactggtcttactatattagccatcatcctgaagccgctggcttggtagaacaatgcaatggcattttgaagactccatcacagttccagatgggtaggaataccttgcagggctggggcaaggagctgcgtatgggtgccaagttgacacaggataaatttgtgatgggttattttatgtgtcaatttagttcaagatgcaattgtccaataattatcctgaagactgccataacgctctctcctgttccttgggctttttgtctctggggctggagctccctggaacatatcctggctggacagcatgtttaacgagctaagatttcccccttttacttttctccatagagctgctcctgattgattttataccaaggattcttcaaaatttctggtgcattgattagactttttttttcccatac

SEQ ID NO: 467580 - DNA, 486 bp, Homo sapiens
caggaaaacggggctgcactgacaccgcctcaaattccacatggctggggaggcctcaggaaacttacaatcatggcagaaagcaaaggagaagcaagacaccttcttcacaaggtggcaggaaggagaatgaatggaggaggaactaccgaacacttgattcctgttaacctgcaagcccatcatcttgaatatctcagagtaaacagcaccctcttcgtctggctccacatcaaatcttcactctctctcaatgaaagccttacctacaacctggctggtcttgcagcctgcccaaccatggctacccgttctctcctacctcacacaactctgcacaaggctctgccattttttcccctccttgccactgtcatccaccagccagcctccagcccatcccactcactcattgaaggtttggacgactggctcacagttgctttacatctcatttcctgctgtcatgtgatgtgacctcagtgt

SEQ ID NO: 467581 - DNA, 774 bp, Homo sapiens
gggagccagcgagggtcctgacagcagctcactggacaccagaagacgccaaaagcagacaagtcagctcagagtacgggggtgacacagggtgcaggctgctagcacagtgccgccccatggcccagggctgcccgtgctggcaatgctcttgccagcaagaggcgagagttgttgaggtctgcagacttgggggcaagtgaaggcccaagctgcccgagaagagcaggggtgtcccatggggaccacactgaactcttgcatgtgcaccaaagccagccccaatcatggccggcacaagggttctgcaggaccagcctgtggctctcatgtctaccagcgtacagacagcaaagacacacgacacgatatacaggagcagaggcgcccagaacacgctgtcccccaatgccagccacaagcggggccagctcagggtgtagtgggtgaagccgtcctgcagctctgtgatccacaaggcggaggtggcagtagcacaggactccaccgctttggaggctgcccagtcgaatttgggagccaggagaggagcggaagaccttctggtgtgggctgggcagcaattcacttgaaggagaaacagcccgggtgtggagaggcggctgtccttggagggatcctttctaaggagccgagaaatcaacgtagagcttcctctatctgattctctaacaactgcagaccttccatgagtcaagctttgtgtcaaaaggacaaattaaaaggcaagaaaataaaatcataataccagga

SEQ ID NO: 467582 - DNA, 567 bp, Homo sapiens
cggaatatttttaaataaaatgtgtcattttttaagcaagagatcttactctcctcatcttcaaaatgaggagttatttcagtgctgtgaaaaatccagatttttgggtctatactcatcttgctgaatcagcgtctctagggctgtgctccaacaatttgacttttaaccaaaggaaggaagagtttacctgccacttcctgggggtgttgctggaacaggctctggacggtcaaccctctttgggcattgccttagctgaagaaaatctctctcaggatttgcccccttccagggacagcttgcagccagtgactgatcaattggaggaccggctggcaggatggaaactcagacagcatttccaagttacagtcttgaggcagaattccttctctgagaaacctgtttttgctgtaaagacctcaactgattggatgagacccacctataataccaaatgtaatctctttcaggtcaactgattataaatgttattcatatttatgaaatacctctgtagcaacatctagactagtgtttgcccaaacaactgagcattataat

SEQ ID NO: 467583 - DNA, 571 bp, Homo sapiens
ttgctctccagacaagacaaaattgtgcctcttgaaaagcatgatgtcagaatgtgccaagatcagcaaagataaaatcttggcacagaattcctccatcctgaggggcaaggagacaggacccaatgacaggttttccaaacgaccttctgcagctgagcggtgggtgctcaccttctcagcaagttcagttgccctggaactcctaggcaagcagaaaactctggaaacagaaaccatgaaacctacggagttcccagaggaaactggaccacccggaaccttcctaaaaccagtgataactgaccaaattacaagtcaggaaaatggaggaaagaacagaagaaggatgaccatcctgaaagctcccaggacggctgagaaagacatggccagggccctgcccctgatcttctgcgtcatgcatcatggttctccagtagctcctactcttcacaaccagtgtgactggacagccacgtgagaatgccatttccctggccattcatgagctggaatccagtagtcactcagaaaatactaattccttgtcccttcctttcccatcaat

SEQ ID NO: 467584 - DNA, 692 bp, Homo sapiens
aaataaataaataaataaataaataaaatcagctgcagcaggatgaatgcttggttcacaggaataagcaggtctcaggacatggcaccctgcatcccagctgctccatctccagctgtggctaaaagcagccaaggtacagctcaggccattgcttcagagagtgcaggccccaagccttggcagcttttacgtggtgttggacctgcaggtgcacagaaggcaagagttgaggtttgggaacgtccacctagatttcagaggatatatggaaatgcctggatgtgcaggcagaactctattgcaggagcagagccctcatgcagatcctctgctagggcagttggagaagaaatgggttggagcccccacacagagtccccatgggccactgccttgtggagctgtgagaagagggccgccctcctccagatcccagaatggtagatccactgacagcttgccccatgtacctggaaaagctgcaggcactcaatgccaacctttggaagcagccactgggactgtaccctgcagagcctcaggggtagagctgcccaagaccgtgggagcctaccccttccatcagcataccctggatgtactgtgctagacactagaggtagacatcattcctgccatcatggaacttaactatatcgttctaaagaaatcggaacattagtattttg

SEQ ID NO: 467585 - DNA, 609 bp, Homo sapiens
ctggtgtgtcatgcctaatgacgaagctgaaatcagaacccaagtcactgggtggccagcccagtgcccagtgccacaaggtgaccagtctcccgtagtactgacttccaacactatggaaacaaggggaggagaacaggggagaggaaggagcatccgactccacagcgggagatgggctccgaatttgtggctcacaccctctcttcaacagcacagagaatgcttcgccctgtttatctgccctgaacccttaggttcaggttgtaatgaggtgcaaactcacgaaactcatccaagtggagcaagtctgcttcctttagaagaggagggcgggaagaaggaggagcgaaaaggtggtaaaactatcagaaagtttgcaaatttctgtcgggctgcattcaaagccgtcctgggccgcttggagttggtagactgtgggttggacaagcattctttagggactcaacttttagcagatgtcaggatggttgaaggcccttaaccctacaggtcatttctgtgtatgttgttgttataatataatccgtactaagcaaacatcatccaaatctttccaaatagttttcaagaagatatgaatttatt

SEQ ID NO: 467586 - DNA, 529 bp, Homo sapiens
atccgaggtctggaactgcagattggggcttctacctcggcctccagcagagctgtctggtttgtatgccccaccctgacttgtttgtcatgcagttgtgtttgaagaaatcgtcctccgttgaggatgctgttggcctgctcactgctggctgcctgctgggatttcacagtccttgcccctcctccagccagacctgtgactttgctatgccgggctctggtcacagtggccacctctccggtcagggtgtataccttcaatttgttctggaaaaagtccccataggcaccctgggcatgtgtgggaaacccaagaatgccagggtatgtctcagagctcagctcagccattgctcccattcagggagacttgtggaggccctttctttgtgtccagtggaagataccaaaggcctgtgtgaggaagggggtcacccagccgggacaaaccatttcatcgcatctttcctgaggggttagaccaggcaggacaaagccgtgggtctcgagcacattccttgtcctgc

SEQ ID NO: 467587 - DNA, 538 bp, Homo sapiens
tcaggtggaaaacaggatattgcttttctcctcacaaaccacaatgagctgtgggccactgtttttaatacaaagggagatgctgaaaaccaggcccaaattggattgtaaagatgtggaggcacaaggtcctgggaaggagtggaaactagagcctgtgatgaggccttctgggactggcaggggtgagggtgggggttccctgcttgataggggagggcactgtcccattgcctggagaccttgtagccctccccagggccagatgccttgtgagatgatgtgtactttccccatgatctctcttgccttccctcatagctttatgccagtaactggcatctttacacagcctgggctgagcagaaaagcattgtccctgctactggaagaaaggagttattctcctgagtgctgcagggcctgcctcacggatactgacagggactgggtagaatgtgcctgggaatggatcgtgagggaggttgtgaagaccagggaggaagaaggataagcctgggcagtggagagctcattg

SEQ ID NO: 467588 - DNA, 572 bp, Homo sapiens
aacgatggtgaatggcagctaaccatggcattaggaccatgagcctggtcagagagatacaactgatttgtacacatttattatctagcacttcattgggacactactgctctaaaggccctggccaaataactcccaaacgaaacactcaacccaaagttgttttcagcccactgttaatgaagctagctgcagaacgcaaggcctctaaaaggagaggacacaaagtcaggcgagtaggggccattggcaatgctcagagccagccagactccaaacagggagcccaagtggtttctttctgggacactccacttgattattgttcaattaagcaactgactgctcttgactgtcccttccccagcaatagcactgattgtgttgggaaaagccacagagcaagactgcacagccagatggagatggaggagagtttaaaggcaaaataccaaaatggctctctggtaaactcatagctttgaaaattacattgttctaacttttcctccttatgttttacaatgacctttgtttgaattgtattggaaagtccaaaatagccactgacc

SEQ ID NO: 467589 - DNA, 1087 bp, Homo sapiens
gcctgtgtcctatagcaaacattctccctgctgctctgcatgctgagacaatttatatccaggacagtgatacactgtataagttttgttacccatacaacgggtccctttcacctccccttcaccctctgccatgagtggaagcagcctgaggccctccccagatatagatgccagcaccatgctttctgtacagccagaagaactcatcttctcccatcacattggcatagagttcttatatcagatggtagaattaaagattcagtttcccgttcaaggatttcaggcagcaaactggcgaaggagcacatatgaggaacatctcctcgtgcagatggcaacccaagttcggccctgctatatccacaccctgggcacacatcctggacacagttggggatcgtctggggcccacacatgcaggatgtcagaatgtgccaagatcagcaaagataaaatcttggcacagaattcctccatcctgaggggcaaggagacaggacccaatgacaggttttccaaacgaccttctgcagctgagcggtgggtgctcaccttctcagcaagttcagttgccctggaactcctaggcaagcagaaaactctggaaacagaaaccatgaaacctacggagttcccagaggaaactggaccacccggaaccttcctaaaaccagtgataactgaccaaattacaagtcaggaaaatggaggaaagaacagaagaaggatgaccatcctgaaagctcccaggacggctgagaaagacatggccagggccctgcccctgatcttctgcgtcatgcatcatggttctccagtagctcctactcttcacaaccagtgtgactggacagccacagtaaatatcgtgttttttgcagtctggaggatggttgtatatactcagaagaccctggaaaccgtgagtccagagtggctggccaccccagatgagattattcttgatcccagatttcactgaaggaaaccaaagccaataggctgtttgggggctctgcacgtgcgcgtgcgtgcgtgcgtgtgtgtgtgtgtgtgtgtgcgtgtgtgtacgcgcatgtgc

SEQ ID NO: 467590 - DNA, 439 bp, Homo sapiens
acaagattaatttgccataatgaaggtctactccttccccttgatttctttgttatgccatgtgacaaattctactgatgcaggttctgagcagcttcctgctggggccttgcctcatgcctttgcctcacacctctgctggagcttccagagtctgccctggagcttctctaagccatggacagccctgaaacatctttcatgcaactcctcaggcagcccagaaacagccaggaaccattcgccaggagctgtggccaacttaataactcatccttggagagtgctgagtcatgatgtcttggcaacagtcacagcaggacccagaatggagtttacagtgcagatccagcaactggttgggaattctggccctgtgcttttgtctgctaactttaacttggccctgtgttatttttccaagccatatttttaactt

SEQ ID NO: 467591 - DNA, 888 bp, Homo sapiens
gaagctacgcctgctcaggactgacggcactgatggcttttcagagatattcctgctggccaggcacagtggctcacgcctctcacttatgcccaagatgtgcaacataaggaaacaaggaaagaagccctggggtgtagcgggaaacaatctcagagaaaacctaaaggcacccaaaactgaaaccctgcaactagcaaaaggacctgatgtgttgcaggatggggacagctgggagcaggggcagaacggtgacatcaaacaaccaaggtggcctctggggctgtgttcatgtccatgggaaatgagccaccaagagtccagcacattcttcattccaaaagtggtcagtgaccagcaagagataggtggactgactcgcccaaggttgttggcaaaatccattcaagtccagcacttttttcttctcttccataatgctcctgtcactggtgcctgccatcatcccggagttcatggcccgagactggcaaacgccggccagggcgttacaagcatccatgttgactaattgcacccaacatcccaatatcttgccagtggtacaaaaggaataggtttacttactgtgccaagtttcagagctgagcaaatttttatggtctagttataaaccctagaaaaacaaggtttataggaaatgttgacacaaccttaactaaagtggtgctagctgacacctctatattttcaatttggggatttctactgggaaagtataaacgctaattcagcaaaggaagccaactataataaaaatgttgtagtcttcctgttcaccccatgaagttctacttcaaaagatgccagtgcaacgtggaggtgagttagagttagaatgatcagcatggagagcacctgcaaatc

SEQ ID NO: 467592 - DNA, 543 bp, Homo sapiens
tgcagtaggtaccgccgagcagcatgtctcccctggcatgcctgttggagcaagcagcatggtggactgttcgcctgccagcttcttttacatcacatgatctcatgcaccacaggggctcagccctcaataagagcagaaactatgcaaaggagtccaggtcttggaatgatggcctgaattctcctaaatccgtaggattaactactgcaagctgggatccatcagttggagaaggtgagtggtggagaggtggggaggtgaaggaggagcagagtagaggcaacagaagaattcaggagaaaacactacctatgcttgcaaagaagatgcttgcaaagaagatacattctggcgatgcacttaagcatcctccactgaggtatggaggcctagagaagggaaggtgttatggtttaagtttcaggcctgctcaattcaatctcaaacttcaagatgtctgcgtgaagtttctgaagaaatagaaaccccttactaactcagataattaaatggtataaataccgcaccttagaagacctt

SEQ ID NO: 467593 - DNA, 2128 bp, Homo sapiens
agcagctgcctggcttcactcctctttgttctctcatgccctataattttttttttttgaaagctgtacctgatgcattggataaaagaaactaagaggtggttcacactgttctcacaagggctgctcccaatgtttggtactcacagcccacctttcatggaggttcatgtacatgcgtgtgcttacatcttcagcaacactgagcaaaagccattgcaaacttcagaaggactgtgcctcttctgggaaaaatgcaatacactcagaatgaacaatacttgtttggaaccaaatgtaggtttatatattcctcctgcatatcaacagcatcatcatgaccatcatcatcatcatcatcatctccaccatcgtcaccatcactgtccacaatttttaaagttatttgagacttgcattcacagttttatatctgattataaactgtcttttgaaaaggaccaaagcaagacaaaatgtctgtggaagacaaaagtctatagccactattaaagctacaattgactagtaattttggttaattttgtggcatacaacaattttacataacaattataattattaataatgtacactaaagtatattagaattatatgagttacccataagttttagaacacatactaataacatatttatacaaatatagtttaaagaaaaccaaacaccattcacttttttatttgaaagttttctaatatcataatctccagagttattaatcagaaacttgcatttaagagtacgtattaaattttatagctgattataaaaccattttttaagaggaccaaaatgagacaacaattgtctttggatgacaaaatcactttagggcagccaccgttaaggacaggattgacaaggaaattagttacctctgtggcacacaaccatttaacataattataattattactgacaacatatattaagtcatattagaattataggagttttacaaaattttgcagcatatgccaataatacatttatacaaatatagtccaaagaacgctaaacaccatttaatatttgacaatgtttcctgtatgatttttatacagaataagccaaatgttatttctggactttagaggacctaatatttaaaagattaagctagaaagagacataatttacaatttgattttggaaagtttgtcaaatatcaaaagtttagaatactggatatcacgaaatagaatctcaggtcaccataagtcattcatttggccaaaatgataatttcaaaatcttaaaaagaaaaacctttactctgatagaggagacttagctttccaaacaagacccaataaaaataacatgaggctaactgaaattgtctcttttttctccttcctttttcccctgccatttacccaaaggagaaaacaaaaatctttcattattttttaatattacataccaattgtcttcaaaagagaaaaccaaatttcatgctggcattagtgcatctttaatgttaaagctagttttttaaaataaaattttatatcttcatccagttttaattagtttgaccataacgtaacattttcataaactttttagaaccctttacaattttccatcaaatagcagatcagtttttaagaaaaccctgttattcggacacatgggcccagattctggccccatatcagtgtgattttaatgttttaacctgcggaaaaagctaattttttttttaatcttagccaacttgtttttacccacagaatttttttttcaagattaatcctttataaatcctttttattttgcttaaaccttcagttttgttctattacttttttaattgaagaaagtctttaaaaccctttgtattagacaaaattacattccctttaacaaaaaccatattcctatgcctttttataattttttaccaaaaacacattccttatacaccttgtatgtaaaactgtctctttagtaaacttaatttcatgttataatgttaactcttagcaacttttatttttagtgaaaaacctgataagtaagcgattttaattatatactggggtagagctagggcatgagacagaagtgaagataaagtctggcttttttcagcat

SEQ ID NO: 467594 - DNA, 658 bp, Homo sapiens
tttaggttaagtgacaccgaagtgtgcatagagaactcaggaacctgtctcggtgaggttgtcttgcaggcagaagtgtgggagtggtttggagaaagaagcccgtgctttggttttaaacaggcctgcttcccactctcacatcaaccatttggcacctgactggtcaggtacagccagggccagagttgaagccatgacaatcccgttagacccacatgcaaggggacttcatggggaagcagaggtggttaaagaagaagagaatggaggacagcctcttgacttcctaggcttcactggaccaaagcctaatccagaacaagaccctacccttttcaattttgtgaaggttgagagagatgaggaagctgcagaagaaaagtttgaacctagcagaagttggttcatgaggtttaagaaaacaagctgtcttcataaaatacaagtgcaaggtaaagcagccagtgctaatgtagaagctgcagcaaattatccagaagctctagctaagatcattgatggagatggctgcactgaacagcagattgtccatgtagatgaaacagccttctattggaagaagatgccaggagatgtatttggtgttcctacgcaggaatgcctccactgaatttttggatttattctcagtcat

SEQ ID NO: 467595 - DNA, 1267 bp, Homo sapiens
gcgcagtgtctggcactttcatcagctgcctccaacacttagttgatacaagaaaaagcagtatctggggagttgatgggcttcaagatggaaaaggacctcactacactacagaaaatttatgcaatgaacctttctcccatcctttcccaaggagatctcccaaggagatttactggagtaattgagcaatggggaaagggaaatgatcagacatttcaaaaactactggaaattggctctgagctgatgttgattccaggggacccaaaacatcactgtggtcctgcagttaaagtggggtcttatggaggtcagataattaatggagttttagcccaggtccagcttacagtgggtccagtgggtcccctaactcatcctatggtcattgccccagtgccagaatgcataattgtcataaacatacttagtggctggcagaaaccccacgttggctccttgactggtaggaaaattggtgaagaagaaatttggagaagaggtatgtggatgaaccatcctgagtggtcaaaaactgtgaagatatttgtatcccatgtgagtgctcaccaacgggtgaccttagcagaggaggtgtttaataatcaagggaatgggatgatccattctgtggacatcactcaacctctttccccagccacccctgtcatcccccaatgggatcatgaacaaagcggccatggtggcagggatgaaggttatgcatgggctcagcaacatgggcttccacccaccaaggctgaactggctacggccactgctgagtgcccaattttccagcagcagagaccaacattgagccctggatatagcaccgttcctcagggtgatcagccagctactttgtggcagcttgattatattggacctcttccatcatggaaagagcagaggtttgtcctcactggaagagacacttactccagatatgggtttgcctatcctgcacacaatgcttctgccaagattagcatccatggactaacagaatgccttaccccccatcattgtattccacacagcattgcctctgatcaaggcacttactttgtggctaaagaagtgtggcagtgggctcatgctcaaggaattcactggtcttaccatgttccctgtcatcctgaagcagttggattgatagaacggtggaatggccttttgaagtctcatttacaacaccaaccaggtgacaatactttgcaggattgggacaaagttctccagaaggctatgtaagccttca

SEQ ID NO: 467596 - DNA, 492 bp, Homo sapiens
gatgtactgagatggcttaggcacaccggctcccaaacctggctgacctctcatgcccacagctgtggaagctcagagatatctgcgggcagccctgggtcatgcacaccagagctctaaggtttatttaacacatgattcaatgatggctctcccttcctcagcccccagctattcctcaaaagacagaagccacacaaattcaacaactttaaatagacatcccccgcaggttctctgcacagtctactttgttgctttctcagcaagctccatcctgtccacctgcttcatttctccaggaaacccagtttgtgactctcctctgatcaaccagcttcctcttctagaccttcacttaccatccagacctcctacagctgtggcaagtctaaatcctataataaatcctttattccacagtactcattatgaatttccttccctgattgaaccctgactagtaggaaatgaggaggcctctatatgccc

SEQ ID NO: 467597 - DNA, 611 bp, Homo sapiens
gatccttgatcgatcgccacactgtcttccacaatggttgaactaatatactctcccaccaacagtgtctgctggagttttctggaggcccactccagaccctgtttgcctgagtatcaccagcggagcctgcaggacagcaaagattgctgcttgttcctttctctggaagctttatcccagaggggcacctgccagatggcagctggagctctcctgtatgaggtgtctgttgacccctgctgggaggtgtctgccagtcaggaggcacggggtgctctgtcccagggagatgggagatttatctataagcccctgtctgtggctgctgtctttctttcagagatgcccttcccagagaggaggaatctagagaggcattctggctacagtggctttggtgagctgctgtgggctccgcccagtttgaagttcctggtggctttgtttacactgtgaagggaaaattgcctactcaagcctcagtaatgtggatgccccttcccccaccaaattccagcgttccaggttgacttcagactgctgttttggcagcgagaatttcaagccagtggatttcagcttgccagactccatggtggtgggatcca

SEQ ID NO: 467598 - DNA, 3233 bp, Homo sapiens
cagacagtgggatatattagaattacttaagaaagaaaaagtccaactcgatgctaaatctccaatgcctatttctgtttgttacacagtggatcaggtcagagcatcagttccaggcaaagaagacaataggaaaattaactgctttgcactgacatatgctgtattgacgaagggccgcaggcctttctctccccaaaactttcaaaacataaggcttctgtccaaaatagaagtgaatgttacactgttcccacaaaagaaggaaacaagaggagtctcagagccacaaatgttctatttccgagttcagagcaaacaaaaaatccagcccagaggggatggatttgagttctgtctgggcttccagagtcttgcatgtgtcatggttttagggtgcagtgggaagcatgtgctcaagtggctgtctaacctgttgcgtgtgctcagacgcaatggcttgtgtttggtttctggctcagtccacacaggtattgcactcctggtttccagctttcaggctccttgctctgtagctctctctcagctgccttttacagctggaactgtaccacctcagccttgggaaatccagccctttattacaaccatattactcctggtgcacagggatgctctccttcactgaaagattctgtgctagggctctgagactccttcagggctattagtacagacacacctgtagccatttctctgttttgtattttattttatttttccataagttattggggtacaagtggtatttggttacataagttacctggtgcttctgcctcacatctcttaagattctttcctttgtcttaattttgtataacctgatgaaaatgtacctaggcaaagatctttttgcagtgactttcccaggtgttctttgtgcttcttgtatttgacggtctaggtctctcacaaggctgggaacgttttcctcaatcattcccctaaatatgttttccaggcttttagaattctcttcttcctcaagtttggtggtttaacataatcccagacttcttggaggctttgttcatattttcttattcttttttctttgtttttgttggatcgggttaatttgaagaccttgtctttgaactctgaattctttcttctacttgttcaattctattgctgagaatttctaggacttcacatttctaaaagtgtgtcaaaagtttcctgaatttttaattgttttctctttaagctatctatttccatgaatttcttctttcacttcttgcataatttttttggatttctttgcattgggctttgcctttctctggtccctccctgattagcttaataactaactttctgaattctttttcagaagtttatcaattattttagtcatttcaattaacatttgcctttgtttattatctgtgtaatgggtttattttagactccagtgtgtttagtccttactgttctcttctttctaccttctttggctttaatttgatgctttcttttgaacttcctgaaatataaactgtacctatattccacatgtttaaggttatacatttccctttaaacacatgtttaagtttataaatttccctttaatcatagctctactctagtatcaaatttaaatacatacaatttgtattatggttcaattcattattttttgtttcccaatttccatcttcatgccttcctctaccatggattcgttagaaatgcactacttaattttcaaatgtataggatattccagctattttttgctattgacttctaccataattcttatccagttaataaaatattttataatgcctcctcttttttgtatttgtattctcttttctactgcatatttgaaattattggttccaatgtcattccaatcaattatagaatctaaaccttttttctaataagagctttaaaattttcaatcatttagaatccgatgagaattgcatttatccagtaattggtcaattatagtaaatgttctatgtacttttaaaaagaaatgtatattttataattgtgagatgcattattttaatcattttaaccagattcttgatttttttgtctttatattattatcagtagtatggtggtatcttatctttcacatttattatgtcttcatttaaattttttcttgttttagttttgtcagtatttgctttacatactttgaggctattgtgagttgaattgtgttttctaaaagaatatgtttaagttctaacctgtgaatgtcctgactttatttggatagggtctttgtgaatgtcatcaagttaagataaagtcataccagattagggtggtcccaaatccaatatgactgtcgttataagaagagaaaacagaggttcagggaggaaaatgctgtataacaacagaggtagagattagagtgatgtggttgaaaatcaaggaatgctaagtgtttatagccacacaggcagctaagaagaagcaaaggagaattctacccagagtcccagagggggtatggccctgctgaccccttaattttagacttacagcctccagaactgtcagagaatgcatttctgttgtcttaagccactcattttacttgattgatagagagagtatattattagatgcataaaagtttaaactttgtgtaattttctggagagttgaaactttcatagttattgcatgtgcttatttatctatgattttcagcttacagtctacttttatattaatattactaccctgcctctattttgagtgtttgcatgctataactttttacaccttttcatttgcaagctttgtgcatccatctgtctcttatatttaatgtttgtatgtttttttcaaataagcccaagaatgcatgccatttaattggattatttagttttcttacactaaatgtcaatttttgtattttaatctaccctgttcttaattgctctctatttgtcccatcctcctatcttttttttccctctgccttcttccttttctgaggaattattgttattacttatcattcccctcattaagttgttattagcttgttatcctagaaaatccttcatgaatctttgactaattaaagtccaatgtaaatcagtacttctatcatttattagccaaggcaaggacactagaataccatacctatatttaattaccctcgaacatacatatttttaattatttgaacgtttatattttaa

SEQ ID NO: 467599 - DNA, 702 bp, Homo sapiens
gccgccaaagtaggagcccaggcagaggaggcgcctaaagaaagcgagggctgtgaggactgccagcacgctgtcacctctcagctttcttatagtccagcacaggatgcaggtgtgtatgtcatttcaacacaatgtgaaaggcgttgatggagtgatatctgctggcccacccctaccagagatggtaaaattcaaaaagtcacatgacatcaaacaaaagtgggaagggaagatcacctttagaggagctctagatgaagacattttttcagtttatgaatataggagaagaggagttgctcagggcttctctggctgtgtagacagcagccaccacctacacctagatgagttgcctttcactttctccttcaggattttcctggagagaacacagcctctctaccattctcttgatcctatttgtaactccctaatagctgctgttctcacaagagtcagagtgatgtttagaaaaacatctagagacattgtttgccattcacctctcagaaccttctaaggactatgtctcagggtaaccaagagagaaaaagtttctctttatagcagtggtccccaacttgttcggcaccagggactggtttcatggaagataatttttccacagacgtaggtggggagggggaagtttttggggtgaaactgttgcatctcagatcactaggcattagattc

SEQ ID NO: 467600 - DNA, 775 bp, Homo sapiens
ctatttataatggaaccatacttttccatctctcaccctgaggaagttgcaagttatatgggctacactcataaaaatcaaggcaaagaaaagctcaactctcagtcagaacttcagcaagtgatagaggttgtcaagtctgcatgtggccctttcccaaatcctctggaagaaggaatctcatttgatatttattcaacattcatagagccccccacaatattggatacggaaatgaagaggttggatcaagaacaaggccctgaggagtctcagccagaaactgacacctcagacatggatcctttagttggttttaccattgaagatgtaaaatcagtgctggatcaagtcacagatgacattttaatcggcattcagaccgagataaacgaaaaactgcaaatacaggaagaggcctttaatgcacgaatagaaaaattgaaaaaggcctaaggacttggtacaaggagagtgatgctaaacttcacagaaacaaacaaaaccagccagaataacagactctctggagcgtcgtgtctccatcacttagttgtgaaaggaaaaccaagccccactttttattttcctaagtaattagaaaagtattggtcccaattttgctatctcccatcccataacagcctctgaatttattgcaccaagtgtaatgagaacattttgtatacaagagtttgaaaaattatatataaaaatacaattacttttatgatagtcctttgacgttttgactaataaatcctattcatcttca

SEQ ID NO: 467601 - DNA, 1941 bp, Homo sapiens
cagccagcagtgacacaccttgcagcatgagaggcaacttcaccaggcctctcgactcctctctgtgcttctattttaagctccctatttgtaaaccaaatggctgtgctggaaccatttctgaaatcagaagggcaattgtgattgtatgtgagtgtgcatgtgtaagtgtgagtgtgtgtgtatgtgcagtgtgttatcgaggctccagagttctgctttcaagagtgacattggaagaagagagacagattttgcacgtggagagtgtaactcacctggaagagggtctcacttgtgatccaggcttctttctctccatgctttcatctaatgggatgaccaaaccaggcaagatcaatgagtctgaggactacactggtgtatgtgctatatgtgctctgccatacttcacagaactgggaagatggtatgaggaaatagacaccaaaaagccttgataagttccagagggccaaaatagtaactcttgttggcaagggtattctataaatcatttggggtcagaaggatcattgaggattaggaaagttaactaaggtgttccaggtcttaatagctaatacaaagcgaagctgaacttggaataccttctgattttggatttgatactttcaaccctctgacacaacagtgcctctagaggacttcagtggttatttcccaagataggccagtttatctgatgctaactaagatttaatgttaaagttgaattatttatactcatttttggaatcacttgatgtaaattttaatgtatctaagatttaatgtctcgtaggtatatattattgtatctgagctaactgcagcatccagaattatgacaactaatttgcaattcaagttctgtgattcttttgccaaaaggcttgaatgctaaggggtttaccaaaaaatcttggaagctgaaggcaaaaggatggttcatagaatagcacttaaatgctggtatcccatgattcacagggtagttttcatgcaaggtgatgatgaaatttctaggaggtttgtacatcgagcttgttccacatgtctgtgccatgaatatgcaatatactctgaaagactggaatgacttggagcactggagttgtgaagcatggatctctggtttgctcaatcaaaaccctataccctagcctcacaaaacttagctccctgaacatgtaacaaggcataactttataaattaagtaacattaaagttttgcaaaatctaatatacaagtcaaacctcgcatcattagtctggaccatgggttgttctgaataacagacataattttaagcaaatggaagtgtgagaaatttgaaaaaaaattgaacaaatctattattagttccttgcctctaaattaaaacattagtactggtataagactggactgatcgcagaaagacaagttatagttatcaacaaaatgatcagctgtcttttacagaatgatcttgcctccttgctatttatattacctaatacacagcatgtacatgaaaaaaaaccttttatggtaatatatccttaatcttggagatccatcttgtatctttacatagttaagatgctgaaaagtcttccagtcttttctaattcattgtttctcagtcttatttgaccacataatactatcttccagtattaacagggaagtattattgtgtgtaagatggcaacattcacctgggaataaccatttggattcaaaatgtctcctttccccatagctcatggatttctctttgtttcttttcatttttcaaatttttcaaaatttcaaacatacatgggaagaaaattataataagtcccatatacaacatacatataacaactatttagattttttccatctattttttgaggtgatttaaagcaaatcccagacattacaatgttttatccttagatatttc

SEQ ID NO: 467602 - DNA, 942 bp, Homo sapiens
aggtctttaatctagagcagtggttcttaagcgtgtgtccttgggacgcctctctacttggatttatctgctgtttttgtcacgactagggttatggaaagtcaaggttatactagccagggagccagcgaagttggtagcatggctcaaagccttagaaccagggaaactgatggttgtacctattatagaaaatatgttattgatttttccaaatctgagatcattggaataccaatatccaagaatatagaagatatacccttgaccaatgccttgcaaaatagatttgtgagggcagcacctgcatctttgaagaaccgtgtaattgctcttctctgtatattagatctaacagtgggaaccacagtcactcaactacaaaatttaaatacagtgggaataattggatcccgaggtggcagaggccaagtggcagcactcaactgtgacaggcaaggacacctctggctttttaccagggtaactgtgcactggagaatgggaaatgatcggacattttggggactactggacactgtctctgagctgatgtttattccagggaacccaaaacatcattgtggccctccagttaaagtaggggcttatggagatcagtgctaccatcaaggacttgaaagatgcaggggtggtgattcctaccacatctgcgttcaactctcccatttggcctgcacagaagacagtaaccacgtggtgactccaattgcagctgctgtaccagaagtggtttcattgcttgagcaaattaacgcgtctcctggtacctggtgtgcagccatttacttggaaaatgcctttttctccattcctgtccataaggcctactagaagcaatttcccttcggctgacaaggccagcaatatacctttactgtcctacctcaggggtatatcaactctcaggctttgtgtcat

SEQ ID NO: 467603 - DNA, 713 bp, Homo sapiens
ggtgtcctgccaggatttatgctggaattgtgccaccagcccttggctgctctgtcagatattatatggtactatttcagtaggtcctgtcctccccctcgcacacctccctctcacctgccgccatgtaagataggcctttgcttccccttcgccttctgccatgatcataagtttcctgaggtctccccagccatgtgtaacttcagtgccttgcatgaaaactggtggttgagaattcctcaaggaaagcagaagttgttctccgagtcagcagtgctgtgcggtgcagagcagcgttgcttctctggatccaagacattgctgtgtgtggcaggactgatcctcactacgtacggtttggattccttgtatgagcgtctggaagaagacaaggtcttgagctcgttgccgcagcaaacatccctgctaacccctattccactctgtttctacaaattctacttttttaagatgccacatcagggctgtgatattctccctgctggggcatctgaagtgtctcctgtagttggaggtaggacggcggcactgggccaggcggttctgcacgatgactttgttgccaccagtctggcccttggccagatgccttgggcatctcggacttgctgagactgtcatctgtgaaacaaggatgatagtgcttgtggagtgtttaaatgacatagttgtctgtaaagttggcagta

SEQ ID NO: 467604 - DNA, 1237 bp, Homo sapiens
tttttactctgaaggttgaagctgtgcatttctggagcctgggctgtcggccgtagtggctggggaatgctggggctgtggtcgtctggccgctggcagtcctgctggtgggtcctgcctctttgacaccgttcctttctgaagcttgttttccccagtgttggaagtagcagcactggaggaatggccttcttcctacagcaaagctctgccaggagaggaggagaagacatagagcatctgttgagggacatgacgttctgggcactgcaccatgctttctgcttctcagcagtgcctcctggttgatgttaccgtcacctggcatcgcccaggagaagagccaagtgtgcaggagaccaacgtgtgcactgggagtccccaggggcgtgtcctggcacgcggcccagaggcccctgacaaggctcagtgcaccaggcacacagcggattgttggtgcttgacccgacgagaaggggatgaagtgagagttgcacctccccgtttcgcacgtccccggggtgattctccagcatgggtgggagttgtgtttggaggcctgagccctgtgaagctagggttgctgttacctgagcagcagaagcatggactctgggaagtggggtcagggggcggcctctgctgcatccgcaggaggggctcctcgtcccagttgaccatcgtcactgcagaagggggcgtgggcttcatggtccattgataaatagaacgttcctctttttttttttttaaagcatgtcaaaccctaattccttcagcctttactaaagtggcattttataattccatgtgatttcattattatacctgcaggagagaatgcttcctgtaaaccagaagtgtctctgagacagttctcagcccatttagaaagttcattttcccacggttcaagacggcctcaggagggttgaggacacatctgtgacacggcctcaggagggttgagtaggtgcccgtcactaagcagatacgcatttatctccgtgtgcagggggtgactttgagttctgttctctgtccatgagaaatttccctgtggactagttgtgagggaggcttcgtcgagggagggtcagttctgacactttcttagatactgaccttgaatggacagaattgagattcaggaaaaccctcgagctgtgagagtgtgctgggatctatgtaagtggggtttatgtgggaaactcagtaatagtttaagaaatatcaa

SEQ ID NO: 467605 - DNA, 1378 bp, Homo sapiens
cgccaaaacatgaggacacacttctaattttttaaggagtgcttcatcgtgagtcagtcctgacgtgtactatgttaggaaacctctgaactccacagtcaagccagagctctgacagaaagtggttgcgcccttctcactgtgtttttgtcactagctttattcatgaaaattatttccttaaaaccctctttgtatgacttctattacagtttggaaaaaaaaattatgtggaactggaagcctttctgcagcgttaatattcatggcctgttctgggtctcggtatatgtgtactatacaaatgtgtacttgtatgtggtgtatgcgtactatgtattgccattgtacatgtatttacaatgtataggtatgtacactacatgtgtcctacatgtgtgcatgctatgggcatgcatgtacatgtgtacatatgtgcataactatgggcactattatatccacactatttggacatgtatctgtactgcatatgtgtacatacatgcatgtatttaacgccatatatgtacctgtgtacatacaccatatgggtatttgcacatttgtgtacttatatatatacatgtgtgcacactgtaagcatgcatgtacactacgcacactgaataaacttgtggatatgtgcacactaatgtacgcatgctgcatatgtacatacactatgtactgcatatgtacatactttacacatgtatatgttagtgtactgacatatatacattatatatatgtgcatatgtatacactacgcatgtgtaggcatgctgtagtgcactgtacatcggatatgtgtacactatatgcatgtatatagatgttatacctatgtacatacaaatgtgcatgtgtatgctatatgcatgtacatacaggttatagtatacctgtgtacactggatagagatgcgtgtacatgctattcatgtacatacatgttatagtgtacctgtatatgtacattggttatgagtgagccttattcatgtgcaaacatgttatagtgttcctatatgtacattgtatgcatatagattgtgtgataggatgcatgtacatgtgttatagtgtacatatgcatgtacactgtacacatgtgtgtacatgctatgcatgtacacattatagtgtacctatgtacatatgctatatggatatggatgtgtatgctctgcatgtacatacattatagtgtacctatgtatgctgtattgatatggatgtgtgtacactatgtgtacatacatgttatactgcacttacgtacatacactatggatctggatgtttgctctatgcatgtacatgttacagtgcacatgtttgtacactatttggatgtgtatgctctatgcat

SEQ ID NO: 467606 - DNA, 1386 bp, Homo sapiens
ccaggtcaaaagcattttttaagaagttaaaaagaacctaactgcatctttggatcttatgtgaggcaatgtccagggtcactgggacccctgcttgcttcaatgcagcaccgtccacagcagccaagatccggaatcacctgagtgccggtcaacaggggatgaagggaatgtggcctgagcatacacaggagcagtactccaccacacagaggagagagccctgtcatccacaacagcatggagctggaggacattacattaagcaaacgagccaagcacagaaagaaatggtgcatgttctcactcatgagcaggagctgacagcagatgtcatggaggccaaaagtaggtggtcagcagggcccactcataagcagcatggggagaggctggtaaggggcacaaacacacagcctgacaggagcacaagatctactattgataaaccagcaggggaatgtcagtgggtcacctactgtgtatttcaaaacagctaggagagaataacttgaatgttactagcacaaggaaaagaaaatgtttaaagtgaaagacatcccaattacccagatttgatcaatatagggacgtatcaaggtatcacatgcaccctgaaaatatgtacatatattatgtatcaacaaaaacaaaaataaaccaatgacagaatcgtttgcgaagcaagtgcaggtaagaacggggagccagacatggtgtggctgtgtgtccccacccaaatctcatgctgaactgtaacccccagtgttggaggtgggccctggtgggcggtgactgactcatgggggtggtttctaaccccccagtgttggaggtgggccctggtgggaggtgactgactcatgggggtggtttctaacgccccagtgttggaggtgggccctggtgggaggtgactgactcatgggggtggtttctaaccccccagtgttggaggtgggccctggtgggaggtgactgactcatgggggtggtttctaacccccccgtgttggaggtgggccctggtgggaggtgactgactcacgggggtgctttctaaccccccagtgttggaggtgggccctggtgggaggtgactgactcacgggggtgctttctaacacccagtgttggaggtgggccctggtgggaggtgactgactcatgagggaggtttctaatggtttagcacaatcccaagtgctgtctcatgatagttctcatgagatctggttgtttgaaagtgcatggcaccttccccttcactctctctttccggccatgtaaagacgtgcctgcctccccttcaccttccaccctgattgtaagtttccccagatgtagaagcctgtacagcccacagaacagtatgccgattaaacc

SEQ ID NO: 467607 - DNA, 2638 bp, Homo sapiens
acattttcacatgggccatgtggaaagttggctggacctgccactggacctgacactggacatgctgctggacttgccactggacttgacactggacctgcccccggacctgccgctggacctgccactggacctgccactggacctgacgctggacctgatgctggacctctccctggacctgatgctggacctgccgctggacttgaccctggacctgcccctggacctgccgctggacctgatgctggacctgtccctggacctgcccctggacctgccactggacctgtccctggacctgcccctggacctgcccctggacctgtccctggacctgccgctggacctgccgctggacctgccactggacctgaccctggacctgcccctggacctgcccttggacctgtccctggacctgtccctggacctgacgctggacctgatgctggacctgtccctggacctgcccctggacctgccgctggacctgtccctggacctgacgctggacctgccgctagacctgtccctggacctcacactggacctgtccctggacctgcccctggacctgccgctggacctgccgctggacctgatgctggacctgatgctggacctgcccctggacctgcccctggacctgtccctggacctgccgctggacctgatgctggacctgacactggacctgcccctggacctgcccctggacctgccgctggacctgacactggacctgccactggacctgacgcttgacctgatgctggacctctccctggacctgatgctggacctgccgctggacttgaccctggacctgcccctggacctgccgctggacctgatgctggacctgtccctggacctgcccctggacctgccgctggacctgccactggacctgtccctggacctgcccctggacctgcccctggacctgtccctggacctgccgctggacctgccgctggacctgccactggacctgaccctggacctgcccctggacctgcccttggacctgtccctggacctgtccctggacctgacgctggacctgacactggacctgatgctggacctgtccctggacctgcccctggacctgccgctggacctgtccctggacctgacgctggacctgccgctggacctgtccctggacctcacactggacctgtccctggacctgcccctggacctgccgctggacctgccgctggacctgatgctggacctgatgctggacctgcccctggacctgcccctggacctgtccctggacctgccgctggacctgatgctggacctgacactggacctgcccctggacctgcccctggacctgccgctggacctgacactggacctgaccctggacctgccgctgggtctgctactggactgctaacaaatgctgcagacctttatggagagaaaagtacaatccatctgagagcagctgtcccagctctggatgaagccgacagaatgaggcagagctgctggcatcattcagtgggcagtcagtgaccctcctttaagtccagaaaagctcaaactgcatgtctgcaactagaaataccaatcattagccagacctcctggcaaatatcaccactgacccactgtaattctgtgtggtgtattatgtttcatgtgcaggaaatcattcacaaagcctttaacaaggaagtattaacatgacttttaatgcaatataacagctttgcacccatttaacatatatttaaccccaatggtatatgtaaatatatattttatagagcatcaggcgtgtttacctaatggctcaaacctttaaaatatctctctccctgagaggacagcggaggatcccatgcactctctccaggaacatggccctcccagagaggactcacaaatcaaatgtgcatatgcatgcatgcacagacacatatctcacacacacacatgcgcacacacacatacatgcaatacacacattcacacatgcacacacattcacataatcacattcataataccaacatgtaacacatacatgcacatacaacactcaaacacacatgcatatacatacatgttcatgcatatacattctggcacacacaaacatatgtaaatgcatacacataacatgcacacatatacatttataactatatacacaggagcatccacgcatgcatacttgcacatgtgtgcgatgtcatgcctaaacatgtaacacatgcacacacatacatacaacacaaatacacatgcacacatatacacatgcatgcatctgtacagtaccaagacacatacatgcacaacacatatacatgcaatacacactttcatacacataaatgcaaacacacatacatatatacacccctcaaagaccccattattcaattctatacaaaatggtttatcccccaaatgtaacttcttgtaattaataaactctactttactgcacatttcttgatttcaaataatgaggtctcacacacagcacacatacacacattcatactcaaatacatgtgaacatacgaatagaaataggcacacatgcctgaagaccctcttctgtaaaggcctttttactaccctttcatcatctcgg

SEQ ID NO: 467608 - DNA, 954 bp, Homo sapiens
aggaagaattcgcggtggcccagtataggtcaagggaggcgatgaaatgatcctccttctaacttcccagaaagacccgacagccagcaccgtaactggagaccatgcgggcaccggtgtgaacccagactccacggccagcaccgtaactggagaccatgcgggcaccggtgtgaactcagacccgacggccagcaccgtaactggagaccacgcgggcaccggtgtgaacccagactccacggccagcaccgtaactggagaccacgcgggcaccggtgtgaacccagactccacggccagcaccgtaactggagaccacgcgggcaccggtgtgaactcagacccgacggccagcaccgtaactggagaccacgcgggcaccggtgtgaacccagactccacggccagcaccgtaactggagaccacgcgggcaccggtgtgaacccagactccacggccagcaccgtaactggagaccacgcgggcaccggtgtgaacccagacccgacggccagcaccgtaactggagaccacgcgggcaccggtgtgaacccagactccacggccagcaccgtaactggagaccacgcgggcaccggtgtgaacccagactccacggccagcaccgtaactggagaccatgcgggcaccggtgtgaacccagactccacggccagcaccgtaactggagaccacacaggcaccggtgtgaactcagacgcaacggcaccctcctgggctgctccagccaccaccagaacccgttctgcagctgaactcgaagctgattctggaaggaactgaggaggatgaggacgagatccttctacctcaaccgggatcaattttttaatgatttctttcttttagaaaaatgttaataagatactttgttctaaaatgaccaggatttcagcagcttctacatttcttcatgtcaatcaaagctt

SEQ ID NO: 467609 - DNA, 662 bp, Homo sapiens
ctctatctcgatgatcgtctgtcagaggacaaggttaagtgtcaccaccgaggaccccgttgagcctctgggctggaaggcctcgaggtctcaccacctccagcctgagcgcccagtgcccaggggcaatttcccgccttccccgggggctcaggatgctggctcctggggcagtgcccgcagctgggcccctcctccagggctggccacggcctcctgctgtgtcataccagctgcttccccgcagctgcagcccacactgcgcggccgcttctgcttctgttggatgaggagacgcaggccctcgcccaggcccccatgggccctcaacgccccagagacccggcttcccggcctcgcccctgctggccctaaggctgtgccacctccccctgcccagtccctgcgctacttccaactctgagctgatggtcattacgagtggatctgccctggacaagtagtttagtgtagctgccttggacgggcaggtgaaaagtaacaaaccgccagaaaactcagctaataaaatgttaggagagacttggggcaccaggaaggggtgaggcctgtctgtgtgccatctgtgtggagcctcagtatctaggggacagcgttgacgctgagccccaggtttttattagtgtttccctgaataaaac

SEQ ID NO: 467610 - DNA, 1443 bp, Homo sapiens
gctgaatctcccagcaaagcccagtgacgtttctgttttcatttcaggcgagggagtaatagagacaatggcaccaactcctgagacagaggacctgacacatggtgcagccaccgcctgtggccacggaaattccagggaatgcagaccccagttgcctggtgcagccaccgcctgtggccacggaaattccagggaatgcagaccccagttgcatggtgcagccaccgcctgcggccacggaaattccaaggaatgcaggccccagttgcatggtacagctaccgcctgtggccacggaaattccagggaatgcaggccccagttgcatggtacagccaccatctatggccacagaaattccgaggaatgcagaccctcagtcccatggtgcagccaccacctgtggccacagaaattccagggaatgcagcccctcagctacatggtacagccaccatctatggccacggatattgggaaacacagaccgcagtcacatggtgcagccaccacctatggccatggaaattccagggaacacagaccctcagtcacatggtatggccaccgcctgtggccacagaaattccagggaatgcagaccctcagtcacatggtacagccaccatctatggccacagaaattccgaggaatgcagaccctcagtcacatggtgcagccaccatctatggccacagaaattccagggaacatagaccccagtcccatggtgcagccaccacctgcggccacagaaattccagggaatgcagcccctcagttacatggtacagccaccacctatggccacggaaattccagggaacacagacccttagtcacatggtacagccaccatctatggccacggaaattccagggaacacagaccctcagtcacatggtacagccaccatctacggccacggaaattccagggaatgcagaccccagtctctaaagtgttatttgttttatgaacttcactgcagtgattgtggaagagtttctctctgtgcagagctcagcatccagaagggaagttggccccaggaacgccttcctcctcttcagagctcagggcccagggctaaggcccttgggagaggtccctgttcggcaactgtgcctgtggagggccccccaacactcaccgtgtatctcctaggagcagaggctgcaacagggacccagagaccaagcctctgctcaggcaacagtgagctgatggccttccactctaagttccaactgcatggagtgtgtattccatgaatgcttgttaaatgaatgattcacataataaggtcttctgtgctgacctttgctggtctgctgaccatgggcttcagagcatagacctcattcctggagcaaccagctcttcccagagcaacggccgctggaggacaaaggccagggcttcttcctgcagcaac

SEQ ID NO: 467611 - DNA, 636 bp, Homo sapiens
ttggctgctgccctcctgaggagctgaggatgaggagggcatggctaggaggcgggagctgccgtgtgcagggttcggatgtaaactggcccaccctggttatctgattgtgtcagccttgggtaggtttcccggcttgcgtctcggcccaggtgcacccctgcctgcagcaccctccgtgttcgctgtctcaggacaggggcttctgtgctgcctgcatcacactgatgtgaagtgtcagtgccccatccagaccctggtccagttctgctgtgcccgcctgctgggcgccattacatgcactgctggtgtcctgctttgcagggctgcaggggcacttcctgctgcggggccgagggctccatccttcttccactgcctgtccctgtcccgtgccctgtgccccctcacaggggaaggacacttggcacaaggtcacagatatttgtggctttggaatggagttctgccctcggcacccccagccctgtgcatttcttggaggttccaccctgcacagtgaggaagtcacacgcctgtgtaagagctgaccaggggaccaccttccagagcctaagagaaggtcctgaggactctgtacacattattttcattgaaaagaaatagtttactctg

SEQ ID NO: 467612 - DNA, 1216 bp, Homo sapiens
ggagaaagatccgttcggttcggtgttgggcatctctctcttgggagttcccagggccgggcaagggacgggcaccatgttgatgtggatgagtcttcccctgatttcccaccctgagcaggcctcacctcaccgtccccgccccaggcctctccaccctgagagccaagggtgtgcagggaatacctccctccggacagaggcagcccatggccctgggattcccaagcccttctgtgtccatccagggaaatacctccctccggacagaggtggcccatggccctgggattcccaagcccttctgtgtccatccagggaaacacctccctccggacagaggtggcccatggccctgggattcccaagcccttctgtgtccatccagggaaacacctccctccggacagaggtggcccatggccctgggattcccaagcccttctgtgtccatccagggaaatacctccctccggacagaggtggcccatggccctgggattcccaagcccttctgtgtccatccagggaaatacctccctccggacagaggtggcccatggccctgggattcccaagcccttctgtgtccatccagggaaatacctccctccggacagaggtggcccatggccctgggattcccaagcccttctgtgtccatccagggaaatacctccctccggacagaggtggcccatggccctgggattctctagcccttctgtgtccatccagggaaatacctccctccggacagaggtggcccatggccctggaattctctagcccttctgtgtccatccagggaaatacctccctctggacagaggtggcccatgaccctggaattctctagccctctatgtccatccagggaaatacctccctccagacagaggcggcccatggccctggaattcccaagcccttctgtgtccatccagtaactgaccttgaagtttcagatctttagtgctttctggtattttcccttccccagatgcaggccttgtgtgatttcatttcagtgggaaggttcagcctaacggcattaccaaattccagaagcatcaactctcctttctcatcacgtcacatccactctatgaaatatatctttgtctgctcaagccaaaccaatccctctcatctttgtgatatgacagagcgtggtatggtaaccttccccctctccagaataacatcagcaata

SEQ ID NO: 467613 - DNA, 647 bp, Homo sapiens
ggcagcaacagccaggaacagggtgacgtcccttccacccctacatgggctgcttatggggtaagcggagttcccagagcaccaaagggacagcagaacacagcagggaagaggcagtcaggggcaccgtggtcctgggccaggtggcacccgcgcagggaagaggcggtgaggtgaccacagtctggccacctgacgcagcaaccaggtgcgaaggactcactgaaaatgagattcaaaagatgacgcgggcagagatgttctcctgtccttactcaacaccacctgaaatgctggtaacaactgtccatgtggcagtgactcccactgcccgccagctaccagcattaattctgggccttgttattaacataacgtttctgttcagcatcgccacaaccaccgataagataggaatgagcacaaaactagggcactggaaaccaggggagtgtgtccaggttcctgccacaaacccaccctgtgcaatcggctgcagcaagtcagttcagctgcccggtccagtcactccagacgaagctcagggtggccgtctggctgttctcagacccacgaaggccatgcttcactaaagcagacatcctgcatcaatctaggagggggtccaatctgtgttgagtgtttac

SEQ ID NO: 467614 - DNA, 1190 bp, Homo sapiens
tgctactgtgcccgccccagccctccccatgctgccgtgcccttcctgaagacgccatctccactgcacacagaggggttgtgatacgctgccctgactagaacaaaatgcttcactgcaattttccagaacttgtcataaaacatgtctcaggctatgatttctgcagcgtgagtggcaggaccaggacagacgcagctgcagggcacacctgccggtcatctggctgctctgctgtgcacctggttctgtgggccgtcctgggaagagctcctatagtgcctgtgtctctgcggaaaaccctaaaaatcagcaagtcagacactcctaagccagctctgaggctgccagtgagaacttctgattgctttgcacatccaccagctgatggcaagcagaaaacattcctgatgccactgtgtgcccgacgacccgagggagggctgtacagtgcacaggggctgtggaaaccaggccccctcagcaaggagcttccacctcagatcacactgtgggggctgctgcaggccagagcggctgccagaccgagacaacgtgaccatgccttctggggctgcagcatcagtgagggcacgcacgcctcacgggaccctctgccctgagcttcagcaacagctttttcttagagtcgggcggggtggctgcattgctgacgtgccctctcccgtccttgccagcgtcttctggagtcccctctgcccagcaaacaagagatgcatttggtccagatttggcaaatacctgcattaatgtgccattaagagtaaaattactctttgtaaagtgtcttacaagtttaataagaagcagttatgtgatttcatcgagacaatatttgaagatttttgtgccttgttcttcaaataatttcccattggaaaagtggagagatttattgagtttttcaggcaatcctatttctatgtcgcaatcagaaaatctaggccttgacctgcctctgcccttttctgagaatcaatgttgaataaagacggtttattaacttattcccagctcagacagatataagggtgatattaaagaaaaaaatgaaggccatgtaacagaagagacaagaaaaatctaccaaaagtcattgttgtttcatggagccataaaaaagttgtgaaatttgtgtaaacacagattggatacaatgtaattaaata

SEQ ID NO: 467615 - DNA, 886 bp, Homo sapiens
cactaatcccattcacaggggctccaccctcatgacctaatctcttcccaaaggacccaccttcaaacaccatcccctccgggcctctggtaaccaccattccactctctgtttctctgtgggattgacttttgaagattccacacgctgaatagtattccattttgcatatgcacaacgttctctttatccttcatccgtcgatgggtgctgaggttgcttctgcatttcagctactgtgaatggtgctgcggatgaacctgggagtgcagacgtctctttgacgtgctgattttaattcctgtggctctacagatggctcctgacttgtaatggccaaacgtcttagagaacgcaagagaagactagtttacagtaaccctctcatccaggccagacattttagagaacacaggagaagactagtttacagtaaccctctcatccaggccaaacatcttagagaacgcaagagaagactagtttacagtaaccctctcatccaggccaaacatgttagagaacataggagaagactagtttacagtagccctctcatccaggccaaacatcttagagaatgcaagagaagactagtttacagtaaccctctcatccaggccaaacatataagagaacataggagaagactacacattaaaaatgttccatttccttctggcttccatggtttctgaggataaatggactgtcatttgaaagcttgttaccctataagtaatacgtcattttaccctggttgctttcaaattttttgtctttgttttcagctgtttagttatgatgtgtctgagtgtacatttctttaggcttatcatattttgagttcactgcactttctaaacctcagaagacactgagattt

SEQ ID NO: 467616 - DNA, 1368 bp, Homo sapiens
tggtttgcgataaccctatgcaggatttccagagactagttgaatggctttgatcaaaatgctgaaaatgatatggacaatgaagtccaggctgaagtggtcacagatgaagatgaggaacttgttgggaagtggagcaaagaagggaaatatggagtcggagcccccacacagagtccctactggggcactgccagtggagctatgagaagagggctgccatcctccagaccccagaattgcagatttacttacagcttgcactgtttgcctggaaaagcttcagacactaaacaccagcccataaaagcagccaggagtgagaatataccctgcaaagccacaggggcagaactgcccaaggccatgggagctgacctcttgcttcagcgtgacctggatgtgaaacatggaaagagcagaagaactgctgagcacaagcaaaggaaatcacagaggcagccagcttgcttttactacaacccactctcaagaaaactcactcatgactcacaagatgtggggagagcctacaaatacagaggtgtcttctctcctgtagaaaagaatacaatgatagactttagtacgcagctgtagattaacagataattattgcaaataatgacatttcatttgattggtactttatgttttatgttgttgctgtcccgtatttgctggaagctacaaacaataaattgtgtggtccactagtctttttaattaaatatgaaaatgttgatagcaaaatagcaaattttgtaaagcacctttgcaatgtttatttttgttcattgctcatagccctttctcttttcaatttaagaacatatctgattagagaagatgtaaaactaccctttttcaaccatcagagaaaaaaatcctttttttctctatggcaaaaagtaataagttaattcatgaaggtacctgaaaatgtaattggagaaattatttttaaaatatttttaattagatttttctttttgtcttttttaaaattcaacttatattttagaaacaggaggttcatgggtaggtttgttgcatggatatattgcatccaggacttctaatactatgttaaataggaggggcgagagtgggcatccttgtggttttccagttctcaaaggtaatgtttccagcttttgcccattccatatggtgttggctgcagcttgtaagtaaaatgatatagtacataactcaacgggtaactgtgagagtaaagtgactaaagcagtactaataattgtaattaatacaaatagcacagaagtagtaattactttattacttttgtgatacttaattgatactttgagggagagttataacaatgaaatgctttcagtgcac

SEQ ID NO: 467617 - DNA, 1862 bp, Homo sapiens
ttcaaagtcaacattaccataactgggggaaaggagttctaaaggttgggaagtccaagatcaaggaactgacaggtttgtttgtctgctctcatgggttggagttcagtgcctgtggctctcccaggctttggcctctcgagcggccctgctgccacaactccatcaatcattgccctagtgggcacaactgggccacctacaccacaactgaagcagccaattagcactgtacaaaaacaatgggtgcagagacttgaaggagttctgggcttcaagaacatttggagtactgaaattccacaggcaggtcgtctcaaagagtgtgtgagtctagctgagcctggggtttttaatgtgctaagaatgaaggaagtgcatgctaatttgtccatgggtgaccacaaatgggcctggaaaaagcaccatcagatttgccaagcagtcatcaatgaagttctcactctgggtccccaagagttcagggatgctggagtctggactgtgactggacaggtgcagctctgttgtgggaagtcagggaccccaaatggagggactgactgaagccatggtggaagaacataaattgtgaagatttcatggacatttatcagattccccaaattaatacttttataatttcttacgcctgtctttactgcaatctctgaacataaattgtgaagatttcatggacacttatcacttccccaatcaatacccttgtgatttcctatgcctgtctttactttagtctcttaatcccgtcattttcataagctgaggaggacgtgtaataaataaattttcaacttgtggtattttcaatttacagtggatttatcaaggctctaacctcattgcctggttattccaagaacacttagttgtctccaggacaaataacttgctaagctctatttcctctggtcttatgtagtacaaaattgtgagtcactcaccatgcatgatgtcagcatacatttactgtcagcatacatttaaaattttttttcatgacaaggtttacacactattggtcaatttttatattattttgaccttcacatagaactgaaccatcatattgttcagaaataacaagatcagcctaagaactacctgattgttctcttagtcttatttgattatgctaaggtgacaagtacctaaagtaacagttgagataaaattagcttataatttccaaaggatttgatggataaatcaagtattaatatttataatatttaaattagttttaacatgtatttgaataggcttttcattggtagtgtttgtgtttcctaataaacttgatatatgcctactcagagaagcttaaatcattccttgattgttcagaacataacttgtaaaatcagactgaatgttggaatcgacagtgtcctgcctggggaaggtggggtataattaactctacaggtataccaaatgtagatatagaaagtgttaacattttcttaattactctaaaccagagaacttaatgacaaattatatttagaaatctatactaaactgaaaacttgagtttatatatacgtatgggaatatttagttcttagccatggctgcctttacattatacatcaattatttattaagtgtttactatatgccaaatatagttgtagattctggtgatacgcaaattaatttgaagtttacatctgtattctagttattgaagtgggaggaagagtgtctgtgtcttgccaaaatacgtttcacactttgttattaactgattattctactgaagatttcatgggaagatatgaaagattttacattgtactgccatctttgtttatgctgctacaacaaaatacctt

SEQ ID NO: 467618 - DNA, 587 bp, Homo sapiens
ttctgttccattggtttatgtatctgtttctgtaccatcaccatgctatacataaaattatatcaaaaccacatttctgagcatttgaaaactggcatgaagagtgacagtgatgagctatattatcctctgggttttatcattctgatacattcctgcttgtcattttgcaagtgttttctggaatatattctgttaaacagaaacatatcatttatttcaaataaatcattgtgtgacttttcaccttgggaatgtgcatattctctgggcgatgcagtaactgctttagtcagactctctttgactgtctctttcaatgatttctctggaaccacagatatgctttgccattctgagggagatgtgggttgtggtgccaatgccacagaatatgacatcccaaaatatgccactttagcataagaattattatgaattaaaggaaaatgacaattaaacacatggaaagctctctgccttctccctgtttgcctaaaagcaggacataaatttacgaaagcaaaaggatgcctccttacctctctaccaggaagaaaaaaggttgacccactgaagacaacttt

SEQ ID NO: 467619 - DNA, 798 bp, Homo sapiens
aattatgggtaccctacacgtggagcatgaggtcacagcccagcaactccatctggggccatttcacccaagctgcaaatatagtgtctagaaaagctattagtgtcgagaatgttgaccttacaaaccagttatttaaagtgatcatagtttgcagaaaagattaccttctgaaagaggtcagttgcttgccacacagaaagccaatcactgagacaatgagtattgccagggaagagggctataatcaggtgcagcatccaaggagaacagatcacactcaaatctgtctcctcaaccaactaaaattggagatttatatagcaaagaagaaatgtactacctgcagaaaaacagcaattagggagggggtaacactactgtcaccttctggaaccagtcagcttatggctgagctgaggggctttttggactgatataaatatttatttaaagatgacataagtgaacacgtgtattaagcgttaggtatgaaatcccttttattttaaaataaaaccatgcttacacaataaaatgaaaggattttgacattcgtcccaatcattttggccaaccaatcggtatcactcatgtttgggaatttactcatgggtattgaaggaactaagtcaacaagatattctacaccaaaatgacaacattgggttcaaatgttgtattttcaaaaaaaaaaaaaaactcataaagctcatgtggtgagttcatctctctgatctgtaataatcgttctggaaattttggtctcaggacccctttacattttaaagaattttc

SEQ ID NO: 467620 - DNA, 667 bp, Homo sapiens
ccgcctcttattagctgtgtgcctgcaggtctttaaagatcctccagcccagcgcttcttaacagctagaattccttttaaaatgacaccttgggtgatctccagtgctctacctacctccagcgtcaaggcagctccatccacatctgagttgcttcagtggaggaatacaactgatcttgaccttccagtccaactgccccctcggtgtcagaattatcttcctaaaaaagcaaagacagtaatgccagtatccactatcaaaatgggacatgggaaatgctatttttatcaatacactgagcattcatgggaatatcagcaaagggttaacatctctgggagattcatttttcatgtgaaaaatgaaggcattaaacaatctgattcaaagagtccacaaaaccctgaaaatcttgaattgtatgattttgtatttgctatgccccctaccctctttaatccaaatctctgctgcacacacagcaaactttgacccagtcttgaggcaactctatttctgccctcttgggagctctcccagcagctgggaagggataatcattaccagtgctcaatgtttctattctttgtaacaagcaaccgactctgatgacctaagctgtaacagaatttgtacaaatattgaagagtccatagaatattt

SEQ ID NO: 467621 - DNA, 554 bp, Homo sapiens
aggccaccatcgatgagcatttaggttgattccatgtctttggtatcaaaacagattgtgacattgcatacagaaagtgtaacgggagggacgcacaagcaagccatgaggaagcgaatgatgcagtttggagcaaggatagagtctgaaagcgatgcggtctcagcagggcctcagccgccccacggagctctggcgctcacagcaccagccaggcccttcccagggagcctcacagagcatgtttgcatgactttgaaaattgttcaagactataggagcccaggagccatgggatctacagctggaccgctgggctccaaccctgtgcctcagtttagtcatctgcaagacaggacacaatggcacctaccacgtgagagtgtggtcaggtttaacggagatgacgaggtgctctgggaaattaagacgtgtgcatggaggttaaagtggagtacttttgagaccgacatcagtgagggttgagaaagcagtattgcacagaaggagaactggacaatcatataaacacaacaaaagactctgctcattcc

SEQ ID NO: 467622 - DNA, 627 bp, Homo sapiens
acaaattgataaacagatcataaaattcatttttaaacagctagaattttactgctgtatgatataccgctataagaataaaccaggaacaaaaatgaaaatcaagaagaagaaggaggaacaagagaggcagccgacctgcaagacctgcaatagtcacactgtgttaaagagcatctacgcgggaggtagtgctaacctcaacagactttcagaggatccaagtctgtgtgcattcggcaggaacgcaggaagtgactcagagacctgggtccttacatcctatggttccaccagcttcaacacttccaaggctgccatgctcctgtgcatgaaggtggtgaagaagaagatagcattgggaattgtacatgacagagttttatgcctgaaaatggcgagtgccacttcaataaaaacaaagtctagaaaagcgaaattcgtcttcgaagaccatgcaacttagctaatgacaaaactaaaacaattttcaagtcctaaatttgtacctaaatattctttcaaccacaatttgtaatccagtatttgattttttaatcacaagctctctctttgggaattattaaagtgagtaatcataaatcactagaagtttgggaaaagtga

SEQ ID NO: 467623 - DNA, 2634 bp, Homo sapiens
ccgctctccagccatgagttggctgggtttagatctccctggtgtctctttgccagaggactatgtgacatgcagtctcaggcagccagatgccacctataaagaaaggctcctccaggccttcgcaaacacagacaaggagaataggaggaaggagaaagaggcccagaagagcatgaatgaagaacctggcacctatgcagcgaagtggccagctcaaggccacacggatgacagtgcagagctaggactagtatccaggctacttctggactccttgtccagtgcccatttctctcgctcaggccagcatcctcgttcaggaggtgaagcccagcaaacgactagtgagaaccatttcttggggggtgaggccatctctctccagttcaggaccacatctctgtatccttctcatctttttggtgtgtaataaaagtgtcaactttttaaaggttaacaaatgactttccctatacccttctgtcccttccttaccacttccctccccaaccctggacccccacattagtatgtagattttgaataacctggaaatagagctttttctttctagctaggggctacagagggagaaggtttaatgcaaagggaccatctctgtttctacaagtttaatgccctgctccattgtctttcattttcttgtcatagcagacaggtgaaatatctcattcgcccaccgctagcactgccttcagagtcctggcctgctaagcttgtgctgtagttaaagacactttagctgacactcttttgattcttttcttttagaaagccaagtgaggaataaacatgttgttttttctcttttccatttaagtaaatctctttctttcatttttaaaaagctcctcgcttcagtgggttttcatacttacattaatcccatcaactttctactcgtacatctttggaagagacattagaaaataatctctctgcttatttcactctgcctgaactccccccaccctgcccccagtctggtcaagctaaaagctgtttctgcataaaaaccaaattatcctttggtcacacgcattgaagggagaatgtttggttgttaaaatgtaattggttaatctgtatttgcaggtttcatttctttctctgttgacaaagacagctatgtccatgaacagagctgctcggtaggactttctgtgatgacggaaatgttctgtatctgcctatccaacacggcagccactagccacaagttgggtacttgaaatatggcttgtccaactgaaggactgaattttaaattttatttaatttcagtgcatttaaatgtaaaatttaagaagccaaatgtggctggctaatggccatagttgtggacaatgaaagtctatgaacaagatcactcctgggtataaggaaatgactcccaaatgctgctctgcagaatccctggacacctgggaagtggggagggctggtcggcttctctgaatctcccccaagctgctctaaacctcatttccaaccccccactcccacccaaccctcagcccatgtggccattgggtgcccagacatatctggagggaggggtaggtcccacagaggtggagagcctgagtcacaggcaggaagctctagggctggcagctcaaatccctgggatgaagaaatatttgagcctttttcttagttgcttggggtctgagggttgctaatctggagcacaggcctgttgaagagctgcatgaagagtgatgaaccaaaggtgatttgccttccaggcatgagattctgacataaccaggagagctggtatcagaagacaggatccaaccaggaaaacatacagcactcattggttttaaggtacataacatggtgcatgtcaaaagcacaatggctcttcagcttgtcttccttcctctaatctcttcccttcgcatccatcctttgcactgttgtcactttcattatcttaaaacaaagctctgactatgacatccctgctcaaaaactttcagtgcctccccatttctgccccaataaagctgaactcatcaacatggtagccagcaaggccttccttcctgaccatggatgaatggataataaacatgtgctacatacagacaatgaaatattagtcatctttaaaaaagatctgacacatgctatgatggatgaacctcgatgctaagtgaaataagctagacacagactgtatgattccacttacatgaggaattgccttcacctgtgagttccagatgtttataaattagtggctatgctgtttattctccacttatccgtccataaccatcctctttcctctctgccctgctctgagcccccagtggctaacctctaaagaccactcagtgcccttgtcttctgtcttccagttttttttccttttattattatactttaagttttagggtacatgtacacattgtgcaggttagttacatatgtatacatgtgctatgctggtgtgctgcacccactgacttgtcatctagcattaggtatatctcccagtgctatccctcgcccctccccccaccccacaacagtccccagagtgtgatgttccccttcctgtgtccatgtgatctcattgttcagttcccacct

SEQ ID NO: 467624 - DNA, 638 bp, Homo sapiens
ggaaatcacccgtcttctgcgtcactcacgctgggagctgctaccccaaagaagcccttgacaaggctcatccctgatgaggggcccaatagagatgggcagacacggtcactcatcaaaccaagcagttttcctggcctatggggccacgcccccagaagcaggagccactgggggccacccacgaacgggaagaatcaagtcaccaccaaggaaagcagatctcagaggcagagggctggagattcctggtgacatcattgagtacctagatccagccaattctgaactacctctgaaattttcagtaaatgagctcatcagttcccttctctgcttaagccagtttaagctggacttctgcaatatacaagcagtgttctcaccaatacgaagagagggctgtatgggatgtaggaaacagagagtcacttgtggttacttcaaggaaaaacaagtgatgggaccggaacctgaaagtcacttcccaccaggccccaactccgacactggggattacaattaagcaagagatttgaatgtggacacagatccaaaccatactggtgggaatgtagttgggtgtggatttatgcagacccctttcaaagctccagggagactgtgtggatgctact

SEQ ID NO: 467625 - DNA, 846 bp, Homo sapiens
agaaagattctgtgtcttttcctctctccctttccaggcttaaaacaaaacagaatgacaatgtatgtactgagtgctgttacactaagaaagcaggtctttattcagcagcaaagcccatggttgctttcaggttttgataaatgcacatggcattacttttccttggatgctgaccactgtccagatggtcatgacttctgtggccctgatgtggtatggcctgaaggacagcaaggtgccttccgacctctggagagaatccccaactacttttacaagacttgtgagggccttcggggtccagggtctcaccagctttccttgcctcactggcggcccctgcatagtgccccaagctccggtgctcagaacacttgcttggatctggctgatgcaatcccaagaaactccagtcagcgttctctccctttgagccagtgccttcacttccccgagcctgtctccctcatgtttccatcagacacaaaggaccgcttggggcttgttgatgaagtgaggactgctgttctctcggagcaccaccaggacgcctctcagatcactgtttgagcccagtaaagggacgaatcgtgctcatgtttattctgcaatttcaaaggctgccatctaatgtttaagagtgcagagactttaaatgaacaaacggtttggtggaaaataagagatgcacattgccatgatttgctacctggtagatggactttattttatgtggttaaggtgcagagcttagaaggctcttcaagtacaggtaagatttggaaagtcaccactaggctctaaatttggggagcagtgccttatgctaatgatgttttttgt

SEQ ID NO: 467626 - DNA, 549 bp, Homo sapiens
ttgaggggggcaggactgagcttcaggctttctcttatatcatgatagtggtgggggacaggggaggggaggtgctaccttgttactgccagtttgatgcaggcccaaatttgggcctcagtcaacaacattgggctgcagaccttggacagctgggcctggggcctcaagaggtattaacatcagagccaggtgggtctgccagaggccccctgacccaaatgttctgtccccacatcatgtggcagcacaacccaattagaggtgaccagggcagctgtccacataattgtatgcagttaacatctaacccttggctttcttggcaaagcaaaggcattggccttttggcttctgctgcttctcagccctttgcaggaggaactcacatcagtctggaacataaaaacaggagaattttcagccctggaaataattgcttcttggagtagatcctttgggagcctccacactgaggaatgaagtttgactaagccccagcaatgaataggacttggatgaggagaaagggtctgagatctgtgtttc

SEQ ID NO: 467627 - DNA, 598 bp, Homo sapiens
ctgaatgtgggattttctgattattatcaacctacctgaagataagctcctcacatctcctcctctcatatgcccacaatacccgataaatcctttgcacatttcatgtgccagtatttgtactccggcttgtgcattcttggctgcatcttcgggttccacactgtgtaccttcagcaacttcaggcattctctatactctgttggttgaagcagtcacaacattttgaagggaggaacatagaccccacttctcaacagagggtgcatcagggtcacattgtaagaagaccaaagcattcagcaatttcaaagcacatggctcctttttggtgtcttacatattcaacctcaggtttaaagtcccctgtgcccagaaattcactggagtcagcagctgaaattgtttggctgggagctcttttagctcctgagacccaagagggagcactgcccctgacagaagctccagaagaaagggaagtgtgtgtgcctgcaggcaggatcagcagagacagcccctgaaatgaaaagagacaagagggttggatcacacaccaggcaaaatgaacttggatggacctgtgatcttcccatc

SEQ ID NO: 467628 - DNA, 587 bp, Homo sapiens
gaaaaagtaggtcctgagaaaggctggaagcaaaggggagcacgcttaggtacactcatatgattcgggaagaaaggtgctggtcgacagattatggcaccacctatgaaaagctgaatgacaaagtgggtttgaagactgtcctcagttacctctatgtcaatccaaccaacaaaaggaagaaggaagcagaggcccacagaggacaactgccccacccagccaactcaacagaaatgtgcaattcacctgggcagacaagatgcaccgaagaaaatgactgctacatagacctaggtctcaaattcggatgcatgcaggggccagaagataatggcaaggaagatgtgggccaggtagagacttggaagcccctctgtaaagggccttttgccattaggctccaaatgactgttgtcatagtcacaggagaacacttcgtagactctcttgctggggacctgcactgatacccttatatgtgtgagagataaactaagtcaagtgtggcttacaaagatttccctttgactcagaggaagcacatggttgatccttcagtgcaaagggactttttgtgtcattgt

SEQ ID NO: 467629 - DNA, 975 bp, Homo sapiens
ctcctttatgtgctatgattatgcttctcagtgatcctgagatggagagcagcatattgatcagctcagacgaaggggcgacctatcagaagtatcggctcaccttctatatccagagcctgctctttcatcccaagcaagaggactgggtgctggcctacagtttggatcaaaaggtgaataaatactattttcatttacttcttgtcatccagtctcatcatcgtcagatctcagatccagcatcacttcctcaggacaccttcccagaatgtgatgcaagtgggatgggggaggaaattggcttcagaccagggaaatgctgcagatggggactccacagaagtcccgaactgaggccagagagcaaggagttcaaggatgattttccagtggaagaggaggcacaatgggctgtaatagtggctgttctgtaggcataaagtataaggcaaatatagaagctgaggttcccctgatgtttcttctctgtggcctgctctaataacctcatttgaacttatttacctttttaaagacccagtctccatatatagtaacattctgaggtactgggggttaggacttcaacatgtggatttgtggggatgcatttcagcccataagacatatgcatgtcaaggttgctgaataatgaaagtcttattgccctttgtgtccctgctgccctgtagaagatccaggatgatttcagggcagttatgggaagtttctcaggaagtgttttattaattagtattcctttatgcatgcatactatttttatcttggttgtaacaagttttgtacaaatttgccttttacacttgcttgctataacatgaaaatgattcttacttttatcttgctttcattttagcagaagtgatggctaaaggaagggagattaagaggcatacaccaaagtatatagcatgcttaattatatgcttaatgaaaaaaaaagatttggtt

SEQ ID NO: 467630 - DNA, 880 bp, Homo sapiens
ttggatccttaaatagatcattctggatagagagaagaaacttgcaagttcccagaatcatgagaggtgcacaatttcacatccaggttaaactcaagggctacctcctctttgaagttctccttgatttgtccagcccatatactttctttcttgtccgaacatccattgcacttaagaagtggaaatccaggccactcttggctttctctgtgaaccaagacaaaaaggaaggggcatacaggctgtccttaaagcatgttggacaagctgttgctacagggtcagggaatgaggatgctcactacctcacctgcaggatccaggaatgtgccgagacaactagaagtgggccttttgcccgctccattgacatcagttccctggttgtccaggatgaatatatcttcattcagggacccagtcctctggggagagcccagacttctactggttttagtgatgcactgaatccttccattggattgccattttatagcacaggagctgtctgaattggctagtcttgggctgggtttgaatttatattgtgtctctttctctcgtatcaacataccttccctgagctcttgtatttctgcttcaaacccttctcttatagaggtgagctcttcatcatacaggttattttaaattatagcagtgtgtttgcaatttttatttgctctatggaagcatattttattccatatctgttatttgtttttcctgtccctttctgtcttttattttcctatattattttatcattattatgctattttcttttatctttatatgtttaactattgcttattttttaatgctgtgagttcttcccagaaaaagtatttgaggaggttcattttagcaacagatt

SEQ ID NO: 467631 - DNA, 638 bp, Homo sapiens
gaagcctgagtcattttttgaccaattgaaggaatgacacattaccacagaaatttgtgtgctcatcccccgccagccgttcctcctcctgccttgggtttgctgtcttggctatggaagactgatcttggactcagaaatacagtacaagggaccacttctagcctggacacttacatgatgagtgactttggacaaatgatcaaacctctctggttacttgaacacaagcactgtgatcctgggactgccaatctgataaccaagagggctgctaagcaactaacgggcagtagttacagcatgcatatgctggacaaagggaagaacactgtgatagttaatactgagtgtcaacttgattggattgaaggatgcaaagcatggttcctcggtgtgtctgtgatggtactgccaaaggagattaacatttgggtcagtgggctgggaaaggcagacccacccttaatctggtaaatttccttttgtgttcattcatgttgtctatctctttcactagatcctgcaatcgtatttatcataattttaatcataacaattttaaagtccctttctaatagtttcaagttctagattatttttgagacgctgtggtgagtctctgtttctgagctctc

SEQ ID NO: 467632 - DNA, 3502 bp, Homo sapiens
caggaaaagacactaccaacagaatgataaactgtaccataaagaacaacctacagaaagaagaaggaggaggaggaggaagaagaagaagaggaggaggaggaggaggaggaggagaaggaagaggactaggaggaaaaggaggaagagaagaagaaggagagctgcttttatctgaaggcaaattgcttctggtgggccttacggacaggaatggagaaaaaggcatttgccaagtcaacggctacgtaccaggcagcacagagtttatctcctcatacaaaggtggaaacgctgatgacagcatgggtcagggaggggatgttgccactactggggatgcggaagctgtttcttctggcaaaaaaggttcatcagagtttgcaaactccgtgtctccagcttcatcagctattgatacttatgctatgacatcgaatgagcagttcttagcacaaaaagaaggcaccgtagaaagtgaagagttagaaagaaataaagttcttgttgatatgctgaaccactagatcaaaccatcatacctaccgacattttaaagccctacattcactgctgtgtatgtcacagaaagtcagtccatcattattgcatgaccacaaagatctccctcgtactacttctttatagtcagtttttttgtcttttagcccataagcatgatacatgtctccatttatttagtttttttaatttctttcatcaatatttttagtttttaccatacaagtactacatgtctttgttagacttatatccaagtattttatttttgattaataaagtagagcctgaaaatgtgattaagttgctgcaatcttataataaaacttgaataattgcgcagttgcttcttatggacgagcaaagatagtgttttcttgaaatggaatccactcttggtgaagatgctttgaacattgttgaaatgacaaaaatttagaatattagataaaaatcattgaaaaagcagcatcaagatttgatagaattgactccaattttgaaagaagttctactattggtaaaatactgtcaaacagcatcaggtgttacagagaaatcttttacaaaaggtagaataaattgatgcagcaaacttcattgttgccttatcttaagaaattgccacagtaaccacttccctgataagtcagcagccatcaacatcaaggcaagaccttccactagcaaaaagattacaacctgcagaaggctcagataattgttaccatttttaagcaataaagtatttttaattaaggtatatatgtgatttttctagctatgatgctattgcacacttaatagactataccatagtgtaaacataacctttaagtgcactgagaaacaaaaaaaaattgtgactcactttatttcaatattcactttttgtgggagtctggaaccaagcctgcaatatctctaaggtatgcctgtatttatgttctcttcttccaagctaagctgtttttatcattagatgtgctgtgtcacctaacatttatgggatttactataccatgatatctgcatgtatctaaagaagagagaaagggtaaagaaacagatggtaacatacattattactgatcaggaatgcctggttcagagatgtgaaaaagagctcataaacatcaagcaatgtaaaaatggaacaaagtgtcagagaaaaaaaacatgtttattcattcatttatttgttcaagagaatcttcttaaatgcctgcaaaatataaccccttggtgaaggaagggctgtggaaaaatgcttttacatcaatgtctgtgataccgaggaatttataaagttgcaattgttgatatttatttgccaaaatacatcatatttagaagagtaaaatgatagagttttggtggaaatagaaagtcagtttgaaaaaaataactataattttcataattataaaacagtttggtaatatatatgtatacatatttaaagaaaaaccaaggtgcaatataatttgaataccaaaatatccatctgtgtttttcttcaacaaattaattattgtaaactgatttacaaatcctatgtgccacatgaatactaaacaattaaattcaaaagtggaagtaataatataagccagtattatggggattatataacttcagatatttacatatgtttgaagaaaaaaaatttaaagtgtcaaaacgataaccagtgggaagtttctaaatattcctttgatctaaaaacaagagagtttgggtgttatatttttttaaaaaatcattttcttttgttggtttcaaatatcctgggaacttaggcaatattttttctgccccaaatggtcccaccagaataacttaaaaatacatgtatatgattgttcctgaccaggcaaatctaagccaatttaaaattaccttcacaaatacttgcacctgcaaataattctatggtaacaactaaactagccttgttaattggaccgttaatcacagagggagcagattttccactgccagaagggtcatctgtgcttctaattgtttccctgctgaaagtaacctgaaacaattcctaggagtccctaagcttagtttgaataaattgatcagattgtgtccctctatgataggcatgtcaactcctaaaactatgccttgcataaaataggcacttgatgtgtatttgctaatgcactagtttactgatgcaaacattaggagagatctgagttctattagtatggcaggcattgaaagggcaggaggaaatacaacagaagttttactctctacctgtatgccacagatgaagtttgcttagaatatcacttgtgatttcactttaaaattgctttccacaatagtaagccaaagagtctaaaaatgtctccaatttccactgacttctgtgtgtttaaacttgtgtcattaaaaataataatttagagctttatgaacccctcatatggttgctcctctttacagataaggaaactgtgacccagaattggtgacttcacaaagattgtatagatgtcagattagctatgctgttatttccacttcacctgtaaatacactctcagttggagtttttgacataagggagaagaccgatggctttatcccagcctaaaatgttaatgttcccaacagaataaaagtatagattcccaaagcatgaaatgaccttaaaattgtcctagttaacccttctccctttttcacagatgaggaatctgaggaccagaaaagaagagcagtttcccaggatatatagtaatttatgcttataataatgctattatcaatgagaagcgaaattatatttcatttacattttttactaaggtaggaaaatgttaatacatcttaaattaactttgctactggtcagctataaacttaaaggtttttatttttctattatgtaaaaaatttaattattcacattaccctgagacaattgcaataaatgatagattactgacct

SEQ ID NO: 467633 - DNA, 599 bp, Homo sapiens
agaaatattttattagatttagttagtaagctccctgacaatggaagtaacaaaagagatactggaagaagtatgcaatggatatctggactgggtcttggtattgaagtaccgccttggctctacttcaagattggagaatgaatgcggggaaattggagatgaaggagtgaaggacttgcagccccatcccttgactgtcacctccttgcagagactgcctctactgaatggagctgcttcaatcaagattatgccccattcctggaatggcccacacccagtgactaatctgatggacctgagaacatcaagaggtcaatcagctatggacactaaacagcccaaggaaattttcatgagagtgagtccccaagagagaaggaagaatttaaaggctcatcaaatgagactggaatgtctgaggtgtcccagtcctcagtaatgataagttctaggatgttgacatagacacagaagagagaccaaggtgaaaaagtcaagaaatgatgagaccaagatgtttaacaacaattattcaggattaacagatatggggtactgtcgggaatattttaggagaggtagaaaaggtagaa

SEQ ID NO: 467634 - DNA, 966 bp, Homo sapiens
ccattagagagaccggaaggaaaagatgctcaggttccagagactttcaatgactgaagagtgcactaaggtatcccccactaaggagtacagaaagaatggtctggtgatgaagataaaacacaagtccaatttattagagttgttcacagtcagcaatggtgatctacttgctagtcttaccattcctggacccaaagtgctccctggcttccatgatattcatgccttccttcactttgccaaagactatatgcttgccatccaaccactcagtcgtggctgtgcagatgaaacactggaaactgtttgtgttgggtccaacatttgtcatggacaagatgccaggaccttcatggaaaaaaatgagctggttcagaaggccaaactggctgagcaggctgagcaatatgataacatggcagcctgcatgaagtctgtaactgagcaaggagctgaattatccaatgaggagaggaatcttctctcagttgcttataaaaatgttgtaggagcccgtaggtcatcttggagggtcatctcaagtattgaacaaaagacggaaggtgttgagaaaaaacagcagatggctcgagaatacagagagaaaattgagatggagctaagagatatctccaatgatgtactatctcttttggaaaagttcttgatctccaatgcttcacaagcagagagcaaagtcttctatttgaaaatgaaaggagattactaccgttacttggctgaggttgccgctggtgatggcaagaaagggattgtggataaagtctgctctcttgcaaagatggcttttgatgaaggcattgctgaacttgatacattaaatgaagagtcatacaaagacagcacgctaataatgcaattaccgagagacaacttgacattgtggacactggatacccaaggagacaaagctgaagcaggagaaagaggggaaaattaacc

SEQ ID NO: 467635 - DNA, 1822 bp, Homo sapiens
ggcttgccctccgtgggctgcaaccattgtccaaccagttccaatgagatgaaccagcaaggtggtcttcaaactctgttattctttcttcttcttgaactaccaggaggtgaagctaagtctgctggtccacagagactgtggtcacccctccccctaggggctcaggcccagggagatctggattttgtcatggagcctctgagtggagttattggagttcctgcagggaaaccccacccactgaagaaggatgagcagttgcgagtcccagtgttggctgctgctcctctcacaaggagctcaaagggcttagacagtaggcagccacagccagtgctggtcacccctcacctcaggagtttgaacaggataactcttggggacacagaacaaaatgagagaagtaaaggcaatagagttcatcaaatagaacttgttctctttatgacttgtactcttgtattcttgtactctttatgactatttagacacatctgaattcagatttttttcttaagttctcatctcagggagtatggggaaattaatagataaatacttcataaagtgaaattaacagacatatatcccaataacagggaatttgctttctttgcaaacactcaagaaatagtctcctaaatgttaacattgaaaccccataatactgtctttcctgataatattgtaataaaactataagttgagaataaaaacaagtaaaatatcatcattttaaaattttcaaaattacacattgaaaaaatgaaattataaaatatttagaaataaaaatagtgaaacagtacatagcaacatttttgagataaagttgtactcagaggaaaactcagttttaaacattaacaataataaataaagataaataataaataatgaggaaaaaataaacattctaacggaaggttggaaaaagaagaataacagatttcagctgggcaatgggttgacggtaagcaaccacacatttaagcatacagtttaacttatttggtgtgagtagtcaattatacctaatgcaacatacttgaggtgggcacatagatcaagaagaaaagcagcactttttgatgcatttttttcttgtccctactttttgtacaaggtttttacactggtgatactttttatgcagtcaacacctttaaagggttgagaaaaacagctaaatttttgctgagttaccttctttatatcctcaggtcttcatatccatcctggaagtgcttgtacaaccagtataagtgcttctgcttggaggaatgtttaaaagtatcgggataactcagtcatgtcttgatcggtaaagaaagctgtacatatctaagtatccctgattaacatgtctaataataggcctggagccacctctttagtgttcatgaaagctgctctccatataactacaagaaaaatcaggaaataatagcaataaacatgaaaattaattacttgaaaaatagaaaactaaaattgatcattggttttataaaagagccaataaaacagtgtagcctaatcaagaaaaaagaaaactgggaaataaagacagtggagaaaacataatatctgaaatgtttaaatggggctatggctgtaactaagaattgtgaagtttattttttttttcttctactttattgtccaactccctccacttcctggacacccatactttgccagtatttgctttctcagcttctcaagagcttattttctgtaagcaggttgtatctatgtattagctcagataagaagttatcttgtactcagtaaatctatggaatgaggtactgtc

SEQ ID NO: 467636 - DNA, 617 bp, Homo sapiens
ctcaagcccagcgccacctcggacaggggtcccggcccagcgactgccttgtgggcatgttagagaccttcagagcagcccctcccatcaccggcctggaggcttaagagggaaaaatggttttgtgggctgggcccaagacccccactgctgctctgtgtagcctcaggacttggtgccctgcattccagctgtggctaaaagaggccaatggacagcttgggccattgcttcagagggtgtaagccccaagccttggtggtttgcatgtggtactgggcctgcaggtacacagaagtcagaaattcaggtttgagaacctccactcagatttcagaagatatatggaagtgcccggatttccaggcagaagtttgctgcagggatggagccctcatggaggatgtctgctacggcaatgtagaagggaaatgtggggttggagccccacacagagtccccattgtggcacttcctagtggagctatgagaagagggacaccatcctccagaccccagaatggtggatctgacagcttgcaacatgcacctggaaaagatgcaggcactcaataccagcctgtgaaagcagtcaggagtggggctgtaccctgaaa

SEQ ID NO: 467637 - DNA, 2007 bp, Homo sapiens
cggagcagcaaagattctgcaaacgattgtgttgtgctttggctaaaggcagccctgaggattatagcagtgaaggtcacttgcaaatatagttcctggctccagagtgctaattgtagcttcgaaaacgtgcgcgcgcgcacatacacacgcatcccaaatggcaaaattctcaaggtgctagattctctcagaaaagcacgtctgctctgcagcaggggagcgtggtcagggctgcgacctccacagtgcccatgggagacgggaacaggtggaagccccgccctcttctaagttagaggggagggagccccgtcctccctggtgctgctgcagccacccagcctcagctatggacccaagtatccctgcactctccgggatttcggaagcacccccaggaccctgcagtctcagtagtgctgggttccgacagagcccgagctggacactggtccggatgatctgcctgtggaaaggagccacccacttcaggtctcctgagagctgttttgttgctcagggaacctcctttctgccttgctcaccctccagttgtccacacacctcattctccctggacgcaggacaagaacttgggacccgctgaatggcaggactgaaagagctgtaacacaaacagggctgaaacatgcccccacagactcacacaccctccaattgccacactgcgtccatgagaaggagagaacagctgtggccctttgggaagcccagacctagaggctccccaagccagggctgtgacagcctctttggggctcagcagttcctggtgtctccaagcttccaggagccaccacattctcctccttcagacatgggtgcccacaggggaagccgtgtgtggtacatctggtccagccacagcctcgcatataaccagcatctgtgcgggcgtctggagctgcccacccctccgcagcagccggcatacctggctgtgcgcggtggctggaccccgcgcttgcttgctcgcacatccctcaccactctgcgcctggctcgtccttggcagcttcttgctatttcttagctcaaaggcaatgctaggaaagcaaagcatttggggtcaaaagcattttttcaagctaaaaggaatgatctcctcaaaaattgtcctaagtatgcaaagtaaggtgagagagggaatgtttttaaagtgagaaaaaattccttacctggggaaattcctcagggaagttggtgagtcataaagaagatattcccaaggattccccatcataataagaaaagagttgctaataattagggctgatgaacaattagatccaccaggtttctcctggttcaaatattcaaatagtgactgtatagaaggcacctggcaccaggtaagggcttggactcgatgacctctaaactacaatcaaaagctgagagtctgtggttgtatttgcctaaatatctcccgtctcttctgttttcataggcactttttatcacaagctattgacagcacagatttttatctaatgcatataaatgaatgtttatgagaaattccagaatgttttataagacactactttttaataatacaaggctgtaagggtaaaagtctaaattttcaacaaaataaccaaatttgcatataaccggtctatgcaaaggcaaagtggaattgaaaaattcaagaaaatgccagcctttacactgtatgcatattcctgtcaatgtatacagctaagaaaaggtaacagaccgccaaataatactgactttactggtgtacgatacagatattaaagtttagaggcttcctaatttctaggcaattggcttaccttttcataaccttaccttaactctgaaagataactacaatgagctgaattgtgcacgcccctccgctcagatattgaagttctaacccctagtatctcaaaatgtgactgtaggtatttggagatagggctgtgaaagaggtggttaaagtaaaatgaggtcatgggggaaccctaa

SEQ ID NO: 467638 - DNA, 640 bp, Homo sapiens
cacttcaggcctcactcgctgcatcaacgggactgaacctggacctctcctatgcgtgttggttcatgtactgccccaggtctatgtctacagtgggccagaaggacaacctctcattgccccccgctgagttgcagttaaggtttcgccaagctgccccactccttgtaccccttctagccggccttagcacagctgggtcagcagccatcggcatgagtgccctgattcaaggagaaactggattaatatccctatctcaacaagtagatgctgatttaaacaatctccaatcagccgtaaatatactacatacccagatagacgccagcaagaacgagaaaataacacccccggtaccaaaatatgttcaaccggaatccatggctaactactctaattactggggtacactcgcaagcagttttgccacaaagggctaacagtaaagcattaactgccaattttgactaatacaaccactgaagagagcctgaatgtgttagtcacatgtgtatgtttgataggctttataacctaatcaatacctacctatatattacttttagcatgaagcaatgagacaaaattcaaagttgtcatctatttaaattttatgtagaactgagcattttcttct

SEQ ID NO: 467639 - DNA, 1346 bp, Homo sapiens
gattattccaactacacaaggttcaggactgcctgaatggttgttaccaaaagactgagagtaatatggacaatgaagtccaggctgagggagtctcagatggagatgagaaacttattgggaagtggaataaaggtctttcttgctatgctttagcaaagagactggcagcatcgtgcccctgctctagggatctgttgaactttgaatttgagaaaggtgatttaggatatctggcagaagaaacttctaagcaacaaagtgttcatcagggtgtcaagtggagctgtaagaagagggctaccaacctccagacccagaatgttagatccaccaataacttgcaccatgtgcctggaaaagctgcaggcactcagtgccagcttgtggaagcacccatggggtctgtaccctggagagccacaaaagcagagctgtccaaggccttggaagcctgcctcttgtgtcaacatggcctgtatcgagttagttcccacgagatcttcttatttaaaagtgtgtagcactttcccctatgctatctattttaccaccatgtgaagaggtgcttgcttcccctttgccctttcaacttaattgtctgtttttctctattccttctgtactgaaacatacactttctagtatatgccctaatattatttcgtattaactatacatatcacacaaaatagcccataaacaccatgtgtttttctctaaaaatatattttatcaaatacattatctatttttataactaaaactataattttctatatttcaacacaatgaattacctcctgatctgtactactcattcactcctcactgataagatttggattcagattccccttcttccgctgatgaactgtgtaaacttggagaaaacaatttatcttacctgtaaagtgttgaggtacatatgaggtatatattgaatagattgtaggtattatttatttgtttttatcaatccagttttctctttttctttgtcttactcatcaattgaatcttcacaagtcatatatattaataagtcatatatataaatatatattttttaaaaatataattatttcttttttcctatgctgtctttttttggtaatttggaatttatttcagccaattatacagtcattttctgtacaattattttttaacagaagtaattattctcagttttgaattatccacaagtttcataggcatgcctttgatgtctttaactaaatcaactaaagaattgttaacacctcagggctcttgacaaaatgttatatcttcactcttagctcaatactctcccaatgcccctaagataacattaggtgtcc

SEQ ID NO: 467640 - DNA, 736 bp, Homo sapiens
gcggtatatatacaccacggaatactactcagccataaaaaggaacaaaagaatgacatttgtagcaacttgtatggcattggagaccattcttctaagtgaggtcagaaattcactgaatctcattggacaaaatcaaggttatgccatgtggtcagatttgttgaatggttgtgaacaaaatgctgacagcgatatggacagtgaagtccaggctgagcttgtctctgatacagatgaggaacttattgggaactggagtaaagttcaatcttgctgtgctttaacaaagagactggcagcattgtgtccctgctttagggatctgtggaactttgaacttgagagtgattatttacagtatctggcagaagaaatttctaagcagcaaagcattcaaggggtggcctggctgcttccaacagcatatggccatatgtctcctcctcctcctcctcctcctcctcctcctttcttgttaatctttatcatttctctgccactaaatgctggatttttctgcttgccaacccaaggcacattgtctaatatggtagacactagctacatgtagctattaagcacttgaaatgtggctagtgcatcttagaaacatatacttaattttatttaattttaattaaataaaaagtagttcaatctggcaaattttaatttatatttgaaataatgtgggcatgtgaatctacttcttaaaatataaattttataaaat

SEQ ID NO: 467641 - DNA, 587 bp, Homo sapiens
tgatactgcaaaaggagtaaaaatgacacaaaaaagtaatttccagttgagaaactcatttgagtcagagcgagtgtatcccttgcgagatcccccctctctgtgttttatccacaactcttcttcagaccacagagctggggcattaaaagcacattgtcatcagtgcaatttaaaaagaaagaggtttattggacttacagttccacatggctggagaggcctcacaatcatggtggaaggtgaaaggcaaaaagtagcaagttgtattttacacggatggcagcaggcaaagagagcttgtgcagggacactcccatttttaaaaccatcagatctcatgagactcattcactatcatgggaacagcatggaaaagacccatccccataattcaatcagctcccactgggttccttccacaatatatgggaatttctgaaagcctctgacttctttttgaagtgtttaatgtattcatatttaagttattattaatatggttggatttaaggttgcttctgaatttgtatgttttattacagcactacttataagagcaaagtcatggaatcaacctgtttatc

SEQ ID NO: 467642 - DNA, 597 bp, Homo sapiens
aaagttgtcacagacactgtgaccaatggaagcagaaatggctcatctcccagggctgctgtcatggttgctgagtgcctgtggctttttcaggcaaagggtgcaagccaccagtggatccactattctcggatctggaggcagtggcccccttctgacagctctactaggcagtgccccagcagagactctggagactgagattgtgataagaagagatattcctggggaagttatggttgaatacttgaaattttgtgatcaagaccatttcttactcctaaagtgtgaccgtaaagggagagtttggagaaggctctgtgatgtgcgcatcttccatgagcatcctgtacatccttccatgagcatcctgtacatgagcattctgtgcatcctgaggtactcaatatcctccatcctcaacaaacatttaaaggcaattaaagtataacctaacataatgtgtgatttctaaaaagtaaatagtttatcagataatggcagtgccacttttaactactccaaatgtaagatgacaatttccatttcaaaagtgggtttttctcttctatcgcactgtcaggctacaaattttcc

SEQ ID NO: 467643 - DNA, 822 bp, Homo sapiens
cctcatcctctgctgtttcgcgagataaacttctgttctatattaatgacccagtctgctgtattctgttatagcagcagaaaatggactaagacaagcctccaggttccatgtgcatgtatgcaaactccagtgggagcagagagagaatggcttgtggagtacctggcatgccgacacgtaaaagctcttatcatcctcttcagcaagagcccaccatgggtggttaataatagtcctgctgagggtcacttggtcacagcagcgacttctgtggagctcagttttggccagcacaacacccatcttggttctcagtgcaaagggaggcattcgtcttttcccttgaagatcatcataaatatggattcatttcctctgtgtttgttcacatttgcagtagaaattgatcatggttccagccacacaatccagctacattcatgttctggctgccgggaaaaaccaataaccacacaaagacacccccacaccaacagcccccacgcagatacccctgcaccccctacacacagacaccccacaaacagacaccccacacaccaccaccagggcctgctatctgtcatgtggttttatgctcgagtcaggttagaatgtggtaccttattgctatcaagagtctgctttgtcagtcttaagatctctgctttcacattagtgctggtcagttgtgcctgaattccagaggaaggaagcacagtggaggttacacagtctgagggacatggtcagaggaaattcaaaggagctacatttgggacagggggcctgttccatcctgaactggatctttttcac

SEQ ID NO: 467644 - DNA, 2365 bp, Homo sapiens
tgcctgcgttagctcattgaatggaattgagaacaccttggtcagccaagcgaccacctcttttaccctggctatttgcagatagtcctgggggcttctcatgggtctccaggaacaacagagtctgcctgcggtgggggccctggtgctgcctgtggagatgctcgcctgcttcctgggatcatccccagggaactccctgctccaagccccagtccgcttgcagggagccaagccaagacaacacagaggcagagccatccccagcagggttctcaggagagtcgagatgtgatccccatgcaagcgcttctgaccaagcagcagagtcctgctgggagatacgggcagcggcgcatggtgttccagagctgcgtctttgcagaagcctccgtgcctctggagggtggcgaggacgtgccgcttccccgctcggggtccactctgcctccacacagaaccttgccctagagacctgctgatggggaccctgatcagaaggacaagaagccgtgtgccgccctccttcacaccgaggaaagagaaaaagacgatttggccaccagggagatatttgtaaacctgcctcacccagggcaagcccacccttgtggttttctactgggtgggctttccgctataaaaggtaaacatccccccacccgcgtctttccccccaggaggggctgaccctgaggcaggatggagacaggcaggcgaggagggaggtcccagaaaggggaagaagctgtttcctttctctgggcttcacgtgtgtcctccaaggaagctccaggtgtgggggatttgtctcctgggcctccttctccctgggaatgaagagctattcgagcccaggtcaccacaggagcccagagctgaagttagggaatcctagtgcccatatgtcctgccgcgcactcaggcaagcaggcaggggacaaatgacaatgaccaacacgcttccccaagtctgtccttcccggggctgcgggacatcatcgtcaggaactagaagcaccaactggctacagaaaatctgggcttaaaatctgggactgcagcaaatcccagacgcaactggactctgcctggaaccgccaccccccgactggactgcctggaaccgccgccccccgactggactctgcctggaaccgccgccccccaactagatagactgcctggaaccgcctcactgcttgtccctctctaggaatgactccccagccgggctggtggccttgtggcctggtgtgcattgtcaaggaaaacagtttctgcagaaaagacggaggcgcctccagctggctaccggtcactgatgttgcctccatgttcctgctgctctccttccccttccctgcacagccaggcctccagctgactgcttctgcatccactgcctgcgtgctggctttcctcacctcgcactgccagggtcccccaccgtcctttcgtgggggacaccctcatctaaagatgcgggagaggcctggagttcgtcacaagcagaggtgtgcagcctcctcggccactgtctgcaactcctcacaggtggtctgctcctacacacacatcgtctctctgtttctctcacacccgtgctcacgcacgtccattttggtggcttcctggagcttgcacagctgtcatctgaaggacagcaaaggcagcaacccaacccgacacacctccctccctgactgcacagcagaggccctggccggggctgagctagacgcactcctgggtgccactcggcctctgtagttagggcctaaagcctaagctgagcagcaggaggtggccctgacagtggcctggagacagaggctcctgatggttgtggggctccaaggtggagcatgatgggctcctgatggtggtggggatccaagacagagcgtgacggggaagggaccctgtgaggcaggctgtccttcctatcagcgttgtcctctcacagtgcaaagcaggcactgaatgaggccaccatgaagggtgccttgtgggtctatgcagctctggccttagtatgcgactctggctatttatctatttatcaaataggtactttgttcatatcattatttaaaggcaacgtgtgtgtatgcaagcgtgtatgcatacacacccttctactatgcctaacccagaggagggaatcaacaactgttacttgattgacattacatgaaataactgaggctgattctagaataaaatagactttctactgagaaatgccattgcttccccattcctttggcaatggggatgagtcactgacggccatactacattcttctgaagtcactgccctgcatctgggcattacatgaaatcgatgactcgcctgcac

SEQ ID NO: 467645 - DNA, 1159 bp, Homo sapiens
ggagtctgtgagtttctggggaccatgtgtttgtgaggttcctgttctcaggatctcatctgtatgctcctggggtccttgttctggaggcctgtgttcttggggtccctgttttcggggtctgtgtgtttctggggtctgtgtgctcctggagtctatgggctgctgattttcatttgcttctggggggtcatgcactcctggggtcatgctgactttgcagacatgctgggacctgtgttccgcttcctgctacactttcccctccttcaatgctccttattcatcatgcctgccttgctcacccaccgagggcgaggggagtatttttggcagctggcgtctccatgtgatgactctcagggcagctttgaggatctgagcttatggcctcagtggctcgatggcagttatagtgcccctaacagctgttactccttgcaacagtggatcagcaatgaagctgagcttgggcttaatggaaattgtcccttgaacggtttgaatttggaacgtttattctccattaatttcaagaaacaaggagacacaaagctcttccctatcatccatttcccttacatgcccggttgcttccagacctcctcaaaacttgttggaaaactcagaccctggcttggcttcagagaccgctgcttggagtgcagggatactttttgtagattcctcagggctcccacagctgtcaacagtaatgagagtgaagactttcattttgcctactggtttgcaagattctcctgtatcatagcatcctttctcaaaggctgaaaaatgataaaaagcttttgggggggaaaaaaaaaaaaggaatgtcattgagcacacttttgtatattttttcatgatttaaatgccttcttttgttcattgccttttctttcctattattttttctctgctgcattatctgtcactttcgcacagttggcagaagtttttatgaaatatttgctggatatggtgttgtaaatgtcttctctcactcagtcagcttgccttttcagctttaatgatgacctttaatgaacacaaattcataattttaaaatagtcaagcttatcaatcctacctattttagttcataatttttattttctatttaagaaaacatcccccactccaagccatgaaaac

SEQ ID NO: 467646 - DNA, 924 bp, Homo sapiens
cgtggccttcctataaggacaccagtcattggatttagggctcaccctaatccagtatggcctcatcttaactcaaaacatctgctaagaccctattttcaagtaagatcccattctgaggttccagttttactgcttttcagccactaagccaccctgggggccatgtcttgttctccagatggcctcaccccacctctgtcgaagcgttcctgcctcaggcatgaaagccaccacgtggcaaaggatgaactgggaaaggagggagtgtttgtttccgtaactggttataaggagaaggtctggaaaatattgctagaccaactcaaaattacacagttttccagagcttgtataccttcgaagctgtatgtctacgtgcaagtgtacattcgcctaaagactgtggacaagagcctgttgatccatgtcatcttcacgctgtggccgtcaagttttcctgccttctctaaaggcatgcaatgcttcaggatcacagtaagtcttgatatctgttcaaggaattaccctgcccaccacagatcaccatggtatccttttgcagaagtgtgttggctattcttggccatttatttctccatgtatgatttacgataatcttttcaagttccatatggaaaacgagtctcctgggatttgggttaaatttgcattggatggcagatcaagctcttttaaataaagttttgttaactttctctgagagagacttgtggatatttggttatgtttatttctggatacttcgtatttatatcgctgtcacaagtaacatcattgtaagaacattcatttgttcttcgagttgtaagaacatttagagaattttgaggagaggcccatgtgtttttgaatgtttttatacactgttgtatttactttggtaatattctgtaggatttt

SEQ ID NO: 467647 - DNA, 655 bp, Homo sapiens
cctaccggatgctgactgacggagctcacccgtgcaatcgatgagtctggtctctccgctctcggttctggagcctgagccttgttcttctttactcacacctctgctggtcatcccccaggccatctcaggtaccggccacactgccacgtgtggttctaggagagctcagacctgcctgattctggccgttaggaccagaacccagctgtcctcgctgggggagggcagtactgacccccaaggtggcaacattcaggatagggagaaccatccagacaggtgctggatgatcctggcagaagccacagacctgcccaggtttgtaaacgagaactggtgcagccagctgctgagaagacgactgctctcacaggccagttgctccctgtgtgatataaaaagagttaaaaaagaaaaacgaaagcaactccaaaaccgagctgccgctttgggtagaaacatcccatgtgtttccgtgtgcatccacccatatggcatggcgagacgcctcctgcaggcctgcccccagccctcctgagtcagcagctctgggaccttagacttgacattttcaaatgtgatgtcattctatgttgcctttttagacccaaggtcttagcatggtatgaagtaaatgactgaaaactacttt

SEQ ID NO: 467648 - DNA, 766 bp, Homo sapiens
ttcttccttttgcatcaactcgatgccttttgccagcaacggtctttagttcagtttaagaccacccatttaagctggcactgccagcgggtcatgccaatctgtctctgccaaacccttttggttgtagatgatggcaagtttggaaataagccaaggaccctgtgcactggccctgctcaaggcagctcagctgcactggcccgtgggaatgcatttgacctctgtctacagcgtggccaggatcagctgcactggctgtttcaagaactgccacatcgcacctctgctccactctggatcctcagccaaccccgactggaccctctgaacaggcgggatctctgtacccagtatctttacatctcaagatgtcctggttggagctcaagggagctgtggagctgtggttttggtcagaagcagatggacgtctgcagggtctgcatagtactagcgagagctgcctgcctgcatggtggggcgtttcatctcttggcaaagctgcagcagacgttggcttcagagcaggcgggccaggagaggagctgtggccagacagccattgccaaggaagggtctggggctcgtagggtgccacagatacccacacccggtcagtttgtcacaaagaagcaggtgtgagtgatgcaaagccttgtaactttagagaatgtgactttgtttcaaaacggggtctttgcagatgtagttagttaagatgaggtcaaatggcattggcatggactgtaaatctggagtcctt

SEQ ID NO: 467649 - DNA, 746 bp, Homo sapiens
ctgcatcttaaattattcacatcaacttaaaaatatctgtgaaatgtttttatatctaaaaataaccttagcaagatttttctggtctgctttatgagtctctctggtcgggtcaccagaactgtgctgtgcactctctcccctggagagatttgtttgaccggagggccaggtgacttggcagataagctccaggcctttcagccacctgcagagaatcctgtcaggacaggcaccctggtggctgggccggtggctgccctccagacctatgcctacgggagctacatccctgccccacctcctccattccctatccctgtctcacctcgggagcttcccactgggattgacaatgtggaactatggtctgcatttgggaagagggaggagcaggagggcttggcagttacccgctggctcctctccccaccacagaagccagaaggcaagggggctattgatacggtccatgctgaacaggcactgaaccaaagagaagagctgggaatataggcctgcaggggtaatttgcaaatgaatacacctttgtctccttggtaccgctggctggcaacaacatagacaagaagtataattgcattagggagagttttgctgccattggtttttggttaaagggcgcagccaggtgccaagttcaagtgttcctcatcccctgaaggtctgttacctgccgcctcttttcaggcaacaactgctgttttatatatatgtaaaaaaaa

SEQ ID NO: 467650 - DNA, 625 bp, Homo sapiens
gaaccccagacacttagccgtgcaggaacgatggtgaacctttagcccgatcaggagcagcaatgggcacctcgctggatcaggagcacagcagacaccctgccggatccggagggtccaagtcagcggcgggtctgctacgccggcaaacagcagtggtggacggcgagcgaaagctcagctcgagctgtaacaaacacggaccagaagaccatgactgccacccacccacagtgacctttccaaagcggagcatttgctccagtccaagccacctgtcctcaccccagaaggaagtccactgcatggcaaagaagcccccatgggctctggctcacctgcagcttccccaccctcatctctgcccccaccctgtgtggcctgatctgcagccctgcagcttccccaacacagcaagtggcctgtatgttgtgggtcctgctcagccacagcccaggcgtcctctctgcagagccttcatccaccagactgtttggatactttacttgctgtgagcttctcacaggtaagaatcactcctccttcaatgcgtcttcccagcacccagtccagatgttcacaccaagtaaacactggagaatcattcactggaattgaagggggg

SEQ ID NO: 467651 - DNA, 623 bp, Homo sapiens
attacaccttgagaatgaagccagctaagagaaaagcccaacctacagcacagcaccacccccagcctagagccaccaaacccagccaaactacagcctgaatcctggccagcctcaagctaccagcaaccagcctagctgcggaccagcacctgcaagcactagaatgagaggaaaaggaatcccatgccctgtgaattggggtgagcctctgttctggggccggagccggacgtggtttcaaggctacagccccacagctccactccctctgagcagcacctttgcatgcagccaagcagccaggagtgtgacaggagagaccaagcaggacccatgccccccaggcctctggttggccttgctgttggacaagtccagtgccgcagagcctctgtggcctcttctggaagcctcctggaatgaacagatggccgtgcagagtggctcggggcggtcatgcttgcagcaaggctcagcaaccctggcctctgtgcctgtggcctccccgccccaaccaagcccccccaccaaagcacaggcttctgggagaggcattctgcccttttgaggctcaccctgggcagcagagggagaggagagcaaacaaggtggccaagcct

SEQ ID NO: 467652 - DNA, 960 bp, Homo sapiens
cgccccccagaaccccctgctaccagccatggtcaatcccaccatgttcttcaacatggccgtcaatggcaagccctggggccatcaaacagcccttcgagctggtggtggcttcacacgccgtaatggcgctggtggcaagtccatctacagggagaaatttgatgatgaaaactgtagcctgaagcatacaggtcccggcatgttgtccaaggcaaatgctggaccaacactcgacccctaccccgcccccagccctgtcacccaccgtggcaccgccctcccgcggggacaattggcctggaccaagaatggggagcctgaacagtggccggtctcccacccgctcctccggagcctgcaggggggttcagcctctgtccagcagacttcctggccccaagaacgggccttgggaaggggctcccctgactccaagttgacagcagcccgtcccttctccttagcccaagccactctggcaatggggacctgcctccctcacgctaaccaaggaccggtctgggatggggagttggagatgggctgtgaggactcttctctcagcccttaagagtccagaacttatctgggaacacatcagccaattttctgttccctttcttgccaggaactgcttttattggaagaagtctatgtatatgcatgccataaaggttgtttatgctgtcatagctagatttttattggttgtatttttgctgcacttgcttgaaaaataattattttcaaagaaaagaagaattacatatccagtaaactaaataagactcactgtttattagagacctctgacagctcctcaaacacgaaaaaagatttccaagtagtggatggacaatttatgtgtaagtttatttgtaaaacagatttcaaaacatacttcatcttgactctgccaataaaaatacattccatttcttttcagaagtatgtctt

SEQ ID NO: 467653 - DNA, 697 bp, Homo sapiens
cctggacgggagcccgatgggggtcacatgctgctctatggagctccttgaggcaaagaagtgggggtccatgtaccccacacaggacagcggtcacccctgggccacccaatcatggagggtgactccaggtacctccagtttgcgggtagcacagcagccaagagggctcctcgaaagccaggacttttggacaagggatcccgagtacatctgtcaattactatggatgccagtgaaaccgcgtcttaagtggaaccatctggaaagacaaggaagctttgtcagagtctcctcccactctgttgccaggaggctggcccagcaccaactcaaggagaaactgtgggtccctgggagagtgggggaaggccccttagggaccatgcctggatggggagattctcacgtgggagacaagccactggtggtctttgggatcctgcccagagggaagcgctgcccctcatggctccaagctccagtggccgtaccagaagatcaggggtgggggtgccgtcatgagcaggatgagggcagcacccctgagagccgctgcatgcacagggctcaacagcaaggaactctcatcttccccatctgcaactcagtgcccattaaacgctaaatccctgctgtcccctctgggcccttccaagtttgcactaggaccaccctgtctttctaccaagatgcc

SEQ ID NO: 467654 - DNA, 1831 bp, Homo sapiens
gttacagctgctggctctgagtgagatgagctcctcctgcatcttcccaagggtgaaggcccccatagccatgctggtggtagcatgggccctgggcggacccgtggccaaaatggacgagggagagaggaaaggctttcagttttcccctattcagtatgatactagccatgggtcctttgtgtatggcttttattgtgttgatgtatgttcctttaatacccagttttttaagggttttaatcatgaaggggtgttgaattttatcaaatgtttttcagcatcaatcaaaataatcatacggtttttgcccttcattccattgatgtatggaatgaagggcaaaaaccatatgatcatttggatatatggagatgtctacctgtatctttactttgtaggcaacagattattgagtcttgtttctgaaaatccattcagccattctatatcttttgactggggagtgtagtcaatttatttaagatgattttctctggtggcgtgttttaacttcttgctttttattttttgcatatctgttgtatgtttcctgatttgaagttatcatgaggcttgcaaataatatcttataatccacgattttcaactggtgacaacctaacactgattgcataaacgaactaacaaataatcaaagagacaactaatagaaactctacagtttaacttcatcaccctgctttttaactttttgttgtttctatttatattttattatactatgtcttgaaaagttgttgtagttattactttcagtaggttcatcttttagtctttctactcaagatatgggtagtttacacaacacagttacagtgttataataggctatgtttttctgtgtactgactattaccagtgagttttctaccttcagatgatgtctattgctcacttaacatccttttccttcagatcgaaaaacttgctttagcatttcttgtaagacacatctggtgttcatgaaatccctgagcttttgtttgtaggggaaagtatttctccctcatgtttgaaggatatttttgacggatatactagggtacatatagtagggtatatactggggtaaaaaattcttttctttagcactttaaatatgtcatgccactctctcctggcctgtaaggtttccactgagcggtttgttgtcagacatggagctcctttgtgtgttatttgtttcttttctcttgctgcttttaggatcctttctttatcactgactgttaggagtttgaatattaaatgtcttcaggtagtcttatttgggttaaatctctttggtgttttaaaaccttcttgtacttgaatattgatatctttctttagttttgggaagttctgtgttaactagacctttgaataaactttctgcttctccctctctctacctccagtcactcttacatttgcctttgaggcagttttctagatctcataggtatacatcattctgggaatgtgctgggtcacacttgaagccagtgtggttctgagtcttgccccagtcctgtgtgcctctttccttaatatgttgtcaataccaggatggactggggcatccaaaatgttactttgagggtcccatcctttgcacagagagctcattcaagttttcaaagcagaattttctggcctaagggccaagggcctctcctctcctctcctctctttccttccttccttccttccttcctctcctctcctctcctctcctctcctctcctctcctctcctctcctctcctctcctcccctcccctcccctcctctccttccttccttcctctttctttctttccttc

SEQ ID NO: 467655 - DNA, 623 bp, Homo sapiens
gcggcatggtgcctctcgttctgatgttaaacgtgtccaccgtggatcttccctgcaggaatggaacacctggaggtcaggacccacctgctctcttcatctggtttactcagttacagagccaggcacaatgtgggggctccctgcctgtggaaatgtggttccagctgtgcagagctaaccctgggaagcaaaagcacacatcaaagctggcggaacagcccagcatgggacaggggcccgaggaatctgcacagcacaaccgtaaccccaagttccccaaggaacttcgcaagcccaagctgcagaacttactcaccagccatggagtcctatccatagaagacaggatccatgtgagcacagcaaccagaaaccctgtggttctgttaaaaatatttctgatgcattcattcaatctgtttttgtatatccattaagagtattccctcaacttgaaattgtatatatttgtaccatgaattgtactactcaggaggaagtcatttttataaaatgtcaataatatattccttgcatttaattttgaaatgatcagaagagatgcataatgacttctctccagccctgtgggccacatctctgatccagtgctccaggtg

SEQ ID NO: 467656 - DNA, 964 bp, Homo sapiens
tttaagtgagccgtgttcaaggttgcccagccagtgagagcgggagctgagttcaaggctgcactgcaggtaccagaggccagcagggagcctcgtccattgtcaccgatggcgctgctttcacattcaattcataacgatcttgctttcccagctgtggtcggctggaagcatcaagctggaaggaattcgagaggactcatggaagatggcatgatgacaacagagatgacggctgacagcctgacctgggggatggagacaaaactcacgggcagtagctttgctatgtttgctacgaactggcctttttccctcactacggttttagggatgacttctgtgaccttcaattctaagttgtccatggaaatgcacgggaacaaatcccaaactccagccaagcttccctttgatataacttttaactatgatcttccagacatcttccaaaacttcgtcatctggaaacaaggagatggccgcgtaagcaccttcagtccagccgtgaattcaccattggtatttaccattctctcctcattagttttggaggaagaaaaagagctgtggagtggccagaaggacggccacagagaaatgacaacagtcactgtcacactgaagcccgagtgcctttaccagggtgtgagcgatgtcaccaccgtttcctccttcttcccagccaccgttccggcctctcagaagctgattttttccacctccacctccttcctctgctgctgtggctgcactccagagcctgcccgcccgaacccttctccaaaggaatcgactcttctgcagttcccctccccgtggcctgaagacacagttttcctaatagagcgtttcatagcagcaaagcggttgtcgataaacccttcaggtcgagcagagcccgtgagtcaaaggaaatccgtgctagtcattgagcactgaatgacttgtttcaaactcaagt

SEQ ID NO: 467657 - DNA, 811 bp, Homo sapiens
ccttctgatgcttttgagattccttctgctctggtggagccatttgtgaaaaacaattcctagttgcaaaaggtgccctacgtattgcttcctggtctttgtcccctcttccccccacccccaatttcaggagtgggcggggacagagagcagtgctgtttgccacaagatggcgctctccatctgcggtccacgcagcatcctgtgcccgagcatcccccgcacccccatagctgaagcaaaggagtggtcaggtgccaggtccaggcacgtgttgcctagcaacatgttggggcctggagaagctgacatcaccttggaagagagcagcttcacgcccaccaacgaggggatcagtgcttctcatactacctggaccatcaaccagatacaagaaattcatcttacgttgcagctcagtgcacacataagtaggtggacatgtgtatattcatatttatatttacatctggactcaaatttcacttgcgaaatgggagttgggacctactccatggatgtcatggatttcagtcggcagggcctgtctaagctagggatggttttaggcaagggcacgtcatacgattctggccataagaagctgagtggctccttgagggtggcccatgggactggtttggggacctgattcagcataaactgaaatttgtgatttgacctctgtggttttggctacttgtaggtaacctagaaggctcatggcatatagtcatttgtaatttgctgagccacatatttagattttgtatgccataaaatggattctgtatgctgtgaatactgaatc

SEQ ID NO: 467658 - DNA, 727 bp, Homo sapiens
ggcctgtgagcagctgctggcttcaacgcttttggggtgggtctcagagccgcagggcgagccctgtccctgggagagctctggcttttgttacccttaacatgtttcttcatttgctcaagccctatgacccagcaggcctctcatccctgccactatggcctcccctgcatgggtcccctctttagcctgcctgcgctcctctaattttcagacattccctgcaggacccgctgctccctgctataggggccttcctttctctacctgccagtgcaggaacacaagacctatccctcctcctcctccccctcctcagcctattcaatgtgaagacaatgatgatgaaggcctttatacttactttattgtaagactacagtatacaatacaggataaaatcaactgtttatgttattggcagggcttctggtcaatagtggacaggtttttggaaagtcgaaagctacaggggattttgactgtgtgggtgtcggcgcctcgagcctccgcatcgttcaagtgtcaactgtactctatcctgcattcaaagaaacagcaacctcttggtcatttagaactatctgcaaatacagaatatatatgaaagtgctacagataggaaagcactatgtaattttcagatactgttattagtaataatggtgctctgccacaaatacttctcttgaaaacctgcagaatcatgggaaactagcaaagacac

SEQ ID NO: 467659 - DNA, 933 bp, Homo sapiens
agtggttcatgacggttaaagggtctcggattcaagcttagcctagtctccctacttaatgctgcgggatcctggaagaagatcctatgggaatgcagctgaccttcccgcttaatttcattaacggaggctcggtgagcagggtggaagcaccccctgccctgctggggccacctcgctgaaggtgggtggaggcggcgctgcctccgggcatatccatccacaggccactgaacggagaacggcctgcaccttcccctctgatgaggcttctcagcttgtgcctgtaatggacaatgtggccgcgtattatgaagccgtgattaaggaattgggggaaagggaatattgccaaattaccctcctcaaccaaggacccaattaccctcctcaaccgaggacccattcatactgttttgaagaagctttgagtgttcttttcctcatccgattgccagaactggacattcacttgctgcaaccatgtgctattccaggcaccaggaatgtgcagaggaaaacgtcagccctcgccaagctgacatttgtatgcgtgagtgacagacagcaaatcacgaataaacaagatactggacaagctgcagaggcacacactttgtgggacttttccctgaaaggtcccattcatctcttcggtcgcatctttgcaggccttcatgggaagaatattgttcacctttggctggggacagttctaccaggccctgctatttactcaagaacaatgcaaaacaggccaaggagcatgcgtccacagaaccatcacccggtttcacatccattccacatcacccctgatatggtttggctgtgtccccacccaaatctcatcttgaactgtagctcccataatccccatgtgtcatcagagggaccccggtgaggtcattgattcacgggggtgggtttttc

SEQ ID NO: 467660 - DNA, 3790 bp, Homo sapiens
gctgggagggcatggaaggccggcagcgtgaagcccctagtgtccacccagtgtacctttgaaatgctttctttcaggtccctctggaagggattatgtttccaggggtccttcgttgtcatattcccgcccgctgcattttgctctggactcatggctggaccttcaaaaaaggccgacatccactccttgccatcttcaacactgtttaccactttcaaagaggaaaacaaggccagcagctgtgtgatgtgggctgagctttttggcattctctgtttcctcctccataaagtgaagactctcaaagccattaactcacctactcgctcacctacacagccattaactcaccaactcacccacccacccattaactcactcacctacccacccatcaactcacccactcacctacccacttacccagtcacccacacattaagtcacccacccacccacgcattaacccacctactcacccacccatccacccgttaactcacccactcacctacccacttacccagtcacccacccacctactcagccattaagttgcccactcacctgcccacttactcatctagtcatccacccacccactcattcacccaaccatccacccattatctcactccctcacccactcacccactcacccacccgtcactcatttacccaatcacttacccacccacacactcacccacccagccagtcatccactcacccacccgtcactcatttacccaatcacttacccacccacacactcacccacccagccagtcattcacttacccacccacccacccaattaactcacccactcactcaccactcactcattcacttattcagtcactcattcacccgcccactcattcactcattcactcacctactcactcacccacttattcacccactcattcactcatccacttgctcatcgtcacccactcacccacttatttactcactcactcgcctacccacccactcattcacccggccactaatctactcacccacttattcacgcactcattcactcacccactcactcatttatccacttatttactcattcacccactcacccacccacccagtcacccactcactcacccactcaccattcactcattcactcacttatccactcattcacccactcactcattcactgactcattcacctacccactaattcactcactcacccactaattctctcactccaggtctcctcggcacttctggcagggtgttatggatagagggatggactgaagaaatttacaggattatcaagcaatctagtcccactggagaagaaatgcaaaactctatttctgagcaataacaaatataatttaactccacccactgattcagtggttgaataattaactaacatgacttctggagatacagattaaaataaatagacacaatctatcagatgtcatcattgcacctaaaatatatatggaaggattttgttcctgccaacagattatgaaacaagacagatcttaaatcactggcctctatttgaacttacaaatatttttaattttaaaagtgtttagtaactttcataagtgaagttgtaacggtgtgacaaaatggaggagtcactgagctggacaaatattttcctaatggttttgcttttttcattcctttaaatatcaagtaataatatttttaatgtttttgtaaacatgagatgttttaatgcttgaaaaattgtatctcataaataagctgtattatctgtcaaaaaggatgaaaatataactttacatttctgttttaaagtaattttagtgcctattagctataaagtaacagttatatataatttagagtatgtagtcactcgaaacaacttgacattttcacacaaacacagaaccgtaatcatagtcttgggatttcattggaagtatgcaccactacaggatattaaaataacttatggggcactgtaattcttgttttgtatttgtccaagtagttgtgaagcaggctataaagtagcaaaataaaaacctaagctccaactccagctaagctgcgttcttaaagttatagtcatcttttcaaattaagtgtgattaacctagctgacatttcttggtgtcatctttgactttttcctttcttaatgatattttctgttttggtgacaaattctatttatcgtagcttattatatgaggcagtgtaattgtttccctaagataaaaactctgattgcgtgtagttgcaattctgctctttaattgacaaagggtacattacttgttgcttttaagggagtgtggacatgaaagaaatttttgcttttgctaaaacaaacaaaagctgaattcttaagggtggttttgcctactgttttaatttgagtacatagacaagaatcactagtcgaccggtgtgaggctgaaaatgtttagcaaatggcaatgtgtatacaggatgtgtgtggaaatgaaactgagtattcagtcatactccgctggcttaaaggacagataatttggaaacaggctggtttcaagtgtatctttgaggggtctatgagaggagtattctgcgaatattgtaaaccagatgtaagggcaatatttaacatacttaagagaaaaaaccatttaccgcatcatttatagagctgacacataattacgcttgcctcattaaagcaggcccaacattatcctctttctggcaatgcatatcaccgtatgcccttgaatagaatgaaaaggcatttctttaaaatattccttaattgtacttttgcattaattttgattggcctttagctcattggtgaggtctcccagtatcatgcgaagcagtaacacaataaatgaaaattcatccataataacgagctctatagttaaatattattcctgagagaaaggccaaggaaaaaataatttttgtgtggttgaagatgggcaccatttataatctacatattgcaattaaaaccattcaaggatttgacttccgttaattttaattgaagtggtatgcgggtagggattaggtgagtgcacagacgtgcacaaaaattaatatgaacccggagaaatgtcttttctccataaaaggactgaccaaatgttcacagatggaatttgagaggacccttattgaataaaccagtagggctcagttggatcattttggtagcaattccatatattttatgttggaaaagacatacccctttctttttctttataaattattctcaggcctgattagttaatgtctttaatttgcatccgtgcacctaaatgaaagtaaaaacaaagtagcccaataaatgtactttatagatgatggtttaaggaggtgacaattcttggctaacagatattaattaggaatattaatcatcgacgtctctggggtcagctgagatgttggggacaaaagcaaaatggaaaagaaaagaaggggacacagtgtgaggaggcgcttagaacttttcaaatggaagaactaatgagaaatttggaactgcgagataagaaagctctaaaaaacacctccacgtagtttcttctggtatttctgaagacaagtacagtgggtctcacaacaggtgtgcaataaaacattctgaataaacaaaaagatgaattgatagattgcattttaaattttaacacagatttctccatacatttagataaataacacaggaaagttcaaaagcacaccaccttagatttcagtaatttgtgatctt

SEQ ID NO: 467661 - DNA, 597 bp, Homo sapiens
cccagtgggtggcatgaagcctggctcctcgtccagctagccatcagaagtcagaatgacctggaagggccaggggcagagctgtcgtgagcagggcctgggagtggttatgttattgctctccaacaccatcagaatccaccaggcattttcctccttcctcctgccagcatttgctgggttcctgaaagtcctagcgagcaggatcccaaatggcagagggatgcaccctgatgtccatagtgtgcttccccgagccatccaggagcaggggcctgtggtggagacacatcctgagctgcctgcctcctgggctccatactctatgagagttgctgagcttctcgtgctgaggagctggctgtcctgggaaggaggaaggtgttcaaagcagtccctcagccctcgtggagatgctgccagggctttgcctcagagtgagcaaggtcttcccgcagcctgaaagatgcccacagttctgtgtctgtgttggggaggtcagtctttggttgtattcaggccttccactgattggctgacgcccctcacatcatagaggataactgctttactcaagtccactcatttccatgtgaa

SEQ ID NO: 467662 - DNA, 663 bp, Homo sapiens
tcacctccaaggtccagtagatacagaacgggaggaagcaagttcttcctgctcctttcctggatgagcctgattttggcatgtggcagatttatgaactcttccgacacagacctggaaagaagccgcttgggagcagagcccacggtgctcctttctactgaactcctcaatacgattcgatgcagctccctcccacgccatcgaggaataggacttggagcttctgtccaaaagcttcgagagtcatcggggcctcttttggtatttcagctcaaaaaagatggaaaggccttcttctcctgtccagggagcaacctccctgaggtcaccaatgatggcttgcatccctgggcaacctccaggcacagtgaggacaagttaaatggggaacccacaaaattggaatttgcattcgggctgatgacgatggaaagacaatggtaatgaaacagaacttcagtttgatgtctggaaaagaaaaacaaaagccctgaagctcagagcatattttttcatgtcctggaaatgtgcagtctccagctctctgggtcgtttcgatgtggcgttgacaacgttggcacaggtagacccttttttcaggaagccagtcaaattcagaaagaaaatctagattgagctgttcttctctgctggctatct

SEQ ID NO: 467663 - DNA, 638 bp, Homo sapiens
catagatagatccttttcgttcctgacttcatgggttgaattctcatggagaacccccaaagcccccacccacctccaccctgcctgcagggcccttgtcattgccctgcacagggacagctgctctctctctgtgctctgacttacccgctccaccttggttttggctggatgtgtggccatcagaagctcagtgctatcctcctgccaactctaccaatagaagagaggtctctcacaccaaggctatcagaacagcctcagggaagttctcagtttgggccacatatctattcattcattcaatcagtaagtcaaaccagcaaaccagccattcattcgaacaaatatcgactgatcatccccaacatgccagacacattccaggcgcgagggacatggaggacgcttggggacaatgccgagggggctaaagccaatagtgatagtgctgactaaacagtcagtgggccttcttggtcaagagtgattgtcctgggaatggagggtggcgttcaagcccagccccttggttgggacagtggagagcaggcaggacactaaaagggggactgcactctggggtggataaatccctttcaggctccaaggctagtcttgtgaggtcttgaggagaa

SEQ ID NO: 467664 - DNA, 2457 bp, Homo sapiens
ttactcagtgagaatggaggattgaagccacacaggacgctgtgtgaggattcagtggactgttccggaatggtgtctgagacgccacccagtgcccctgggggcccaggtctgcaggtctatgccaagccatgcctgccctcctggtgcctccagggtacctgcaccttctgtggctccagtgggggccttcccatggccctaaggagcttggagtgtccaggacctctgctgcaaacaactgccttaggcctcccaggcctcacctgggggtcactgatgcaaaaggtggctcccccttcctgtggtccctctatagcctcaggcagcttctgaggacacttgatggatccatgagggctcttcaggccttcagaaagaaattcaggctggatgcagccatggctgtgcactgggagatggtggctttccaattgcaccctgttccgacaggtgccaagtggactgtgctaggaatgcattcacctgagtgctatccactgatccaaagagaattttacattatctgatgggacaaaaagaagagcctcagactggagccacacttgctgccagtccaggacccaccttcatgcagtggagtagctccagtgcaagctccctcatcctttgcatcttgtcacctggtctctggagtagaagatggcacagttgtcctgtgctggttaatgctacaatgtggaggtgatggcaggtgacgtggtccagaggcctggaaggcaaaacaagagacccatttattctgaatccagtgtggtaagaatcctctgaatcccacggacccagtgagaccttgtacaaccctccttgcacccactggaagcgtgtcatcttctcttaaagactatataaaccacccataatcgaatccaattaagaggagatagtctagctttaaacaaatggtgaaccaacagagcatcctctggtgagctacaaattttatgccttggcactttcagatgttgtcaggccaagcacatacccaacttggagccaaatacactaatgctgagaattagtttcaaagcacatgagagactgggaaaaagagaatgatatttaggacttaatagtttaaaggcccagttcactctataggaatatgagcagacatatcctactggcaatggtaccgattaccttttcatttcataattaaaacattccaggagtttgaatttacaggacattaactcctttttagcaaaccttataccatgcacccttcctttgccccagttaagaaaaaatgtctccatggagacagtcaatgtttttaataaaaagttgataatccatttttcccatatgttaaaagtaaaactcaagttagaacttatgattccatgattctatgtgttccatgtggagtttttcctttcttgcagtctgagccagagaagtaaagacgatttacaaaatatagggaaatggaatcatactggcctgtttgaagcgacacttcacacaagtatttctgtgtgtagtgctcatcaaataaaatttcctcttctttgcaaaagattccagtctcactgatgttttttccttttggaaagtaacagatgaggtcatgtagctttaatttttctctcttccaacagttatgaaaacttaaagatgagagtcacaagctttaaactgaaagaatccactatttattagtggtttgaacagaggagggcgagtagctgggagtggtgtacttggattttatacctggctataaacccagtaatagaatattacatctttttctcaaatagagtcttatatcccctcatttttctcatagtctaaaactaaagtcaagggagttcttagcacttgtcatggtcatattaccttttactttgcactgttcaaaaatgttgtttttgcaaacactttactgattgcgtgaagacctgatttactttattttagaaacaagagtaagatgctgaggtccttactgagtagctctcattctgtgatgagaaaaggcagcgtgagaaggagaacagaacaggcacaaaccgtcagagcatccctgaggacccaacccatcgcacagccttgactctcttctcctcttgtttctctctcatgcctggagccttgcaggctgcgtggaaattgagagtcctctgtcacgggtatgcgtggccttatctggctccaaggaaggccacttttgtttccaagttgccattccattcagaagggtgtttaaacttagcatgtgctcccactgaccaaagagaggctggaaatcgcatcactaaagtcgtatcatatatgtgcttctattttaaggcattggaggaaacacaggagaagaatgaagataatttccaggttggatatggatccccaaccacagtaaaatgaatgactctttccagacacacaactgtgctccggggagggagctgtccgacctgtggggag

SEQ ID NO: 467665 - DNA, 749 bp, Homo sapiens
ttcagtccttgccctccctgaaggctgtggcttcccaggagatgcagccaccaacagttagcagcagcagcttggcagcctcctttcatcagtggaacccctttccagccctggttcccagcagtggcctctgcagcccatggagcctggttagctggtcaccaactgcctgtccccagcacaggggtcttaagcctaaacccatttgcccacttgctgtccctgttcccttgggtccaagagggcatgggttatgtttttctgtgtgccctgccgggtgtcgagcctgcagcaaggcacagtcagtcaggcctcggagtccgtggagagtgaggaccgctgcggagcagtcggcagccaccaagtgaaggcaccaagggctgcaaggccgagccctgaggaacccatggtgaggaggacgggccgcccagcaaggaggtgtgaccaggccacattgtgttgggagttcagcggcatcaggctgaaggagtgtgcactggccatcagggcccaaagctgcagccacagaaaccaccgcatggaacaaggcagcagctgggaatgcctgtgtggcccaggcctcaggggcttccaggtgcaggagagaagaggtcagctcaacaaaatcatgtgctcattgcacgccttcatcccaacagacgccaaggacagtgacattgactccatccagtttgtcccttattagtgaagcaggaagaaggactgagttatagcagctcttatccttc

SEQ ID NO: 467666 - DNA, 847 bp, Homo sapiens
gcaagctacactcatggactagtcaagaaattcagaccagagaaagccttcaatcatggtttggtaaaacaatacagaattgcaagtagatgaagagcattaacctgtttgttccagttgggttgctgggaaaagaaatcattttccacatcatttttaatattactctttgtccacccatcccgaaggtcattgaaagggaaatcgttcgcttgttcgttcattctattcagccatctttgctgagctctgctctatgccaggtacctggaagaagcacctttcctaactctcattttatgcttgttgatattaagatgtcatttgaaagtcatactcagtttgttacttatcagagtttttacgaagcagtacaccacggcagaaagacctcagacatcgaggttaaagaggtctccgtttgtattctagctctgacatttgtgaagtcatatgcagaagacgagatgccgtaatgtgtaaggcaacacacatcctgctgccttcctgggaagcttattgttaagcactttgtcttagttatttcaatgcaacccaactctataaatccctcaatgacatggaaagggtctgaaatggggaataatccacccaacccagctctggctgagggcatgaactccttctctttctcatttatcctggaggggtaatattaatatacttgattcctttacgagtcagtgaatgttaaactctaacctgttctagtatattccactttgaatgtcactatcaggctattctacacagaggtgggatggcacgttcaggaactggtgacacccctttaaaatgccacttgttatttcttaggatagtttcc

SEQ ID NO: 467667 - DNA, 760 bp, Homo sapiens
gacttcttgtgacccacagcatccgcgagggtagacggcccaacagctggtctgcactgactccctaggggcacacgctccatttttgcacagatacgtgccaccaggtgccatgttggtgtgtccttgtgactcctcctccaacattcttctgcagatggcacaaggttttctgcagttcaaggaggagaatctgtgccccatcaaccagacgatcccccaaggcccgtttagtgggaaacagcaggatcaggcgggctctgcccaccccaggaacacaggcttggaggtttactctccttggtttgtactcccaggagaaaggaagcggcacccagagtggagtctgcagagccaggatctctctggagcagccctgatgaagtctccagggtgctatccaatgccatccaatgtgccaggtgtgacaatctatgccttgtcacagctgcatacatccctgactcagaggccccacctgactcccacctcctgctttagcaggaacaggaacaaccccagattgctgctcaaagactttgccagcagcgtgtcagaagtttctagtgagagataaaagctggcccatcatgaagcctggagaagatggtgagagagtggactctcaacagtggtgtgcaggagccacgcagctcgcaacttgcacctttcatcttgtaccacctctgtgttctgtgaagcattacttagaaatgacctgatgctccttcatcctctcctttctctccttattttcctt

SEQ ID NO: 467668 - DNA, 2346 bp, Homo sapiens
gaccttctccctgtgcacagcactgagggcccttcctctgctttccatgggaggacagggtcggcagagattggcggatggtgcagtggctaaggcaaatttgcaactgacccgcactgcactgacctgcacttgaggttcgtcctgttccagcactggtgtctctttctagaggtttctcaatgcattgcacttcttccagctgcctctcactctgatgtaggtaatctgcatgaagcgctggcaaatgcaaatatgatctatttgtcatcaatgagaaagtgaaaccccaccccagctggtgccttccccacatctgcccaccatgctttgtgctctgtggggctggcatcctggcctctcttgccctctggcttccagagggtgtgggccatgggaggagctggcaggagctctaaagaaagaggagagagagatcaagatgtggactctcctggtgcctttcttgagaggcttggccaaagccctcactgggctggcaccactgtctgtgcctttaccaggcccaggttggcaacagcttcctgctgctactagttcccagggcttcaccattccttgctcacttcctcactctgccgctggcttggtaaacagtacttcaaggagaccttctgcctgcatctgccagaacctgactgctggagatccttctctgctttccgatgagcccagcctccagctggtgaccgtggccattgtgctttctaaaggtcactagaatcttctcttttctcttttgtgcttaaactgatgcaattcccccaatgaatgtgttgtattaaatattaggcttcttaatctactattttattaatatatcttaatatttaatgctaacattttatgtggagttctcagttgtattaatctagtaaattttgctaataaaattaattatttttctattttaccttttgaatagtaaagattatgggggagtaaaaataattagatttcactggggtgagtgatgggggagaacactttattttcctgaaaatggttcctgttcaccttcctcttactattacctaagtgtcctatagttatctcatgtgaccaaaaatggactgtgaaatgaaaacggatgggtacctgtgaagggcttcttggacaagttttaggatttttagggttggaaaagccttatagaaaatggatgatctttgggtttataaataagaaaaggagggcctccatgctttctcaagcaagagccacctttgctaagaggccttccttcctctccaccccatccctccatgcccaagttggcaggctcagatcttcccgtgatctcatctccagatgacagattcagtcctgcagccagctgggatatgtgcgctgcttccagtggatggcttcgccttctctgctcactgagtgtttgatgagccttcctttcttcctcttccaccttcaagagtgactctctatcaggcgagttgtggccagcagcacttggacaggaggggaagatcccctgctccagccagtggtccctggccatggtgggaggtctgcgtgttgtcatgaggatctcccttccccgaacctgggccctcctgctctcctcctacgtggctcagagccccttccccatcctgaatcccacccaggtcagcttggacaatcctacatgaactggactttttcctctcttgctggcttcaagaggaacaccttaaatctctagtgatggaaagaacacacatgggctgggggagtagagtgtttccctgtttcaacctttccatggtggaacgtggtgctccatggacctggcctgcctctccccaacagcccttgactctgcctctcgctttacctatgtgttacattcctgccactggaacaaactcaagtctccctgcctttactcagtctctctttgctgcctagaattttctatttccctctccctctccactttgtttccttacttaaaatgtgtttttctttaaattaatgaatcatacacaaagaagaaaagtactgaccattatttcaatcaacaagttcatatgttgtccctttagttcagtcccttttctattacaaatatttttggtataatttaaagcatgcttcataatttaataatattcagagatagatttctaagaagcacatgaagcttaaacttcagggaccctagctgtggctccatcctgtactggggaattttattctctctcttaaaggccacacaagttgtgtagtgctcaggcccccaaaacctggatctgcccccgccccatcttcattctatgcatgagtttccccacggtgtcacaagctgtttaggaacgggattcc

SEQ ID NO: 467669 - DNA, 632 bp, Homo sapiens
tcccagggcacatgtggagggggatgcctggaggcaactggggttggggagaggatggaaggagcccagccggaatgctgcctgggagcactgggtcaggggtccctgggaaagatgacaaggtgactttgagccatgccgattctgagacatcacagctctgtgtggaaggcacgctccacacatggggtctctcagtaacagtgagtctgcacgctgccttctcactgacacggagggagaagcccgtgtggactcagagagctccgattctcaatgacaaccggtaccgtatccatgttaacacatcaataaaggcccaggcggttttcagtaaacccaagcccttcctctctgagatccgtccaatctatacagcaagatctacgggactaatattcttcaagctgtggactcagaggggttaggtgacttgtcctaggtcacacagcagggaatgcagtcataacacagagatcccattgtgttctctccctcaatcacactacctggctccagctcctgcacaaatatgtttaatcttagaagttcagagtcctgcaagccatttgggttttagaattcatttctttgatgagggttctttccaaattataaaattcaacttatct

SEQ ID NO: 467670 - DNA, 1237 bp, Homo sapiens
ggctccagcggctctgtccgctggcttgctcagaaatgtgggcctgcccatcactcagtcttgatgcctcttcatgaagtctcctccacctgccactccttccccttgctactacagccactctccgatcccttctgcactgcaccttgaatgaccctccagcagttgattttatgcccttggtctacgaggagagttcgagatggaaccacagtccagtacgcagtaaacgggagcccatggaagctggggcatggatgacccagagaaagtgtgggcgaggggaaggaggaacagatagggtgctcctcaatgcccagagacacctagaactatgcaaaagcatgctttggtgaagaggttcagcagggtcctgccctgtttctctgcctctgggaacatgcaccatgctggtggacgcaggccctcgagtgccatcctgggaccccgccagccctgcagcggggacaaacaaaagcccgggaggcctgaaaatgtaatctgcagcctcccccggctgcgtgactgccggcgctccatcttcacaaccagcgccgccggccgggctcttccgctcttcggaattcagaaagctacagctaaaaatactcacctgctaaatatccttggccctgcccttttcccaaagctgcaccttcagcctgccttctgtgctgctgggactcctcctggggacttgcaacgtcccaagaacatgggtggagtcaaggctcggggggtgtcatccctgctgacctatgatctctgcgtggtatgggggctccgccagcagcagagccgtttctgcccaggaagcctaattaattagtccaccaatcagtggcaaaaagcaaaccccttgcttgagtcctagtttacatgttttttctcctgagaccatccgtgactgtgaaaatcagaggccatgcgatccgacgggggtcactgatgacaagaacctttccagagggctctgggctacactacttatgtttctgcttgttgcaccacttccaaggccatttatgttcccttcacaaacacagcctctgcctcctgtggctgaacttgcttctcgtttttgatgaggacagttctgacctataggcaatcaccccttttgttccgtagaaagctttctcaggttgtggcccacttctaggttagttagccactttgtgacaaatgctgctcttgaggcatccctgggtgagtggtgaggtcactggcttggctc

SEQ ID NO: 467671 - DNA, 782 bp, Homo sapiens
tgtcttttttaaaaagtgaatctgaaaatggactttattttcctgtattcattcagcagaaaagacaaacattcaaaaagcacttggtggagacttcagagagcagtgcccatgggtaatttgggggcatctagaggaggggttgtagaaagctgggggcaagaggccctggtcaaggagagtggaggtgaaggaaagccgagcagccctaactgcctgtctccaagagggagtgtgggctatagcaagtggcacaccaacaccgaaggtcacaaaggctgtgcccaaggacaccccaattactcattcatcgatgggacaccaggcaccatcctgtgggtgggcttggagctccctgagaaggtaggggaagccggcccgtgctccctgggatggacctgtgcaggcttggctgctgacatctgtttcctgaagttggtgttatcagccaagcatgaccccttcgtgcaacattcacaaactgtacattttcttggtcacaatgtctttgtaatagttgggccttatgctgaaaagtcagagtggagttggactcctgtccaggcaatattcacagaagacaagaacttcttaaatccacctctgagttataaagaaaaaccgagtgatgttttctttacatcccaaagctattttctttaacatattgtaaggcttggacacttgtaaccattttaagaagaaaatatttggtgctcactgaaacaaaataaacttatactgcatttttctatgaaaaatactttttgattttacaaata

SEQ ID NO: 467672 - DNA, 1137 bp, Homo sapiens
gggcagggaccaaggcactcagcaaatatgtgttaagtgaatgatgcgtaagtcagcagaagctcctagatgttcagggcatcaggaaggatactttcagtcttgctttgctctcacggaaaccctgagaggttttacatgcaccattgtgaaaggaaaaagctttgtcactattcatgatattgttcgtgatacagtaatgttgctgccattcacagagctagtccgggctcttcacctgtgtctcatttcagtcctttttgaacctttgcttgtcatgagcacaatgaaggaaaaagtcatgattggaggaagaattgaaatagcagacaattttcagcgccggatggtgaatggatgtgagatggtcaatacctgtgttcaggtcaacagtgtttcctgtgctgcctgtgctgttcttgtgatagcgaataagtctcatgagatctgatggttttataagggagagttcccttgcacaggctctcttctcttgtctgccaccatgtgaaacatgcctttcacctcctgccatgattgtgaggcctccccagacacgtggaactgtgagtccattaaacttctctcttttgtaaattgcccagtctcagcccgacttccttttgcttttggttttgaaggaagcatttttactacttagtaatgtttgagcaaagtgttttgtgaaggagaccaaacacagtctttggtgcaaggatatgatgaaggttcccaaataaaaatgcacaggcccctcgtgatgcgggtccctaagtgccagctgtcattctccacccacctgccgtcttaaaactaacctttctgtcacctctgcgtgtctcctcccttgtcctgttttgcagaaccaagctgagtcagtgtttcaagcaggggtgacatgttaacagcttaataatagtataatctcaccaataataatatgctgtcaccctgtctgaagcacaatgtttacaggagacgtggtaatgtatgatgacagtaatttgaataaaaatgaatttactgctcttgtctcatttgcagtaaattttcacatctttcatgcacaactgctgttctatgacctctctcatcattgtgtttgtggcggtggtggtggctggctttaaagtgaaa

SEQ ID NO: 467673 - DNA, 660 bp, Homo sapiens
ctctgggactgtcaccccttgtagacaaatctatggttattagctatgcttttaggtaaatggattgccaatcatcagaaacaagccaacaatgaaacacccagcctggcagcatcagaggcgaaggctgggtttccacccatgggttgaggaacagaagatgtcttgtgtggttaaaggtgataaagactggttccactcccatgatgcctccagtgcttggcttttttgcagctttattgtggtaatgacttttcagaaaagaactaagaaaaacgcagctctcaaggttttgactggatctgagctgacactgaggctctggcacgcagaggaaacgtcatatctgacattctttcactcattcacattcattttgcgcatgtgccctgggcaggattctagcagctggggatgcccccccgagcaaggaaaacaccacccttctcttagggagcttctagttgggattttgttcagctgaattttaagaaagtatgaaaatttgtattctggatacaatctttccctttttctttctaataaagaaatgattgataataggtaaacattgtgtaaaatacagaaagcacatctcatgatcaagcaatcaaacattttcctaacgtaggtcgtgcatcttctctttaagggatttcc

SEQ ID NO: 467674 - DNA, 1312 bp, Homo sapiens
tccgtgggagccaggtcatgcacatggctgtgtcagcccagatttgcaaaggcaacacagaaggaagcagtgggggtgtcactcgcagcctccccacatgccaagctctgtgctgccttgctgcgaggaccaatattgtaaagacaagggctgcctgcacggtcactcttgggctctgcagaagccacacaaacacagacacaaagaggatgaaagaggcagcaccagggagagtgccctgaaggagacccgccgccagccgctggtatgtcagggaaaacagaccagtgcacgccaagcgggaggaaacagatttactgcccggcaggatgaacagaggcctggtcgccacggaagctctgaaaacacaccagtcactcccataacacatgcctggaggcctctgaatctccatgtgttaggccaccagtcacagacattctccacaaggatggtcctggtacctccagcaacatggtcctgtggatgggatccaaggcgagctcgcacccgctctggcagcaccatcatgggacaaagacaagcactctgcctggtttggctacagcgaaccttccaaaaaagattgctaacacttgcactggacttcctatggaggtacttgtgaagcatttcacttacagggtttagttgaatccctgttttacccattagaacacaggggcacagagaggatgttcttatctttacttcttcctagagatgttgttagtcgggtgcagaagtgtatgcatgagtttgcttgtttatactttttagtggtgtgcccagaagcccaagctacagtgggaatttaaggtttcttacatacagagtgcattcttacctagtataaaataaaaatctgggaccagagaggccatacttgcttttacctcttagaaaagcagttcctgtggcccgacggttagcaatgcacactgacacatgtgtgcgtcagtgtggaaacttttcatgaccatcttttagtgtcctgagctgagactgagaatttcccagagggctcatcagtgacaagggattgatttatacttacaactgtaaaggtaagaaggagagtagacattagaggctgagtcaagcaccagaacttttgggtgatggcatgagcgtgtgtttgtgggggtggatacaggcagtgatgggttggaagatgcaggctgtggctgtattttgcctagcatttggaagtttacaaatatgttttgaatcctaaagttagcttaatgcctcaaagccagactgaagttgaccattgtctctaaaatttgggggatctatagccccagcc

SEQ ID NO: 467675 - DNA, 638 bp, Homo sapiens
ttgtcagacagcccgtaggagggtccctagggcataagccatgcaggcactggcctggggtctctatttcaatccaaccacctatttcatatttgtttgtctgtcatctgacccagacaactctaaggcttcttgtacatcacatgccatccatgtcactggtgacttgcccactggcatctctgtcattccaaagctcttctgtgcacgctgtgtcatggtgaccctggatggacacctgtggggtggtggaaaggccaagggctccattgcagatagcaagcaccctccatatccacctgcacaggcgccaagtgccagcccctctgccaatgatgccagagatgatgtcattgccaggacccacggccgctctccaaggctttccgcacagactgctgcagaggccccactcccggggaccactcttgaggtccccatgtctttgcattaaggtctcaggggagcatcattctttaaaggtccagcccatgtctgagggatgagggaggctggcctatgcagccattgggttcttggcttgaccttgtacctcactggccttgcacacccttcctggagtgcctgggcccacgcacagcctatgggggggggtgggcacagtgggcaagccttga

SEQ ID NO: 467676 - DNA, 1148 bp, Homo sapiens
acgccaggactcccttctgccaagccccttgcatgcatggctgttccagactgagtcaagctctgaagaagggatgttggtccacccagggacccgatgccctgatttggtccctcccccaggagactggaggtctgagacactccctcaacgagcattcccaccagtgcctggagccagggagaacaggacagctgtgccctctggacagtgcctgggctgccgtctgggttttctacctcctctgtacttgcagaaggtaggcccagcaacagcatcacagagacatcaggaggcccaggctggagccctcagctgctggaggtgctggcttgtcctcgtggtcctgaggtgggaggttcgtctgagcaggcactcatcagacctgcaccgagagctccctctgtgcaggaagacacatgacaccaggttcataaatgaggatgctgcctgtgacaaccacgacaatgatagtgacagccacagcctctccagctctgtgcccctcctaggaatctcatccacctccaccacagtcctttggtgccaggcatttctctccctatttggagatgtgcaggctgaagcccagaaaaggatgcccggcgagcagctaagaagtggagtcagccacattcatctgactccaaagcccacactggtgccctcggtcaccccattgcccacctccatggggggagatgacccaggtctgcccacctgccaagtgccccaccacatccctgcagccaaggactccagccacaccaggaagggtgaagaaagccccttgccttgccgtgagcccagcaaaggcctggcagccatggcagtgcatggttttgaatcctcacacggacctggcacactgagagcgcagaagcactgcccgcatttgcagatgagaaagccagggctccagggggcctgcagattccacaccctccagtgagaagaggaccgggctcccctgctcgctgtccctgaagccatctcttctcgcgtctgcgttctgcttttgggaaacttgattccccaggaggatgtgcattctagtaaggccctcaggagcccaggaggccgggctgttctgcaacctgcagagatttggggagtttggtctgctgcccttccccatccagagcaac

SEQ ID NO: 467677 - DNA, 692 bp, Homo sapiens
acagccatgttctgaatgacgatgttttggcgaaccactgaccacatgtactgtggtaggtctcataagattaaaatggagctgaaaaattcctatcacctagcaacgtcatggtcatcagaacacagcacaacacattggtcatgtgtttgtggcaatgctggtgtaaacaaacccgctgcactgccagtcaggtttagatacacaaatacttaccattgtgttacaattgcctacagtgttcaatacagtaacacattgtacagggtgaacattcctgatgcttttcagtggacaagagagctgatggcctctgtgatagttgatggccccacaaatgggccatggctttacacagccagtgccgcctgcagagagtggaattttccaggcagtgatgataaacagaccctcactgcttgaagatcagaaaagaatgaccctgccttttgcactgagagagaggagatttcatttgggaggatgcagtccacatctttatatgtatgcatgttcttattgaagaagaatgtatttatcaagctcttactgtacaccaggcattctccatgaattaagaccttataggttgagaattggtaaattctaaaagataactacattggcaacctttttaagtaattaaatgggttggttcttatcagaaaagtgtaggttctgttaataatcac

SEQ ID NO: 467678 - DNA, 1268 bp, Homo sapiens
gggatggagaccacaggaaagcatgcagttggctttactatggtgcaaaaggaatgttctcattgccaggcgctggctggcagcccggcttctgcttcgccaggagtccgggcatcgcggagattcatcttcgtcctggcacccaccatgcggtgcccagccagccctgcacttggtcggccctgctcgagaatccaacctggttccattttcaattttggaagcgttgttgcggattaaaaaccggtcaaatgatgggaaagagtcagagagaacagctgctctgtccccgccatcctgccaaggcctaaatgagcctccaggaagcttcagagagatgagggatgcatttcccagcaggagtgatgcatggcccaggaatggcaagtcacgtcgggggcttgtggcaccctggggaggacctgtcagtgcagcgccaactggctgccagtgcccatgcacacacgatggaaacttgatcggtcaagtttctgatgaaactttaaggacagtaacaatagggacatatgacaaccttggctgttcctaatcacgtggttaatctatttagctcttcgtaaaacgatgcacaaggacgggatacacgaagcaaccagtcatttgctgtcacctgagtgttgctacactggtctgtaaatatttattcatgctagcatttggaagtcctgctgtactcatctttggacatgctttggcagaaagcacagatgaggttctgtctttgatggtctagctggggagtagaaagggaagtctacttaatgtgaccacttactgcttttttactccaacctgtgtatccacatcagaactaaactcttccattacagaggactgcctctgggtccttctgataactgtgccgcggcacttctgcctgtgggtctcaaaatgactcattttcccatgagttgtgtttataatcttgtacagtttggggaattaatctgaaaaagagactgggctggcaataaaaatgtagcaaatgaattgctaattattataaccatcgctctgagcttttgttggttacctgctgcctgtgctgtttctgttaaaaaaatagccatttattattatggttttgaattaaacatgttgataaacaaccatatttagaatcatgcagacatctgatgtcaatggacatttgtgtttcaccttgttgtagtccataaaactcattctgaattttaatttgttattgaggtgtaatacatacaatagaatgtgtaaaggctattact

SEQ ID NO: 467679 - DNA, 730 bp, Homo sapiens
ttactttcatcctggtgcctagcacctatgaggcacccagaggaggcatgtgcggggagagaaattgcatctgtgaggccggacaggagctcctcagtaaggccaccccctccggtccaggcctgggctgtgcgttcactgtggactgcagcccggggcggcagcagccagcagaaaagccaaagctgtttacagctgtgaggagccaaatcctgccaacaaccaccagcatgggcacagggaagagagaagcccctcccattcgcttctactggggcttgttaggccatcgccttgggggccggctgatcagcggcagccagcagccggcggcttcggcaggcaggaacaaggacagcctgtggctactgcagccccactgcccggccatgcttcatgatgggggagagtgccttgggaggaatatacaggcaaatcatgttagcatcacagagcccacttaattccgtatgggttggtatttggggaagaaatcgaggacgaattggtgttggacccaaagctgggcagggaccagtgtgcatggcaaggttttaatgccaaacccctgggcccccttcctggctgcagcccctcatgtcttctccatgtgttgacactgaaacctgtcttgtgctaattgctgactaggcatgaatgcatggcaattgttggcttgtttcctctcctggataactttttcctccttttcatgttagatagagccttt

SEQ ID NO: 467680 - DNA, 731 bp, Homo sapiens
ccgtgctggcgttgcttgggtggtgttgcaagccttcctacatgattatctactttgtgcagactcgaagtgtcctgccctgctcggaagcctgcagagactccacagctagaggtggtgttaaggttaagctgcacacggctgccccagtcaccctgtcttcattgtctatcctagatgaatccttgtttgagaagagccagcaagtcattaggaggcatccagaagaaggcactgctgtcctggaagatggcatctccatgcgtgttattgcccctgaagaccttccaatgggacaagatgtggaggtgggagacagggctatggggctcctgacccgatgtaagtgtgtttgtgcgtacgagtgtgtgcatgtgtgtgtaaaagtgtgcatgtttctgtatgagagaatgtgtgtgcatgcatgcatgagtgtacatgtgcatgtgtagccctaatgactccctgttttttacttcctatctttttctcaggtcccagggattcataaagttagggttaaataaataaagccatggccctggtgtgagcgtggggcagtccccagtctggcccaaagccatcttttgtgcctggcctgcagcagagcctcccggccctgcctggcctagacctaccaggttcaggcagctcggcgccttgccctgccctgccccatttcctctgcccacaagcccatctgccctcctctctctgccccttgctgtcct

SEQ ID NO: 467681 - DNA, 726 bp, Homo sapiens
gagtggatattattattatttaggcttttgataaacaatgataaacttcgtgggggtacggcctttccatctattgcctgtaactgatcaatatgcccttattccacccccaaaactttggggactcccagagaccccgctgcccttctgagctgctgctttccaacttaggaattgcccgtggggtcctcacggagtcccccgtgcagctggactctcgagctttgtttcctgaacagggaagaaggaagcaggtggggcacagagcggctctgacctgccagacaccaccggaccgctcaggcaaaggggctgcgtcctgctgccatggaggcaagggggatgggtcagagtgcccggtgtccactgctcagcaggacctcagttcagcttctgttaaagaaggtggaggaccaactcatgtttcaaatcgtgggtcccacaatgaaagtgaacagggaggttacactgtcctccagaatgcaggacatactaagggttacatagtgattctagtccatggaatctcccacatgatgggttaggagtccaagggagaaggacggtatctggggtggtcaggggtggttaatggatgaagttgggtcttaagtgtatattgtaagaaggatttgtagggatttttgaggtgtgagttcggggcagagaagggaaaagcattttggaacaggcaacagcatttgcaaatgcctaaggtcagcgaat

SEQ ID NO: 467682 - DNA, 556 bp, Homo sapiens
gcaaagcccttcagccctccagaaggttccacgggtcccttctgagatgccaggcagacccacgggagggggcagggagctgtgggtattggtggccggtgtctctggcacctgcaggccatgctgcccgccgcccgcctgggagccggcagtgctgagagtctaatggagggcatggcggaaggtcctatgcagcaggggccccaaggagtggggactgcaagggcacaacaatgggtgactcacctggggaccctttgggagacaagcttgggaatgtaccgatggggtgttctgcacagctttgtgagcaccaaacttaggtacaaagatcccatagagaatcctttaaaatctcactatgccccagggacaaagtgctcagcacagtgcaccaccacacacatttgcgttgctcagaatccaagggacacaaaagagagactcattggccaggttggacacacagcattaggcttccagcccctgtcttggagtccccccgccagaaggcccagactatctcctgtttgagaccaacaccctccccgcccct

SEQ ID NO: 467683 - DNA, 984 bp, Homo sapiens
ttcttccctgtcaccgcccgcaacccccactcatgcctttcctatccatgcatgcttctcattcaccgatttttgctgattgccccctcttagggtttgcacagctggccctgctggctctgagcagcggcaggccacagcaggtctgttccttcattacggcagctgcacaggaggtcgctgtctggggacagtctcgggttcctccccaccagggctttgtagagattcacgcctcaagcccaagtgtatccgggagcaggggcgaggcagctgcagctgcctcaaatgaaaatgaaagaggcatttgttctcatcagtattgcttagaagagaagaggactggtcctggaggtgttttcagagagtttttccaaacaggaaaagttttgggtaataggctgtcttcccagccaactcctaagagacctggttgtgggtctgtagtatatcaaaactgttttgaccacaaatatttattgtacatccacgagtgggaacagcactgcgtgcacaatgctcactgtgcatctgcccgtgttccgaatcacatccaatatgacttcctggcagcgggttggcgtctgcgtattgttactgcagtggttgtctacctgagccttgtctactgtgagctggaacacctacctccccctctggagagcaggaattggaggaaagtcatgtacttaggaaacatttccaagtgtgaaatgagtttggatccgtatcacaacattgccgaaatggtggctctacagcagtgggtctccaccagggcagattttgcccctatttgcatctggtgggtaaggccccgggagctgccacatcttacaatgtataggacagtccccacagcaaacatcacctggcccaagatgtcagcagtgctgaggtgtgcttatgttttttatttgaagtacatttaggttcacttgtttctgtttgaattccattttgagtgccccccttctcttgttc

SEQ ID NO: 467684 - DNA, 1572 bp, Homo sapiens
tgaggaaccacaactaggagctgcatccccagagggcggcgctccgcatgcaaacagtgatctgtttcacggcgtcctgtgtgttctagaacaagagtgttgacagcagcggagggtcggctaagtctggaagtgagagtgtcagaagagccagagggtcaaggacgagatgcgagcacaggagacatctggaccccagattgagagcaagggctggcaggtggagtggcagcatggagcaggatctggcacagcatcccgggtctcactggagcatgtggcaaggagctcatccgccccacctggaacagcaatgaagccacaggaagaggaggagaaggaggtgctcatgacagagccaaaggaggagcaggtgcttatgacagagccacaggagaaggagaaggaggtgctcatgacggagccacaggagaaggaggaggaggtgctcatgatggagccacaggaggaggaggaggaggtgctcatgacggagccacaggaggaggaggagcaggtgctcatgacggagccacaggagaaggaggaggaggtgctcatgacggagccacaggagaaggaggaggaggtgctcatgatggagccacaggagaaggaggaggaggtgctcatgacggagccacaggggaaggaggaggaggtgcccatgatggagccacaggagaaggaggaggaggtgctcatgatggagccacaggagaaggaggaggaggtgctcatgacggagccacaggagaaggagaagaaggtgctcatgatggagccacaggaggagcaggtgctcaggacggagatctggtcccaccccacctggaacagcgacgaagccacaggacggggaggtgctcatgacggagacctggtcccgccccacctggaacagcgacgaagccacaagaggaggaggtgctcatgacagagccacaggaggaggtgctcatgacagagccctgctccaggccaggttcccggcgtggggctgtccactgcagcccatcagctcctcacaccagctatggcaggaagaaggcacaggctgtcatgccgtgctcggccagcatcaatgcagggagttgggcactcacagctggtgaggggctgctcactttttggtgtctccctgtctgtctgcctccctggtgtctctctgggtgtggtgggctcatcatgtttgcctcccaggcccttccagcagagctgggcctggggtctgtagaccccacacagtaccgggggagttgtggagcagcccagcagccctagtcttttttctcaacatccctgagaaagagatgaagcatgctgaagtctttctagaaggaagaaggcttctaaaaagccaggtgccccagatgccactctcaatgggtcctcctgcctggaggagcatctcctccttgaagtactgttcagcccagaaccagctttctcccgggatgttggcttcagaacttggaagatattgtggaaagttcttgagggggagaactgtgctggctgttctctgtgccctgccacctggacctgtttgagtttttgctttgcttggtg

SEQ ID NO: 467685 - DNA, 984 bp, Homo sapiens
cagacagaccaccctcagagccatctcctctagtcagcaccatggacagcagtcccggccccaggccgcaggacctggggaggggccacatcactaaaggagaatcagctgccactggctccctggtgttggcacggctcagggccagtgggagagctcctcagagacagggtgtccacctcacacccttcaacccccagcacccagccctccgtgggggctctctgcagtttgtgatccaggttctgttctcaggacaagcacaatcaccaacaggcatcagctgcgctggctcctggaagtcagccctgcgccacgcccctgagcagggcggctctcacgagcgggaccacctgctcctcctcctgaccatggctggagcctgggtccctgaagtcaccagacctgcagttctgttgatttttgacacaggatcaaagaagcccatgctccttcaagttagtccagattgcatgtgtaagagtgtaattgtgccagtgtgtatgagtgtgagcctgcatgaggtgtctgtgtgtcattatgccttcctcttcgtctggcagccagagctgagacctgcaccagtgctggagcagctggtagaatcaagacccatgggtccatggaggaaaaggggaagagcctctgtcctttggtaagaaaaagctacctaatacttatattcacattcaaaacagagaaaatgaaaactactttggcgagaacaggttgtttcttagtggggaattccattctgactaatccaagtctttctaacttgtaattcaagctatggcaacattaggtaatcacgaatattgaattttccccttcttttcagaataagtcagatgcttggtaactgtacccactgtagggaagtgaaaatccccctgctgttttttaagatcatggaatgcagatctttcaccagcttgctaagacaatgtatgattgatcttcgtgttctcagaatgcagggac

SEQ ID NO: 467686 - DNA, 1247 bp, Homo sapiens
gatgcatgtcactgtggcagccattgtgcacacccagctttgtggcccctcaccgaccatggcagccattgtgcacacccagctttgtggctgatcaccgaccgtggcagccattgtgcacatccagctttgtggctgctcagcgaccgtggcagccatcatggtgcacacccagctttgtggctgctcaccgaagtgccaggaacagcctgagaccaagtcccgactagcatgagacagcctgacagagctctaagggaggaagtggagctggaggaatggtgtcgcagccagagacccggggacgcaaccttcggacaattgtcagggtggaccctccagccacagaggaaggaggaagcctacagccctggggacagctcagtttgggggtcctgatgagagaggaagaaagcatcaccatcacccagaaatatctcacagtcaccagcccccacctgcaccccactccctccctggcctcactgtcgggagtatttttaaaatgcatctgccttgtcctgagtcctttgcgaccgtatagaggagatccttctggtgactttctggatccaaaggagactaagagcacctgttgtttctcttgcaagtctacgaaaagcaacccaggagagaacgaagagagtccaggctctggagtggccttgggagagcccacgtacaggcacttggtttgatttagtgtttaacctttttgctcccgtgctaagtcctctaaacttgactcataacagaatatgggctctcccatgaggacccaggcctcactaccaactggctggttgaagttaacctagggttgaaatcgattggttctcccagtccatagcttcattgactggttaaagttaacctaggggttgaaatctactggttctcccagtccgtagcttctttccccttacccatattatatttctgaacccatgaatatttgaaaggactcccagggaggacattaaaacaccaagcttactggggcacagggacctggttctggattcctgttctcccgaatggacgccatccgatggcaaagttgacatccaagggagcaaagtcgactgttccgaagccctccatgtttacagatcttaacattggtgaagcagcaaggatgttcttgttaggaaacatcctgagagccctctgctaaaatactttctcaagaaacagagacatctgtgaggcatagctcttcctgggtgatgcgcatgtgcaggggc

SEQ ID NO: 467687 - DNA, 634 bp, Homo sapiens
gggctatgtgaatgacatatctggacaaaacttactctggtaattcatgggcttcagtttcaagaaatcagcagggagagagcagagttattgtttgcattagtccattctcacattgctatgaagaactacctgagactgggaaatttaaaaagaaaagaggtttaattggctcatggttctgcaggctgtacaggaagcatggctggggaggtctcaggaaacttccactcatggtggaaggtcaaaaggaaggaggcacatcctacatggctggagcaggaggaagagcacagggggaggtgctacatacttttaaacaaccaggtctcttgagaatcacaagaacagcaagggggaagtccatccccatgatccagtcacctcccatcaggcccttcctccaacactggggattacaattcgatgcactgggccatggtgttaggctagtgaagcacaagaacagaccagaatttgaaaaccagtgagcattttccctcacagatgcatctttctgaaattgtagtcatgcttggcagctatgattatacagatctttttaaaaaaacacttatttaaaataacataaactttatagaaataatgctaagagagtatagagatttcccct

SEQ ID NO: 467688 - DNA, 667 bp, Homo sapiens
aaaaataatgttttgtcaggtgacaaggtctcaaggtgtttgcagctaccttccaccagcctttgaggaaaaatggcttaagtctccttgtctgaggcatgtactgagagaagggcaggcctgttttcagtccttggggttttattttgcaggccttggcttggaaggttgcagctgtgggctgggacccagctctgtcacctcagtcacttgcattgcatttgatatggggcctcctggaggcccgatgacctcacctgtcaaagtaatgacagcccttctctcacagcgttgttgtgaggatgaactgatcgctagcagtggacctggaacatggcacatgcttaaagagcagttcttgttattaatgataatcttgggctctgccgagatggaaaatcaggctaagagaacacagatgtggcagagttcctcaaagcagcttttctggcagaaacctaaatagaaaatttaaagcactttttaagagaaagttatgtatgtaatatatattatatataacatgtatattaaatgttatgtataaataaaattatatataatataaatatatgcaagtttatatctgtcacttaatttttttaaatttaaaaatactttttaaaatttaagttaacattgttttatttgtatgtattcatggggt

SEQ ID NO: 467689 - DNA, 661 bp, Homo sapiens
tcctctttctctctccttaatcctacccagaaaggggtggtggcagtaaatcggtcccccacgagcatggaagaggtgctgaagcagctgcaagtgcaaagccctgagaaggaggatgcagcagaagtaagggccctccaggtgcaggctgggtgcctggaggcctggctacacagctcagcaaaagatttagaagctgccgtaagtggggaccttcaggtgcaggcagggtgcctggaggccaggctacagagctcggaaaaggaattagaggctgctgtgaatgcaggcctggggctgtcgtctcagctggagacccccactctgataccgaggaggctgttagtgagaccgaggggtctgctccataaagaaggggaagatgccctgcctgcaggggtccccccactggagaacagggggccccaacaagtgacatgctcagagatgtggattgatttggttttggccaggattgactgagagaaaattgataaacagccaaatgaagtactcttaactttgtgcaattccagaaaatgccccaatgggagaaggacattgctgcacaacctggtcccacctgggcgcttcagctcaaagactccgtatgtgctacagccaggtgggggtgtaaagccttttctgtatgatgagggaa

SEQ ID NO: 467690 - DNA, 710 bp, Homo sapiens
gcctacctgtgagggcagcgccgaccaggcttttcttgcccgctagtccacgtaatgcggtcgctaagaagcccgcagcagggttttcgcgtgaccttcatagggcctggccaggccagctgaggggcgcgccgggctgcgcttccatcgaggaacctccgcacatgcaatcacggttcagttttgcctcaagggcatggcgcctcagctagtttttggctgtaaacaaaccgcggccaccgccaggctaccgggttaccagtacctgttcttcggagtcatggccagacatctggagttcatcgccaggactgtgatggcacaggaagggaatgtggaaagcgcacacaggaccctaaacagaatcctaactatggatgggctcattgaggacattaggcatctaccctacgtcgtttcccactctactctctgtcctggaaggctgaactgtgtagacaacaccaaccgctcacccactggctttcagttgggtctggacaatggggaaccacagtggattagaaagaaggaggaagcggagatggttttaagaatcccaggggatcttgccggctccaaacctgctgcttctggaaacacctgtcagggaagtctggtcctcagctacactttgaaagtggctgcattcacttcatccatgaagtgaacatggaggaaatgcctagtgaattgctggactgaaaagc

SEQ ID NO: 467691 - DNA, 826 bp, Homo sapiens
ccagcagagccagcatgtaagcaatggccatctttcctgtacttaataggtggaagccgcggctctgtggcattcctggcatgtctgcccacgctcggctggctgcctctcctgtcggaagctctgctgcacaggctgagacaacaacaggacgaccagcccgtgtccccacagcagctctcaccaaccaggcgaggtgctctgtgagagtccccgagggcttgggcagaaattcatgctgccccagcaggctcaaagctagctcagaagtcgcaccaattccagggggttttccaacagttttctctcccgctctttatcttactcctgttttcccactttgggccacatattctccacctcaatacccaactcacctacaaattgaaaatgtccttgcttacatagctcctttcacaatcgctccaggctcccaagtggaatatccaatcccaccacctcggcacatggctgccagagttgcccgagccaaggaagagcacctggagagtctcacggggctttttgctgcccgagacccagatgacctacgtgggttacatgttcctgcctggcagcaagagtggctgggcttacaatctagtgatgatcagacgcttacacaaatgcaagcagagatgagctccaacatggagtctgggcaaagcacagtgaggcacagagaggagtgtcaaagtcagcctgagagtgactggaaagactccgcaggggctgacgctgacttgaatggagactcgaagtgtgaataacagtttcccagacagacaactatggaggtgggagtattggtgacaggttcaagtga

SEQ ID NO: 467692 - DNA, 846 bp, Homo sapiens
ctgttagaaggaaaactaacaaacagaaacaaatagcatcaacatcaacagaaaggacatctacacgaaaaccccatctgtaggtgacggacatcaaagaccaaaggtagataaaaccacaaaaatggggagaaaccagaggagaaaagctgaaaatcctaaaaaccagagcgcctcttctccaaaggatcacagctccttgcctgcaatggaacaaagctggatgcagaatgactttgacgagttgacagaagtaggcttcagaaggttggtaataacaaatttctctgagctaaaggagaatgttctaaaccatcacaaggaagctaaaaaccttgaaaaaagattagatgaatggctaactagaataaacagtgtagagaagacctcaaatgaactgatggagctgaaaaccatggcacgagaacttcatgatgcatgcacaagcttcaatagccaattcgttcaagtggaagaaaagggatcagtgattaaagatcaaatgaatgaaataaagcaagaagacaagtttagagaaaaaagagtaaaaagaaatgaacaaagcctccaagaaatatggcactatgtgaaaaaaccaaatctacatctcattggtgtacctgaaagtgatggtgagaatggaaccaagttggaagatactcttcaggatattatccaggagtacttccccaacctagcaagcaggccaacatccaaattcaagaaatacagagaacaccacaaagatactccttgagaagagcaaccccaagacacatagttgtcagatacaccaaggttgaaaagaaggaaaaaatgttaagggcagccagagagaaatgtcag

SEQ ID NO: 467693 - DNA, 935 bp, Homo sapiens
cctacggtgtaacctaagttgtctgagggcattagtggggtttctacttgagagttcagtgtccccacgggaagtatcaagacctctggcagccgccaatgttctttctttcactatggattggcatattctgtatattgcatataaatggaatcacaaaatatgtgactgtttgtgtctggcttctttcatttagcataacattttcaaggttcatctacattaaacaggaagatgaggtatcagatgtgcaggttttaacatcaaatttaatccttttaagcagcagcaggccagactgtgagagcacctcccgcacccgtgaactcttcctccttcactttggctccaacaacagaagactccatctttgcagagggacagttgccccatctgaaggctgcacaacttttgatgatcaacatccttcatcattttcagggaatgacagcaacacaaagaaaacaaaagacttgttgaatggctttgaccaaaatgctgatagtgatatggacaatgaaatccaggctaaagtggtctcacatagagttgaggaacttgttgggaactggagcaaaggtgactcttgctatgttttagcaaagaggctggcggcattttgcacctgccctagagatgagcaaaactttgaacttgagagagattatttagggtatctggcagaagaaatttctaagcagaaaagcattcaagaggtgacttaggtgctgttaaaggcattcaattttaaaagggaaacagagcataaaagtttggaaaatttgcagcctgaaaatgggacagaaaagaaaaacccattttctgagaaatgcaagccagctgcagaaatttgcataagtaataaggagccaagtattaatcctcaagacaatggggaaaatgtctctcaggcatgtcagaggtcttcacagcag

SEQ ID NO: 467694 - DNA, 665 bp, Homo sapiens
aatcaatggatggaagtggaagtggcacaactcaccatcacccctagtgatccactagcaaaatgtttgcttcctgttcccgtgacattctgttctgctggcctagaggtcttagttccagagggaagaaggctgccactaggacacacaacaatgattccattaaactggaagttaagattgcctcctggacactttggtcttctcctatctttaagtcaacaggctaagaagggacttacagtgttggctggggtgattggcctggactatcaagatgaaatcagtctactaccccataagagaagtaaggaagactatgcatggaatacaggagatgcattagggtgtctcttagtattaccaagccctgtgattaaggtcaatgggaaactacagcagcccaattcaggctggactacaaatggtccagacccctcaggaatgaagatgctgggctaggatagtaatacttgagggtatccttattttttttttttaatttaaaaagctactttttccacgaagttgttctctcagttactgcttctattttttttccttcaaaattctcatactttttttcattttatgccctcactgagatctatgaatcatagctgttaggaaaggccaaatatgtattatattgaaaaaaagcatat

SEQ ID NO: 467695 - DNA, 830 bp, Homo sapiens
ttccacttgtggccgactgccactactactacttgagtaacagcagttactgttactgcctgagaccatcactacagcagttactactgaaaggctaagcatgaggaagaagaagagagaagaaaagggctccctgtttctatggtccatgctgagggttagatctccaggggattccacagctctccagggacccatcattagcctgtgcttgccaaaatcagaccaggttgtgaggtacatttatgaagaatctggtggtgcagtgattcaagagcagagaatccccaggcagagcagtggcccaccacaggggaacaacaagtatggttcccaatgcctcagttcagaacttcaagttcccctggggttggtctttgccagagtcttgctgcttttctcttgtgaacaccagcttctccccatggacacgatgagaggtcctagttttcttcactcagttttccattcagaacttaagtccaacccaaatgtaaaaacacattgccaagaacaaatcctagaagcaataatgcaggcaagtatattaagaaaaatttacattacttaaaaagatatgcttttttaagtctctctgggaacattattttcattccaacagtaaatatggtaatgacaaattttcagaattagttcactaaagcattctcattatggaattatttttggtagcattttattacacagattgtggttattgtgccttttaaatgtatttcataattcttatttttccaaaatttaaatgtttattattttatttaataaactagtatgtcatttgttttcaaaacctgagttaatgaaga

SEQ ID NO: 467696 - DNA, 840 bp, Homo sapiens
attagttcagaaattgactgacaggagtggccacccaggaaggacagcatggggtctcggaacccccagctgctgtgggaatcaagcagacctgagaagtttaggttttcaatcaggcgatcagttagtgttactggacagctaaagggatcattttcaaagcacaccaatcttctttacagtttaaatggctattatcaaaaagccaaaactgacgatgccggcaagcctgtctcggagaactggtacactgctggtgggaatgtaaactcgtacagccactatggaaaacagggtattaacttgctgggtacatcaggtaacagacctgttaacggtttcaatcccactgttgggtatctacccaaaagaaaggaaatcatcatactggagatatatctgcactctcatgtttattgcagcactgttcacaatagccaagatatggaatcaacaattccactgtaaggcttatacactgatttggtaagtattctcttctctactttctgtgtaaatggatattaattcttccttgtgtttcatgtaatgcatcaatgaagtcttctgggacaggacttatatgtagattttaaagtacaaattcaattgttttgaatatagggctaatgaggctttctgtttcttgaattagttttgttactccttccctgccttcctttgattaatcaaatattttccagtgttccttttaatttcctctggcagctctagctatatgtgtctgcattattttttactcgttactctaggggttatgataggcatctttaatttaggacaatctacttaatattaacaatttttgcaagaggatag

SEQ ID NO: 467697 - DNA, 2871 bp, Homo sapiens
gctgtgtgatcttgcaccagctgagatgaacagagagagtggtgttggggacagcagcccagggcagcccaacattcaggagaaggtgtctggagggcttcctggaggtggatggcctgtgctgaagcccaaaggctgagtgagagtcttgtgctgtgcccctgggctgaggcagggctggtactggcgaggctgctgtggggtgagcctggtactgcccggggttggggagtccctctcactcagcctgtgccttccctgggagtgactcatttctgctttccctgggctcctcagcttcccttcctctagcctggtcctaacatggtctctgggccaaagtctagggccaggctagggcgaggagtcagtggggatggaggtcaatggggatggaaagtgggggtctcatccccttcctgcctcttgttgtgtgctctgtgcaccgcgctgtggatctggaggccctctgggctctgctttccaccccccgccacaggtccccttctctgctttgtccctgggccttgtgcctgtggcccatggtggccacactctctgggggctcagagctgctgggagcagagcagcgcagacttccaggatcttcacaagctgtcctggtcctgggaagctcttgggacctggagctttgctgctcctccctttgagcctttcagggactgggacctggactgtcagaatctcactgctgccctgggccgcttcctctccaggacagctctctgtcctgggtttcaggggtgcattgtggcctgaggaggtgttctctcttgctggtctattaaacaaagcctaggttcattaacagtgggaaaagaccctcacctcatgatccaagctgactcattcttggctttccacaactgcctcttgccttattgttcatactacttcctatttctcccaaacatatcatggtctttcatgctttatctttgaatgtccttcccacccaatgacaaagaggaaccaccacaactccagcttgtctggtctttggtgtccacagtctcagcacaagtaagagtccctgtttggaaagctcaggcaaaggctttaaggatatagtattggcccagctggggtggctgcccatccctgaaccaactgggtgtggctagaggtttattaatactattgatctttgaagaaaagccagcttttggtttccttgattttcctattgtttttctgttttctattttatcatttttttgctttgatatttattatttcctttattctatttactttgggtttaatttggtcttcttaagacaaattcttaaagtagaaacccaggtcactggattgaccctttaaaatttatgtacaatgaaactttatctcttcttacagttttgacttacagtcaatttaaaaaatagtattatagccaccccacttcttttttgattatgatttgtctggaatatctttttccatcctttcacttttgagctacttatatctttggatgtaaaatgagtcatttaccttgaatcatgttttgtaaaatttattactccagcccctgtctttggttggagagtttaacccatttacatttaaagtagttattgataagaatatacttacttttgcaactttactatttatagtttaacacatttacatttaaagttattattgataagaatatacttactttggccattttactgtttatagtttaacccatttacatttaaaataattattgataagaatatacttacttctgccattttactatttatagtttaacccatttacatttaaagtaattattgataagaatatacttacttgtaccattttactatttgttttcagtatgtctgttaattacttttttgtccctcattttctctattaatggcttcttttgtgtttagttgattttttttggtagtgaaacactttgattcccttttaatttccttttgtgtatattccttggatattttctttgtggttaccctcaggattacacttaacatcctaaatttataacaatctaattagaactgataccaacttcaacagcatacacaactatgctcctatatagctttatttccttgtttatgttattatgacaaatcacatctttgtcaattatgtaccaattaaaatagatttataattaaaaatgcatgtgttttttaaattatgtaaaaaataaaagtagagttataaactaaaaattcaagaatggcttttatgtttgcccgtgtagttacctttgcatttattccttcatgcagctttgagttaatgtgtagtgtcctttcatttcaatctgaagggctccctttggcatttcttacagagaagatctagtggtaagaaatgcactcagcttttgtttatctaagcatatcttaatttctctttttaaaagttgtggtaaaatttatataacctaaactctacattttaaactatttttaagtgtattgttcagtggccttaagtacattcatattgctgtgcagccttcaccaccctccatcttgagaacattttaatcttcccaaactgaaactctgtacctgttaaacaataactctccattttcctctccccccggctcttggaaaccaccatcctactttctgtctctatgattttgatgactttaggtatcttagataagcagaatcatacaatatttgtccttggtgactggcttttttcatttaacacaatggctctctcttttgaaaaaggacagtattgctggatttagaactcttgagttttttagttttttttttccagcacttgaaatatgtcgtcccactgctttctgccttgatttctgatgacaaattggatgtc

SEQ ID NO: 467698 - DNA, 1031 bp, Homo sapiens
ctgcctactggcaggtcctcttcctcttcttttgggtttgcacctgttcctgatggcacccacacctgcatcgggttccttgatatgaaccaccaccactgtcagatagcagcagcagcaccgagaattacagttgatatgcattctgctggagttgacatcttcacacccatcctgggaagtttctccagctctattgatttggctggtggttccaccatcagtgcgcctgcagggacctggggacaagggagtcttggccatgccgtccacagcagtcagccttccagagtcccagtagtggatctggagggcccaattgtctccaaagctgcaccgaacctggctgaggtggtcacaacagaggcagagccccttctgcagctgacggctttccctctctcggtggctgagactgttcagctttccctaaaacgctccagccggccacttcagtgggtgtcacatcctgtcccccagcctctgccatagacatcccgttctcctgcaaaggcctggctgaagtactctctttggttatcctgagaaattatcctgaagggttcctgcaagtgaagaattttagatgagggtatttatcagagccaagcattaataataaatgatgcctgatttttttattagaggagccacataaatgtggctgcttcaactttttaactcttgggaaagcttgaagttgcaggctactctgctgtgggagagtgccagctaatcaggtcccattcatatgcaaagcacttgctaagctgagttcatcaaaatgcagtcgtttcttaaaaaaaaatatttatagactttccctccctgcaaaagactgcaaggaagatggatagtgaaaaatacaaattgttaatgccctgaaaaggaagtctcatcctgagccttgctaaagcattccctattctttgagaaaaacttaaaaatgggcatttgtactctagatttctctacttccctttactaaactctctccctcctcttattccagtcacttcgcagtatctctt

SEQ ID NO: 467699 - DNA, 3231 bp, Homo sapiens
ggcacctgtgccttggggaccctgaagtggcctcaacacgctcactccccactagccatgcagtggatcatacctggcaagagggctcacatcgccaagcttcaggtgccccctctgcaaatggctggctctgtcccctgtttctgtgatggccctgatgctgttcctgctgcctcccaccccctgccctccctacccctgttccttccgggtgaggaggaggaggaggaggaggaggagaaggaggaggagggggagggggcttccacctccagccctctggctgcatcctccctgtggccactttcccagaagcaagctctgagcaggtcctgccttcaaggctccctgctgctcctgggatcaaaacaaagcccctcagctgatcatccaaagacttctggggactccaccctccctttcctcctaacagccgtcacccaacctctcaccccagtttacaggagaacttgtaaagatgagcccctgagcgtgtcagccctagaagcggctgctggagcgtccgctgtgttcctcctccacacccgtgcctgtgacctcatgacccaggggattttggccttggtcacgtccactggctgtgcatctgccaatgccctgcagtccctcacggatgccatgcacatcccacacctctttgtccagcgcaacccgggagggtcgccacgcaccgcatgccacctgaaccccagccccgatggtgaggcctacacactggcttcgagaccacccgtccgcctcaatgatgtcatgctcaggctggtgacggagctgcgctggcagaagttcgtcatgttctacgacagcgagtatgaatctccaatgtgatcaaaagctgtgttcctcttttctgacatggacacctttgctacctttggtggggttgaagttagtttccaaccagactgctccttatcagtaattccataaagtcgccaagtgaccagtagctttcatctggaggaccactgcagctgttcccacttataagtgagaacatgctatatttggttttctgttcctgtgttagttggctcaggatagtggcttgcagctccattccttgatagttttatcatacaagttacacaccttgccctatggaggagctgagctgccaaggcttccccaaggtctccttgcacagtcacaggtggctccgaagagccatcatgccttctaagctggacagcttaactggttttcatagaaaatatctgtcgggatctcacccccagagtcttcctgaagtaaaattccgtggaagaaagggaattatcggggcaaatgttactttaatcaatgccccttgctgacgtctcctttgcggcccctggcaaagcaggccagatgactgaactgccatgctgatctcattaataatacacattggatcattatggcattagtttaaattgaagtaatacatactttttccagacaaaatgagtaagtgagtttaattgctaggaaacctatggaagaagtttgacaataactttacctggatgagtgttttgggttttgttcttcgatctaattacaaagtaactgtactttggggtgtgttaattgcagtgtgccctagaagattaaagtttattaactctgaagttccctcacccctccatcagattccagagtgcgtctggagacatgaggagatgcctgatgcaggcctgcataaaggactggaaagtgaggctatgctgactcccacacatgccccggtgtgctgctgggtcctgctggagttgagggagcaagaacttgtccagatcgtcccccgtttcctcttctcaccacacaccattgtgcccttgcaggaccgatgcgggctcctgttgatatccccctcctgccagacccacactccccagacctcctttgctccacacatgagagggaacaagggagatgttgtgttgttaaatactagaattccaggaagggtaccagcgagatgtggctgcagacttctggaaggaccactagtccagatgggacctcccctcctcctgctccctgtctgctgccttccagctccggctccttgctgctccatgagcgtgcccggcacaacctgctgcagaggctttgggctggctgtttcctctgcctgggacactcttcctgcacgtgcagacgtctgcaagctgcaccttcggggctttgcttcaattccatctgtcccgtggggccttccctttccaatttatttaaaaatggaactctattttctcttggcacctctttctccctttttccattgaatttattcccatttactcatcttttgatgtctgtctttccccaactagttccatgcagacaggcagttttgtttgcttggttgagtgatactggacccacagcatttagaacagcacctaaagcttagtaggtgctcattaaatatttgatgagtgaatgagtgaattgatattttgggggtgtttcattgcccatttattggcccagaagcatttgtttctttccttgagtttaccaattacagcagtaatatatgcttcctatggagtccaagtatgtgcaaaggcaaagcccctccctcctccactttcagtagagcactggcttgttcagcctgctgtgtttctgtctataccttcctccttgtcaagtgtgtagactgcctgtgtatgccaggggtcaggactggaatgtagtttagatgtggccagcccctgagaaagttcttcccatagcttcaagtcaagaatgactacaaaacacatatgaatcacagtgagatggcaatggtgctgctgaggtctggtggggagtgggtcttggcaaaggaacctgtttctaggcttagacagcgggctggcagggggatggggtagcttggcagaatggaaggtatggacaggacaggcctagcaagggctgctctcctggtgggctgcagctcccattttccctctggcctggtttgttggggaatgagctggtccctgaagggagcagagcctgagcccttgttggcatggggatggcatcagcatagctgaacgggcattctagccatgcagggactcagccttgtgctaggggaaaagtggggtttagatctatgcagcttttctgcttattttctaggcacctttgaattaacttatctttccatctgtgcaatgaagaactagtgcccaacttgctgcagtccatgtaggagccatacac

SEQ ID NO: 467700 - DNA, 742 bp, Homo sapiens
ttcctttgaaggaggcacaggatcgagtgtttcaaacgtgtgtctttgacaagtcattgaaatacatggaagtatgatcatcaaaaggcatgactacccagataagcgaagcagcagccattgcacgcagagcaatgttgctggtctcctggctcgctttgttggcatgaggcagcggctgcagtcacaggtcccttcgctcccgcccatcttcgtcaggtgctctcaatcctgggccagttttccttgccaacagcccatcctgcttgtcattttcagtggcttcaggccctccagcagaggcaacattgagccccatatgggctccaatccatgctcccagattagtgctttatctgctcctccaactatcccctcctttgctgacctttattatcctatctcccacagttgcacaaatgtaatccctatgatgaatcctttattccatattactcctaagagttctgcttcctggattgaactattgactgataaccagagcaagcaaattgctgagcagcttcccaagcccagttaaacagcaatgtgaaaagaatctccattcctgcatcccttagggataggatattgcttttgggtgacttgttagtgtagagggagggaagaggggacattctaaggactctgaatgtggcccttcccatcataatagctcttactacaatagtcagtatgaagatttcttccatttctaaatttacttttccattatgctctt

SEQ ID NO: 467701 - DNA, 963 bp, Homo sapiens
tctgctcctctactcactgtttcgattaatgctgtaccttggtatcccagacaagggaacaagatatagagataacaaagggaatgaggaaaaggaggtttcagcattccagaccgaatatgaaaagaggctcggcaggcgacagggcatagccaagaatgaaaaaggtgggggaaatctcacaagatattctccacttcttcagcttgactgtaacctcatggaagattctgggccagaactgccctcctggttatgcagcccccagagtccccagtctcaaaagctgggagataaagaatgtcgttttaagctgctgcagtttggaggaacttacagttggagccagaagagtacacagacaacttcaggacagcttaaggagtacaaccgagtatgggatacaatgagcctagacagctttgtcaagcctggtatcaacacgcacatctggagttcccacctccttcacagcaaatttccagatctctttgaatgcccaagggacacacttcttgaagcctactccatggatgcatttctgaatgttgatggtgtattcttgggccaccaccttgctgatggcagaacagcctttcttctttccacccttctttgcagcagccattgtgccaggcccaagttggaaaggagccagatgtctttacttaatagtttttctcctttagcagacatagtcttataatcctatctatttccagaaagggtttctgccatgtggaaaaaaacatatgcaacaaagtgaaataaaaataagtaagggaaccaagaaaaagggaaataagagtagaaaagacagaatcagaagagaggttatcacacaaaatatatacaaagaagactatactttcaggaaaaatccatgcatttgccttaaaacttcttaagagtcaagagggaaaaaaacaccattagttgtaattctcagtgcctaggtgattt

SEQ ID NO: 467702 - DNA, 617 bp, Homo sapiens
tcttaagtcccttggagaaggaaaaacctacactactataatgctcctctctttataatggtcattacgtgacctgtctggcaggttcctggaaaatctcactcataagacttgtctttattcgacccgactcagggagcactcaccatgaacagcattttacccaaaggcttcagacacccgggacctggaggaggagacaatcctctttgctccccaaatgctgtctccaggctttatgactcctactgtccttcaaagttcacatcaacaaactttccatctgctgcccctctgttgctggcatctatctgtcttgatcctccccctcaatcactgatgactttcacactgggcccactctcttccacagttaactttggacttgttaccaatgtgaccaatgattttcatcaatacagccgaagtctaaatatgaatatcactgtggtctttgcaggaacctggacaagcaagaagatcatctcagggtggacaagtgtcattggagctgggcagcatgaatttttgagtaataccttatgtccatgagaagtattattaatagaatccaattctgtttcagcatggccttagaaagaggatgggctatcttt

SEQ ID NO: 467703 - DNA, 1062 bp, Homo sapiens
tgctgtaggttgcacccttagaattttggggggatgccagcttctctgggtgctgctgaagaagtcttccccaacaactgtgcgtgcagaggtggacttaccttgaagctaacgacactcacatcaggtcccctcagtgcagagccccttcccaggggtattgtggcttccttaacagaatcccacagcctggaagccttaaacgatagaaatccattttctcacagttctggaggcgggaagtccaacatcaaagttctggcccgtatagtttctggtctggtaggggtgggcaatagtacctgcctgcacacgggctgcaagggggcctggaaaagcaagtctctggcacagtcatcccgagttcagacccatcaggtgggaaggtcgtcaaatgcaggaaggagctttcgatactgtgcagtccaaaagaacaataaatgtccttttcgaggggccatctgtgtatttttattgggttactccattttcccattacagaaacaggttgcattcagacctgttgcaaaagccattgttaacatataaaatactgctgttattttctccttttattcttctttatcattcggccccactcgtctattccagttacagagggagtaataaagcatttgctgctgttccaccaaaatagaaaattatctgctggccactcttagactgaaacagaaatgaagtgagaaattctactgcctgggtaaacacccacgggatttcagtccataagttggagaacttttttataaaagcaatttctcagtcttttttacactaacttatacagataattgtggatcctctagggaaaatacttagctcaggagttctgaaattttgatatgggagcttgtggccatctgggcttgggaaatgactgtacagagaacgtcttgggagagagagagatgatttggtgataatgagggaacagcttagtcgtgttcttctatctcatcaagaatcctgtttgcaggagaacaagcagcatattaataaaggctgatttttaaaaagtacctatatagtaataagttgatt

SEQ ID NO: 467704 - DNA, 569 bp, Homo sapiens
gtaggactataattagtcctgatgactataacgtccttagtgggttcctatatctgcccatgctttctaaattgtccctacattatattttcaaaatacccaacttgaggtcatttttttcccctcttgagactctcaaccctggggaatacaggtttgtttgttttacatttcttcatgagagacgcaacagcatgtatttcaatcctccaatgacctctgttgtcatttactttgaaactttttttttttttgagacagagttttgttttgtcacccaggctgtggtacaagtcaaccagcaccacagacagttcacgttgctttgcattgcaatgctacgacttcctaacttcaagagacagaatttgtggcgatccagttttcctggcatcacggccctgtgtttcaatctttcctgtgatgtggatggagacgatgtgagagcggcagcaaaaagaaaaaacacctgatgaggtaacgcgtgtgttttctgtagtgccgtctgggctatttaaaatgtatgtcatggctttttaatgtgcaagctttgaaaagattggtaagag

SEQ ID NO: 467705 - DNA, 576 bp, Homo sapiens
cggcagctctgggaaactaatactgtcacccaggaaacttacaatcatcatggaaggggaagcaaacacgtcctttttcataaggcagcagaagaagaagaacatgcagaggaaatgtcagacgcttgtaaaaccatcagatctcatgaagaaactgaggcacgaagagttaacaacttgcccaatggacacagcaggcaagtgtaagtgtggtaacagccatgcttgtccccagcttgtagaaagtagcactattgctgacagctgccaaccattactgcctctcctgagtcatgaagatgtcttcaagaacacaacattctgccctaatagagctctgacgaagggctctcccctagttgctgtatatttggctgccagaaggcacttggctgtcagtccccttcaggaactgcctcagctgaagagccacctcacccatggtcatgccccttccccagggcagaccaacccaatgaatggtcaacagaggtctaaagacacagccccctggctaactgggacaatgctgaaggactatcccagcatcagagcttcgcacagggttgactgagg

SEQ ID NO: 467706 - DNA, 651 bp, Homo sapiens
cagaagtcacctgtcttctgcgtcgatcatgctgggagctgcagactggagctgttcctgtttggccatcttcttctttcttcctaaaaataattattgtgcccccagtaggttctggtgggctttcatacgtaagatcccgcgggtccaagtaggctacacggaggaactgcagcaatgttgtgaggcacataatcttttttctttttttccaactcaataccccatctgccttaagtgtaaaaaaaaaaaaatacaagaagctgtatggcagcaggaactaagcagagttttctcctctcatagctggatgtgctctaggcaaggatatgattgtaatgcctcatttgtgaggatggaagattacagaaacaaagacaacatgacccgagctattccaattagaccagggtcctttcatgctagccaaacctcctccaaaaaaggcaccctggtcagttttcataagtgcttttgtttatattacaagtttccaaatgggaaaggtgacaagatagagtataggaaggctctattgtctacacatcaataattctgaatttaaaaggagattgcatgtctttcagctatccttagaggtgggaaacagatgaggatttcttatgcttaaattctgccgtatggcctctc

SEQ ID NO: 467707 - DNA, 1301 bp, Homo sapiens
agcttcatgacttaagtgtggttatcacaccggtaattcactatgagctctccagaaaggcattcgttcatctttcttgggacaatgctcagtgtgtaccaagcatatgaaagtgaatctgagtatctggcccttaatctctccaaactgtaccagtccgaatccaaatgtcacgtcagtccctattcccgctgctcttggccttggactctgcatgtctgctgccaggacagagtcgagctccatgtggctgtgtctatgagtgacctggactcacctctctttgtcaagtgctcctccaggaagaaagggagagatggaggactaaagtatcagaacattcagccgcacccaccaaccttcaagtatcagaacattcagcccctcccaccaaccttaaagtatcagaacattcagcccctcccatccacctccagggaaagggtcgtcagaggcactggagattaaactctgtaaaaactctgggacaatggaagctctgctctccctcctccaaaactcaccctctgcatctcttcatctgtatgcttgctaatatcctttataataaactggtaaacctaggtatttctctgagttctgggagctgtcctagcaaattagttgaacccaagtggggactgttggagctctggtttgtggctaacagcatcttgctatgttcttttaattatgtgaacccttttagctctccttaagaaaaattccttgttcctcttccagcctaggtttcatgtattcttagatttttgcatcacagatatttttaaccaaggaaaagaggagcacttagggatgagggtgggcaggggtgttaagagaagtatagtattcaaaaaattacatgagatattcaatactttatcacaaaataggttttgtgttagatgatttttccaaccataggctaatataaatgttctgcacatgtttagggtaggctaggctaagctatgatgtttggtaggttaggtgtattaaatgcattttcaacttacggcattttcaatgtatgatgggtttatcagaagaaattgaggagtcatttctgtgtatgctgcacatgtgacactgtgtgtgtgcgtgtgtggtgtatgtgggtatgtgtctgtgggggaagggccttgaggatgagtccagagagttggaggaacgtggagttaaaaccactgaattgagccaatcctccagagaacatagtgtcttatctctaaactcgcaggctcacaatctaatgcatttatgcattgtttaattttggtgttcagttacctgctgct

SEQ ID NO: 467708 - DNA, 1972 bp, Homo sapiens
agttatactagcacctaatgtggatggagccctccccacaagccaggcacggcgctaagggctgtacatcactgcctttagtttccccgatatccctgtgacatggagactattagcaatgggtcctggtttcctttcaaattctcagggcgaatctgatggtgtaactcttccttttgaaggaagcctcaagtctctgttcccagccctggctgtcaattggggtcagcagggccaggactcaaaaatgaagtttcctgactccaatttcctggactttaccatggcccttagttcaggctttcgaagggctccaactggacagtttcaccccggcaaaccctttgatagccatctccctgaacacttcctgaatcagacgatctggttcctagctcatgctcaatcctctgggggtgctaccactgaccccaccctggaccacaggatcagaaacgatccattccaatgcagacagtcctcagagcagactgagtaacgctgccctgcaatccagcccctggaaactactattctactttctatctctatgaatttgatattctcggcaccttatataagtggaattatacagtatttgtccttttgtgtctgtcttgtttcacttagcatgtcttcaaggttcatccatgttgtggcatatatcagaatttcattctttcagggatgaataatattccattgtatgtatataccacattttatttatcccttacttgtcaatggacacttgggttgctcctaccttttggctattttgaataatactgttatgaacattagtgtacagatatctatttgagtccttgctttcagttcttttgggaatatacctaggagtggagttgctgagtcatgtggtaattctatgcttaactttttgaggaaccaccaaactgttttccacagtggttgcaccattttacattcctacctgtaatgtacaagagtttcaatttctccacatcctcaccaacagttgttattttccgttaaaaaaaaattatactcgtcgagtgggcttcatttgtttttcaagactctgaagtcaatgaggcctaaagttaacatttcttagatctgagtggttggtacatgagaactttttatattatgcaatgaggaccactgtctggggtccactcttctcattgttttacatttgaggaaactgaggctcagaatctcaaaactggaagtgttcactgaggatgattgagcctctcagccaatatgtttgcaatactccagcatttttagaaacaataaatgtttggcttaaagcaagcaaaggctgagaggaaagcacactggatgcttttgcaaactactcccccaccctccagattctgatatgtcatccttcaccctccagaagagatcaagaattgaccctccctcatcacctttcttactttcctcctgaaatcacacacccaactcttagctaacctactcttagctaacaggccctttgcctcccatttcctaccatgatttctagcccatgggtgtagactatttcagagctgtttggaaacttagagtcaatactgaacccaaccctgtggcctcacattcaagatgcgggaacccagggagatgccagccccagagcccagacacagtatcccagcaagggctccttgtccctctgcttctcttcagggctctgctgacctatctcactgggcagtcctaaccccacatcatcctgagtaagtctcacagcttcgctgaaatttgcctgagttgttctggttcctggacatttgccaaggtcttgatcttggattcacttccttgatgatttttttttcctcttttttttgctgactcttcctgtgattgctaagatcttcatttctcagatgaggctcaagcagaaatgcagctggaccagaattggcagctccacggattcctcagagtccccagaccagggtagctc

SEQ ID NO: 467709 - DNA, 1094 bp, Homo sapiens
aactttccttcaggtctaactggttctgcatacacaatgaggatgaattcgggggctaaatattgggcacctgtcagccagttaaaagcgactagcatggctgccagacttaagaaactaaagacacgggtgtcagactttctgggaaagggctctctaataacccccaactctttggagttgggagcgttggttttcaagaatgtgtcggtaagggccactaaatccgatttttctcggtcctctttgtggtctaggaggacagatcaaaccctggcctttaatttaaagaatgtggctttagccacagcccgagagtttggagatacctggtatcttagtcaagtaaatgatagaatgacagctggggaaagggacaaagtctctcccggtcagcaagccatccctagtgtggatccccactgggacctagactcagatcattgggactggagtcgcaaacatctgttgacctgtgttctagaaagactaaggagaattaggaaagagcctatgaattattcaatgatgtccaccataactcaggaaaaggaagaaagtcttgccttccttgagtggctacaggagccttaagaaaatacactcccctgtcacccaactcactcaagggttaattgattctaaaagatatgtttattactcaatcagctgcagatatcaggagaaagctcccaaaagcaagcccttggccctgaacaaaatttggaggcattattaaacctggcaaccttggtgttctataataggggccaagaggagcaggccaaaatggaaaagcgagataagagaaaggccacagccttagtcatggccctcagacaaacaaaccttggtggttcagagaggacagaaaatggagcaggccaatcacccagtagggcttgttgtcagtgtggtttgcaaggacagtttaaaaaagattgtcctatgagaaacaagctgccccctcacccatgtccactatcgctgaagcaatcactggaagccacactgccccaaaggacaaagattatctgggccagaagcccccaagcagatgatccaaccacaggactgaggtgctcagggttagc

SEQ ID NO: 467710 - DNA, 1282 bp, Homo sapiens
ggttaattcactgtcagcttttgtgcgggaacatcgctttggcttgtttgaagctcaaggagcctaagaagtttgcttgctaaggtgaagaacagtagatgctcctacaccttgcaccatgtgcctggaaaagccgcagatgttcaacgacagcccatgaaagcagccaggatgaggctgtactctgcaaagccacagggtcggagctgcccaagaccatgggaacccacctcttgcatcagcatgacctagatgtgagacctggagtcaaaggagatcattttggagctttaaaatttgactaccctgttggatttcggacttgcataggccctcaagtactttatgatgagtctgctgctgtagcatcctttcagatctacattgaggtagccgcatctccacaacttgtgcagtctgtgcacctgcagaattggcaccacatggatggataccaccaaggtttatttcctatacttttcagagctgcagccagagacacaccctggttaacagaaccttctggatatttaacagatggcccaattaactataaatataaaactaaatgtacttggctcattgaaggctatccaaatgcagtgttaagattaagattcaatcattttgctacagaatgtagctgggatcatatgtatgtttatgatggagattcaatatatgcacctttaatagctgtacttagtggtttgatagtccctgaaataaggggcaatgaaactgtgcctgaagttgttactacatctggctatgcactgttacatttttttagtgatgctgcgtataatctaactggtttcaacattttctattcaatcaattcttgtcctaacaattgctctggtcatgggaagtgtacaactagtgtctctgttccaagtcaagtatattgtgaatgtgataaatactggaagggtgaagcttgtgatattccttactgtaaagccaattgcggcagtccagatcacggttactgtgacctgactggagaaaaattatgtgtctgcaatgatagttggcaaggacaaatggggaatgatcaaagaatgagagacatgtgaaaatgcggactgccgaggcaatctttatgaggttcaaaatctggtagttttatacaaggtgttatttggaactggattatttaggttagagtaacagattgttgttacctccattatattttatcctttgttgttgcttgactacttattctgtttggctgtatgcctaatgtatattttttaaaaatgagtgttaccct

SEQ ID NO: 467711 - DNA, 767 bp, Homo sapiens
gaaaggcttgggagggtatgaggagggtggaatggggagagattgggtatggaggcaattttgtttgtcacaacaggggagtgggacgtgggtgccgtgggcatctcatgggtagaggctagggatgctggtggaatttgtgctgttattgaaaggcaacttcagttccttcttgttctctcttgccctttggccttctgccatgggatgacacagcaagaaggccctcaccagatgccagctgtttggtcttctactttccagccttcagaactagagactattctggactatcctggtatactcagtgtaataacaagtattcttatgaaagggaagcggaggaaatttgactacagtagtaggagatgtgatgatggaagcaagtggagagatgtgaaggaagggaccatgagccaacaaatgaggacaggctttggaagctggaaaaggcaacttttaccatacattgattattcttatatgaaagaattattattaatgtgtttaccaaatgatgattttctatttcatcatttgttttacattattaactgaactttttcactgtaaacaatcaggaactttttcactgattgtttacatgatttgcttctcatttttcatttatcatttcagatgttgtttccttttgtgtgccttttgtaaagcaatcttctctgaacctgtaatagggattgttttaatgtaataaattctggatattaattttttgttcattattgatacagcaaatatcttctcat

SEQ ID NO: 467712 - DNA, 2203 bp, Homo sapiens
agacacttccttgtaataattctgagatggttctttgcaaggcaccagttccccttcagcttttgccatgattgtagccaagcagatgctgccagtcttcctgtacagcctgcagaaccaagtaaagaggagccaagtaccagtagccaagacaatgggaaaaattcctcaaaggcatttcagagaccttcatggaagcccctcctatcacaagcccagaggcctaagaggaaagaatgcttccatgggtgaggcccatgcttatagccttgtgcaaccttgggacactgctccccacatcctagtcactccagctccagccaaggccaaaaggaccgaggcaaccatcaaaagggacccagttcacaacaaggagataaaccttggtagcctctttatcccttggttccgacactcttctccctcacttagagacgtagaggcagctggcaatagcaatagggggatcccaccacatccctatctcacagagagacatcctgcagccagccctggaaaatcccttccattcttcccaggagatgacagcttcatgaatgttattgctcctgaagacattccggtgtttgtcaaagatcagatggttgtagatgttcaggatacaaaatcaatgtgcaaaaatcacaagcattcctatacaccagtagcagacagagagccaaatctcagtactcttttggcctttgaaaaaatacagacctgcgtaagtatttatatgcaccaatatttggagaaaatatataaggaggaagacgagagggaagaagaggcagatgacgaggaggaagaagaagaaatccatgaaaaagctactgagaatcagtgaatacttctaataaaaaatggacaccaatttaaatctgttgctatctggaaattctctttcttcaccacatatatttaagaattactaaataaatgttagaaatcaagcaaaaacataacttgtgactccccttgagtcacagtttgaccactgttgctcatccagggcaacctgtgaagagtcattatctagaaagattcgcctgaataaggcagacattggaccaaagcagcctcaccctatgactaggactcgatttcagaaaactcagttctggcttctgttttgggaaacagtttgtaactgtgtttaatatcatttgaatatctataatcattcttatgcaaatagcatgataataagtattaacattaaagacagaagtttatatttgtcttatattatctgtccccttccaaaaggaacttaaatcttaagtcaaatgctctatgtaactttaagcaagttacgtattctctcagagagtcgagttcatcttctgtaaaagggggatggggaaacaatcaaaaacttttctcataaggctattattaagtacatattagcattactaaagtgtttgtaaaacaatgaatacatttgtataaattgataaagtttttaatttaatatatgtttatacatatggatattatgtattaaattatgttttaaatttaaatatatttgtctgccaacacatatgttattccatattaaaatatcttttcaattatttcatggaattctggaccaacagaggtgcaaacattaacctttagatttgactctgagcttcctagaagaccaaacaaaaagacactgtcatttatataatttttattatgataagctttccagtattgaatttattgccacttaatttctcaaacattaagttaatttcattatctgtaaggaaagcattatttctaccttctatacctagagagtttttctgaagatcctcttagataatgaaaatgaatatgctttctgtgttgatagaaaccctacaagcaagaatatagtatattctaaaataatgtttcttttacaataattttcaacatataagaaaataaaaagggaagatttcattcaaataagggcatttcaccagcccttttatgattatatatagtaatagttttttactatttaaatggctgaaagattctgcatattagacctttattggctgcatagcttgtgaatattttctcccatgctgtatgttgtctgttatactttgttgatagtttcaggctttaaaccaataacagtaaagaaggacaaagaagggcattatatattgataaagagttcaattcaacaaaaagacttaactattct

SEQ ID NO: 467713 - DNA, 1648 bp, Homo sapiens
gaacatccaaactatatcaaggtctataatctatctcaagttaattcttgtaaagacttccctgttctccgttagattgctttggtcaaaaatcagtcagcaaagctcactctcccaagttgaaacaacttatggacaagaagttattgaaattaaatggtggcagacatgtcaaagggatattgcagggatttgatcactttacgaatcttgtgatagatgaatgtgtggagatggcaactagtgatcaacagaacaaaattggaaaggggagggaggacactgggttctgtcctgaaatccaggccactaagggatatatccctgaacttggacgttctcttctggatccctcatctccggttgctgttgttctctacagcatttctaacaatatcagctatggtgttgatcattgcaatggaccacggaccaccatttcttttgcacaaaggaaagtcatcaaggaaatcctggggcatatactgatcaacatcaaactcatcagtgtgtcccaaagtgctcattttaaaccaaaggatctataaaatttaaattcttttaaattgaagtagccattttggaaagacagaagcataagtaaataatattgaactaggtgatgagataatccagtatttggcctgattaaaggtaaatatttgtcagttccaacattgaatacttggcattatttgttgtgggaatatttatttattatattggaatataataacttttaatatatataatacactaaatacataatatataattaatattataatatataatattaatatattatagttgaatattttatattatgcaatgtttattatatatttattatatgtcaatattttaatatatcagagagaacaatacatataatctttggagttcagaaaaagtgaaataggcctgaagttcatttcttagaaggtgcctagatatactagaaacatgaagaatgaaattaataaactcgtaggatgacttcttcctttgccatgaatcgttgagggttgtaattatacaaatttggactcacagacaagtacttttacattttgaaatgtttcaccaaataaatattagtttatttattaatatttatttaagtttctttctttttctctctcccactcatttatttgttacagtatttgttcaaaaagtacaaaatgtccacgtgacaggccccttacctggtactaagtaatataaacatgactatgaaacattgatttccttaatctcaaggaggcaaccctccttggagcagtccatcatgtgactaattatcatgcaatagcgtcagagtgagacatatgtctaaagtgtgggtgagccaagagtaagtgataatttccagtttaggggttgaggatgattttacagagtaggtaataaatgaacgcaagcttacctggtagggaatagggagggaaaggtgttgcagaaatagcacaagttaaggcatggaggtataggcacaactagtttgttggcagtgctctaagtcagaggtcctcaaccctcaggccacggacaggtaactggtccatagactgttaggaactgggctgcacagcaggaggtgggcagcagatgtgcgagcgaagcttcatctgtatttacagcc

SEQ ID NO: 467714 - DNA, 1263 bp, Homo sapiens
aaactgccggtttacactgtttctccaagccatcacagctgatagctcctgaggagaaactacaaaagcaccagagacagggagtggtttttggaagcgggacttgtcgcggagaagagaggcgagaggaagtttgtctgacaggcattaggacccaggaagcaagggtcaggatagataagataggtgggcgagtctcacttgggcaacgtaactttgagagttctgcttacggtcgcagggtcaaccaacttgttgttgggaccccggagctgaatggctttcctctctgtcgaccctcagctcagcccagaagtacaggaaaagcggaagctggttccaggcaaaccaacgctcccaactccgaagagtcaggggttgttacagagccctttcccagaaagtctgacacctgtctttagtgcggccgccgtgctaatcacttttaactggccaacaggtgcccggtatttagcccccgaattatgttcagatgtgtctggagtttcttccttctggtgggttcgtggtttcgctgacttcaggagtgaagccgccgaacctcatagaatgaagccgcagaccctcacagtgagtgttacagctcataaaggtagtgtggacccaaagagtgaacagcagcaagattcattgcgaagagcgaaagaacaaagcttccacagtgtggaagagcacccgagcgtattgctgctgctggatgaagctgttggatgttgcatcatatcactagtataccatgtggaattactatcacttgtgcatgccaacaggcttatacagttgtacaaaaccatcgatacgtaaagtagcacgagggagaagtgtgatgaccttttgtcctctgtattgtggaaagcccatgccaaaaggagcaaagatttccacctagctcaatggttggtgtgtgagccataagataaactggaagaggtatactgggatcaatacagacaacaccagctgtgtttgcagcaaagaggctggaggacacaactgaaaaatatggcaccagaatgccagttatgcatggctgaatgtgcaaagaacagttggtctacaaaatgccttctgatcctgaaatggtgttgagaaagattgtgaaattttcgatatgacaatattgtggccacggaatatgtgtttagcatgctgtatgaagaaaagaactccagttctgaagggaagtgtgttcatgttgaagaagaaaaaagtgtgttcaatatccctgatgatgtctgttcc

SEQ ID NO: 467715 - DNA, 521 bp, Homo sapiens
ctgcattctatctagaggagggcagatgatacatgaatatataatgaaggaatttcactatgtttatgcatatcaaaacatcatgttgtacaccttaaatataaaaaagaaagaaaacatatttgatggaaatgtggtttctgaagccaaaaggggccaatttggaaaaatatccaatttgaccatcctatcagttccagatgaacctctgtttcctgccaaagtggaacttcagccagtgcattttatttccattcccaaactcatctgcatcatgtggcaatatgtattaatgctcatcgagctaccacttggatcagggcctgccacattgaaagacacggctctcctgttgtcaaacgctgcaccttcccggcagctgcgcacaaaagagcctgtgaagaaatcagctgggtttgcgtgcacttaaagttgtatataattccggtgttaaatttattggaagactgagcgtaatgtaaaacacagagtaaaaacgaggctccgtgtgtcagctttac

SEQ ID NO: 467716 - DNA, 821 bp, Homo sapiens
ccttccgagcttgtgcatgctttctcctcaagaagaaggtgccttctatgatgagaggttactcacccacagcaggtcttatgtccttctctggtcgagaagcatccagagcccctgtgtgtgcttttatgacacaaaactatattaagttgaactgtctgaaattgttgctattctaccatgtcaagcccctgagtgtgacaaacctgcctctctgctcagttcttctcacaccactcctcatacctgctgctccagccacggcaaaccctggacacactgtgcctttgcccaggctgttgcctctgcctggaatgctctccccattcagctctactcaccaaactcctatccattccacaaaagccagcttaaaagtccccttttgcaagccttctctgaccggcaacaccatccagtccgttattcccaccatagggccgtatgtgagctttctatgggttctactcattcatcataatttatcttgtttatatctatctctaaagcaaaaaagggaattcttagaggacaattcctatttacctctgaatcatctgggcctcccactgtgctcatagtaagttcttaataaatatctgatgaatgaatttggcagaaatggaattctatcatactgaaaaactgaaaactgatagagactctaaaaacttacctcttcttctcttcattctaaaataagtataaatgtaacatatataatatataataataaaataatatctaatatattaattaataaaataaaatatattatattaataaaataaatataaaattaataaaatatataatatata

SEQ ID NO: 467717 - DNA, 577 bp, Homo sapiens
gtgggatttaatgaggtgacctggcaggagcgcttcaccgggggcctggaggtggtaagtgccaagaaacagtggccatgttcctgtggtctcgagtgatgttacaactccctggcaaggtgggcagtggcacccgctatggagatgggcacgctgacctggttgctaaagtgactcacccaaggccacacatggaggaagctgcagcgcgagtgtctactgctgccttcgcaattgaaaagcccgatccccagccggccaggagtggtcggagcagggagaaggagtggctggccctcaccttgcccataaggagaataaaccagtactaccagtgtgcctgcttggaggttcttggctgctggaggaacttgagggcagggctgggcttgctcctctctgggtcgggcacagcctggagctcagtgactgtcacacgagaagtcctaggccagcaagtatgggagttggtgaggggcattcagtggccactgaaatgaatctctcattggcggttgagcccttcttttcctgctttttcccattttcttccctgagagtggactctgttgatatg

SEQ ID NO: 467718 - DNA, 962 bp, Homo sapiens
accccgtctgggaggtgtacccaacagctcattgagaatgggccatgatgacgatggcggttttgtcgaaggcttctctcgtgcttcccccagcacctgctgccatagtcccactgcactcctgttaccctgatcaggactctgctgctctcccaggttgggcccttgttctctggagcctgtgctgccctctctttttgcatttactccttttattttttcagatgaggtcttcctttgtcacccaggctggaatgcggtggcatgatctcggctcactgcagcctcaaccttctgggctcaagcaatcctcccacctcagccctcagcccccgccccaggagccgggactgcagagacgttccttaaatgtctgtggtctttgcatagtcctcatccttgagaaggaggtgtccaaagctctttggaactgtgtgtgtgaaagaggcatgtggattgtgtatgtctgtgtagttggccagtgctaactctggagaacgttaaatgttaatttccattgttttgttttgttttttgttttggagagagtaaatttttctagtacatctggctgctggggaaggggctgaggaagaagggcctcccaatcctgtgtacagatctaggcttaacactctctttgatgcccacagctcatctgcacctttagctcagccagtagttcataagtccagagcttctgtacttcactatttcccaagatcattatttcctaaggtaggtggcaggggaactgaagtctccttatatagacttctatcaatctccccttttcagtccttgcctgtcctcttctctgtggtctgtgcctttgggtcaggagctcctctgaggctctgcagggtgaattggcttgttctaactggcacgccctgcctgcatttaggttgtagctccttcctcttgttaagtgtttctgcttctccatctcctttctgatt

SEQ ID NO: 467719 - DNA, 1022 bp, Homo sapiens
ttgtaatagtaaatggttaccaatgtaatgcttctttttcactttgtcaatggaggactctcgttggggagatagagattcagaaggcacctggagaaaaggacctgaagcagattctgagtggagaagaggcccgccagagaaggagtggagacgtggagaagggcgagatgaggacaggtctcatagaagagatgaagagcggccccggcgtctgggggatgatgaagatagagagccctctcttagaccagacgatgatcgggttccccggcgtggcatggatgatgacagaggccctagacgtggtcctgaggaagataggttctctcgtcgtggggcagacgatgaccggccttcctggcgtaacacagatgatgacaggcctcccagacgaattgccgatgaagacaggggaaactggcgtcatgcggatgatgacagaccacctagacgaggactggatgaggacagaggaagctggcgaacagctgatgaggacagaggaccaagacgtgggatggatgatgaccgggggccgaggcgaggaggcgctgatgatgagcgatcatcctggcgtaatgctgatgatgaccggggtcccaggcgagggttggatgatgatcggggtcccaggcgaggcatggatgatgaccggggtcccaggcgaggcatggatgatgaccggggtcccaggcgaggcatggatgatgaccggggtcccaggcgagggttggatgatgatcgaggaccttggaggaacgccgatgatgacagaattcccaggcgtggtgcagaggatgacaggggcccttggagaaacatggatgatgatcgcctttcaagacgtgctgatgatgatcggtttcccagacgggccaggtaaaattctatttcctagaatatgcttaagtgttcacctgtaaaagtgaaattctgatggataaatatcagggctgtattgttattttccagataaactggtctttcatctttccttcagtatcatttgcagtgacttc

SEQ ID NO: 467720 - DNA, 544 bp, Homo sapiens
ttctgcagctgcagcactgcctcgctccccatccagctctgctgctttctttcgatggaaacatgaacatctctaagcctggacaacctcttaataaacaacagaaatacattggagagaaatacagcaggggtgggagtgaggagaaacctttaagagacttacctgttgaagatcagaacctgcattctccatgctgcgagggctggatcctgagtatggatggagattcacgtcctagaggagcttccgagcgctatggtgcatggtgtttccgtgaacctgaggggccgtcttggggtgttggtgaggatgtggagaaattggaaccctcgtccactgggaatgtaaattggtatagccattgtgggaaacagtgtggaggagacagaaagagaagcaagttcctgttaattcacaagtcactggaacagctttactttattgctcccttatttccctctgttcacaagatgaattagacaagtcttaatatacacgaatgagcaatatttccaacctggttgatatggtttggctgtgt

SEQ ID NO: 467721 - DNA, 569 bp, Homo sapiens
gacctggcactgaaggttaaaagttcatgcattgctgtgaagttggtacattgctcatccaggtcatggggttggaggccagatgtggatgtggggctgcagccctgattagtgctaaagagtgtgcaattggcgtgtctcttatctctgagaagctggagtctgtggttgaaggcccgagggccctcgggcaaaccactggtgtaagtccaagagtccaaaggtcaaagaacttggagtctgatgttcaaggaagcatccagcacaggaaaaagatgaaagctagaagacacagcaagccagtttatccgaccttcttctgcctgctttgttctagccatgctggcagccgattggatggagcacttaatataagatctatcctcttaaactttgaagtgcataatgctgtgttgttaactatagacactgagttgtacaacagacctctagagcttattcatctaacataaccaaaactttatagccattgaacaagtccccaattcccctcacccacagccactagcaatctcttgtattctctgtgctatgagtttgactatttt

SEQ ID NO: 467722 - DNA, 652 bp, Homo sapiens
tccctgaagcccaagggtaatgctctgctctgcgtggcttgtagttatgagctgtcagtgggggctggagcatgggaacacagcaccaggagggggatccgagggcatccgggtggggctgtataagcatggtgccagcatctgctcagcttctggggaggcctcaggaagctttcactcatggcagaaggccatgggggagcagacatgtcacatggtgacagaaggagcaagagagagagaggaggaggtgccaggctcctttaaacaacgaatagaactggaagatagctcagggagaattgatgctttccctgtctggactgtatccctcctgggctgtggttatgcatttgagactgaacagggctggccagtgttgtgtgagcccaggtactggaaagcctctggaattgaaatcaggattgtgtttaattctttatggtcctgtgcctgtcagcagctggtttcatttatcttcaatgagagtctacattcctcaaccatccacttatgcccagttgactgtaagaccaagggacccatctcagacgtgaatctctgaaagcagacttgtattttatgtagttctagcttgtgcagtggttcagtagaaggagctttcttgtcctatgtttgctgcatattgtgc

SEQ ID NO: 467723 - DNA, 968 bp, Homo sapiens
ctggggaagtggggaagaacttccatgctcagaaccgtccctggccactcccgagcaccctcagccttcacctgcctcttgaccctggcgtctctgggagctgaggcagcaccctggacccccgagctgggggtcggcagcgccgtgaccccatctgccccatttaccatgggctgcaagatggggctcctcctggggtcctccacgtgtgtttctggggacagcacatcaccggaggccaggacaggctggggaggcaccagtagccccagcacccttgctgcaggcagggcaaccgctgagactccaggggctgcaccactgccctgtggccgggcccctcccctccttctccaggtccctccaaaagtgctggggatgggcacgggggaagtgacaggactcctggctctcccttcagtggctgaggacccccagtgcccacaggttcagagagggaggtctggcgggcgctgcggggcagccccgacctggcacctaggagaggagccccttccgcgtttcgacgctcccacccacagcacagagagacccgccccagcgctggacattggggtgtgcgggcacctggtccaaacccgttattctaaatttgacaagagaacaggggccactggcctgcttttcactggtgagctgtgtttcctggacccattattgatgctggggtctaatgacattttctaaactcttacagcttgtattaaaatatcgaaacctgagtcccttgatattgaggaaagtggtcagttagtcaagccatagagttggacagtagatgcttgcccgtcatcaccaagattgttcattgattttgaagcaatacttcaggattgacaaatgatagcagcctgaaatactgtgtgcgcctgtgagtataatgaacattcggtgagtgtgtcaatggtaacatctcctccctacaaaagatcatagtttctcaggtg

SEQ ID NO: 467724 - DNA, 2042 bp, Homo sapiens
agggggtccaggctcagggggctccacacctgcacctccatctcatctgctcctctacctgctccaccctcaatccaccagaaccatgggctgctgtggctgctctggaggctgtggctccggctgtgggggctgtggctccggctgtgggggctgtggctctggctgtgggggctgtggttccggctgtgggggctgtggctccggctgtgggggctgtggctccagctgctgtgtgcccatctgctgctgcaaacctgtgtgctgctgtgtgccagcctgttcctgctccagctgtggctcctgtgggggctccaaggggggctatggctcttgtgggggttccaaggggggctgtgtctcctgtgggggttccaaggggggctgtggctcctgtgggggctccaaggggggctgtggctcctgtgggggttccaaggggggctgtggctcctgtgggggctccaaggggggctgtgtctcctgtgggggttccaaggggggctgtggctcctgtgggggttccaaggggggctgtgtctcctgtggggggtccaaggggggctgtggctcctgtgggggctccaaggggggctgtggctcctgtgggggttccaaggggggctgtggctcctgtgggggctccaaaggaggctgtggctcttgtggctgctcccagtgcagctgctgtaagccctgctgctgctcttcaggctgtgggtcatcctgctgccagtccagctgctgtaagccctgctgctcctcctcaggttgtgggtcatcctgctgccagtccagctgctgcaagccctactgctgccagtccagctgctgtaagccctgctgctcctcctcaggttgtgggtcatcctgctgccagtccagttgctgcaatccctgctgctcccagtctagttgctgtgtccctgtgtgctgccagtgtaagatctgaggctctggactcaggcctcatgtgagtcctgctaatcctgtcttccaaagctgtgacctgtccttcattgttgagccccaaatcattgctcagggtccattccctgctgtagaacgatgccatatctggctgccttttcctaagaagagtccaccctaattaatgtccattgtctctcctaacaaattctctccccaagtcaactgcaattgcagctgaatcacccctcacccactagcctcgcctttgctcatcttttcagaggcctgagctcctgaacccacttgcagtcctgtcttttccagctggagcagctgggcataagcgtcccacctgctacaagaaagttgcaaactaataaaaataccatgccgacaaactgaaacacatatcttgctgatttctctgttgttcggtgtcattactatggctatggctattgttttcttattcttgttatatttcggactcccacaacccaggccatcctgactgacactgggtgaccgaggggctggaaaagaaaacatgccgagaaaggcagtttccacacgaatacacaaaaatctatactgcattaatcagggttctccagagacacagaaccagtgggagattaggtacataggtagattagatagatagatagatgcatacatacatagataatagatacataaatggatagatagatacaaagatagataatagacatatagatacatagatggatatatatagagatacatagatgatagatagatacatagacacatagatacatacataggtagatacatacataaataaatagatgataggtagatagatagctacatagacagatacatagttagatagctacatagatagatacatacttacatagatacacagatagatacatggatacatagatacaaagatagatacatagatggatagatacatatatagatacatagatgatagatacatgcatagataaatagatacatagctacatagttacatagatagatagatagatagatagatagatagatagatagatagatagatacatacatacatacacacagagagagat

SEQ ID NO: 467725 - DNA, 1319 bp, Homo sapiens
gaccctctcacacagacccccttagagttaaccatgggctgctctggctgctctggaggctgtggctccagctgtgggggctgtggctccagctgtgggggctgtggctccggctatgggggctgtggctccggctgctgtgtacctgtctgctgctgcaagcccgtgtgctgctgtgtgccagcctgttcctgctccagctgtggctcctgtgggggctccaagggggtctgtggctcttgtgggggctgcaaggggggctgtggctcctgtggaggctccaaggggggctgtggctccagctgctgtgtgcccgtctgctgctcctccagctgtggctcctgtgggggttccaagggggtctgtggatttcgtgggggctccaaggggggctgcggttcttgtggctgctcccagtgcagctgctataagccctgctgctgctcctcaggctgtgggtcatcctgctgccagtccagctgctgcaagcccagctgctcccagtccagctgctgtaagccctgctgttcccagtccagctgctgtaagccctgctgctgctcctcaggctgtgggtcatcctgctgccagtccagctgctgcaaaccctgctgttcccagtccagctgctgtaagccctgctgctgctcctcaggctgtgggtcatcctgctgccagtccagctgctgcaagccctgctcctcccagtccagctgctgtgtcccaatttgctgccagtgcaagatctgaggctctgcccacaaacctcagtgggtcctacagatccgggctctccaggaatgactgcagctgtgtcctgaattctgaagcacgtctctgaatctgtcctcctctggactaaggcagcctagcgtccagggctcagtactcagccgctcagcctctgaggtcatgagggcttctggcatgctgggtcctgcccatcaaccctcccggaatcccgtcttcctttcctgaccccaccacttcaaccttctcagggcttcaagatcccacatccctgggcccctcctgtgagcctgctggaaacacgctgacactggaatcctccgacctgctgccgcctctccccggtccccgcaacctcctggctcctccccgcttcgtcttcatcctgcctgagctgccaccgctccgattgcttttggagttgacctagaggactcggaattattggagaccccaggatcctctcctgaggaggaggggcgcccagtctcctcttctacctccgacctggccctgtttctttccccagggcttcgccttgtaagtgcctaggctagatcttctaaata

SEQ ID NO: 467726 - DNA, 729 bp, Homo sapiens
agagaagaagcaatgtaggagagctagcagggcctgtgaggagttcatcgggacccaggctgacggggtcacatagtaggggagtggggagggccctgcactggcatttaaatgccccagcccagtactccagtcactgctgtgagacaggtggaccccacggccccaccccgtttcattcggacctccaatgacagtcctgctcccccagcaaccaggggtctgacacacttggtgcccagcgtgctgaccaccagtgaaggagggggctgtctgtgccttagtgcaggggaagctgcctgcatctcccacacctttgggctcttggacctcgccctccagggaactgctgccactgaacctggccctctgtttcttcttctggcccctgctgctggctgggccctggccctgcggcccctggcaccactggccaagtggagttttgttggcaaagctggtgtcttgtggtctcagcctcggggaataacccagcccccacccctgtcaccgcccacacccgccttccgggctgggacccagcccctggcatttcccaaatgtcactgtgactgccgccagccacccctgcccagccttgggccggtaaggtagctgagctggttggcagagcaggcccactgtggacatcgtgttcctgggggatggtagtggagcttagagagctgagagatccgtggacacacacacacacacacacacacaccc

SEQ ID NO: 467727 - DNA, 845 bp, Homo sapiens
gaggaacagcagggcagacctgggcagtcctgcacattacggcctcttgggtcctgtgagctgagcctcagtgtccccatctgagaaacgggcctctccgggctgtctccctgggatctctcatagcactggggctacatagggtccctcctcttactttcttaaaaggctggaaagtttctcagatcctggctgccccctcccctcttctcaccctggaccctcaagagccaagtaaagccaggtatggaaatctgctctcttccaagatggaagagggcacccctctcaccagcaggctgggcccctgggactgcccttgtgtccaccggccctgcgtgggagaggaggggctgcaaggaaccagaggggctgctgcgtgcaagcctgtcccccactccctgcaaggagctgctgctccaaggagtcagaggggctactgcgtgcaagcctgtccccaactccctgcaaggggctgctgctccaaggagtcagaggggctactgggtgcaagcctgtcccccactccctgcaaggggctgctgctcttccaggccagccccagctggacctggggtggaggtgagggttcccacagagactggtctggcacactggctggccccggccccgtctgtgcctacatcctgggtgggaggagggtgcttcctgagcccttcacagggtctgctgcctcgagatgggtctggtgcagccaggagcagctgaggcaggagagaggctccccgtgcttcctggaagtctgtggaagatgccagtgcctctcctgcccctgagaccagttaaatcagttgtccaggcaggggtcaggcacggtgtctttg

SEQ ID NO: 467728 - DNA, 622 bp, Homo sapiens
gcagttcctccagggcagtggctttcaagtgtgggtccttgggaacctgtttgaatgtccattcttaggcctctccacacacctcctgaattggcaatacggtgggggcctagtccaatccctgggccacacagtacgtgtgagaagcactcgactggccttggtgccgaggacgccaagcagcacttctgcaaaaggccacagcaccttttgggaaaagtgaagcaaaggcttctaagaagcaaaggcagacagagcaggcacctggttcattgtcagcacagtcggtgcttgctatggactggccctggtgctgcggacgccaagcagcacttctgcaaaaggccacagcaccttttgggaaaagtgaagcaaaggcccccttctcaaaggaacacctggggtcctggtcaatacgaagcattcactgttcaatccaaccagcataaaaatataaatgggaaagaattcccacaaatttgcattcaaaacttcaagaagcaaaacttacaatccatctgcaggccagtttagaccacgttaacacaatttcaatctttattcccaacaaggaagtcaggatactgtgaggaaggtgaggggctgctgaacaccccacaag

SEQ ID NO: 467729 - DNA, 669 bp, Homo sapiens
cgccgcctggaagctgaggacagagttgtttatgatgagcacccttctagaacatccaccagcgtttgcagcccgctctgggacagctggagaaaatggcctggaggctggtccaggggctctgaagcccctgctcctctccagcttccaaagaacctgcagcatccctggaggctgtggccagccattcccctggctccggggagctaattacatcacaggaaactgcggtggagctgaagtggagggagtatgtttatacccaaatgcaaagatactgcccagcacagacttctgtcccagggggccggagagggatgtcattaaggccagatcagccaccacccctggctctccctgccgggaattccctggacagcaggagacctcctacccggactacactccaggcccagtggcgagacagagacacctgcagggctcccggattgggggcggtgaaaacctgcacggtgcacgccccagcagaccatagtcctcatgccagctggccagcagctgcacagaggctggtgggaagcaacttcctgacacagtcacccctccccagaagtgccctgtgaggccagggagcctcatgtgaggcctcagaccagcagggttggaacagagctaatgacatggcagggaaacatgtggatggttagc

SEQ ID NO: 467730 - DNA, 813 bp, Homo sapiens
ggtgtggagggatccgaatcctctcacggtgggaatggatgatggggccactgctttggagaagagcatggcatttcctcagaaggttagcgtagaaaagcgcaaacacttcactgaactaactcacctgattgaatttcacttcctggtgcaggcgcattgtaccaaccctctctacttcagcctaccaggagggaggaaggccaccgtctttccttctccttccatgtcatcctcagcgtcggtgcttgtgcagtacagagatacagctgaggacagcgcagcttctaaccttgccatccccaaggtgcgcggagccctcagggtgacccagcttgctgacgagcaagcggaggccgagcaggtgagactggctgagtcagacctgctgccggggcagacgcaggacaaggctgcttttttgcccctggacctcaggatccaggtccgggacgccgcgggcaggggctctggaccgcgctactcgacccctcccccaccgcctgggcccttagcagaggattctgttgttatttgtgtggacagcaaggagaagcaatgatgtaaagaaatgccatacttgtttgaggcaaatgccagtctttcatagagaccttgcaattcaatgctaggtcaatggaaacagcagatatgagaaagagaaaggctttgcaaagaaaaataaaaacacacacttctcaaaagatagatgaagagtgatgaaaatgatttaccaaaggaaacagaaattgtcttagtccatttgtgctgttataacaacatcatggcctgggtaatttataaagaacagaa

SEQ ID NO: 467731 - DNA, 664 bp, Homo sapiens
catggctgtggcaacgacagttccatgatggcagtgggggtggcggtgggggtggctgacctaacacaggggagggcaagtggactccatggagagggccctgatacggggaggctctgctggtctccgggagcaggtcaggacctgagcagactctctgggctcctcaggagaccacccagggcacacccagccctgcaagggtctctacgtggtgccgtcagtgccctgcaccccctggtaggctgcccacacctgtacctgctgccccacccagcaaggctgcagagctgcgtggttcatgcccacctccaaggaccccatggggctgaaggagacagcagagctgcccagctgcaaggtgaccctggagagcctcgccaggagctccaggggtccatcaagggcaatgggagcaggaggggtggtggccacttcttgatggaaacagccctcaatgccacagagggaactggaggagcaaagtgactgaacccccagagctggaacgcaggcccccagcccagcctgtgggaggtgcagcctcattcccaggaaagggtgagccagagaggccctgcttctgggcatatcaggaggcagcagcccagataccagtggccagtcatgggctcctcagactggaagtgggaggacttttctc

SEQ ID NO: 467732 - DNA, 2537 bp, Homo sapiens
ttgtgcacagctcttttcagctgtggctgtcagccttgatgcttcctctttgatattgtgacaggatggagcatgactggtttggggtgctcattcctgactgtggagtaggatcatgggctgtgcccactgaagcagcctgcaggaggctcagcggggggatcctggtcacctcatattacccctgctcagaggccaccgtacacataaaaaaaaggagaaacaacagtgtggcctgccctcgccccactccagctgatgatagccctgcactcccagtttctcaggccacaggtcctggcgtctccctgggtgctggcttctctcatttccttcaccccacgcaccagcagttcccgtggtcccagaatctgacccctcacctcctgcccacctgctgcatctctgcagtggcccattctgcactttcctgtccaccagcactgcagcctgtcctcctgttctctgcccgagacaacaggattctcctgagatatgaggagcagacccaggagcaggaccttgcgtggacgtggcaggttctgtggcaggcccaggctcggggagtgacattgacggggaagaggtgctcaggcagaatcctcctgaatgggcgagtggctgtcacctagataggacacgaggggtggggggagcctttccctcatgggggtggcacttgccaaggctaagtgtgaagtccccaggccagaacaggaccctgcagggggtgcagtatggctgggccagggccgcctgccagtgtcttcacctgtaagatggactgataatggaaatggcaccagggcaggctgatgttatgccaggtgggtgtacagaacacctgccagagcccgagttccccaggcagaacttctgccctgtctgccactcgcctgcccccacgctgcccagtgactctcaggaggagaggagctgatgttcctgcacccatgccacagggatggcaacaaagaggcaagacctccctggagctcacggagaggcctggtctttccacctcacagctctgtcctcctgcagaggcccctcttcccactcctgtcccctcctcatgctgcttctcacactggaacaatcttgtccattagttgtcatagcaactgaggcagggcgaagtcatcctctagaaggggccctgtgcaaattatggcattacaccaacttattgccaatctttttaattaaaacattttgctttcaactcggctaatggcagagatcagtaaacagggggagattgaattaccgatattgaagctcccccagctcttaaaaggcttaattactggtgggaccacagagaggcaaggaggggctgccagcgagcaggtgggcctgacccaccagggccgcgtgaaggtgatcaaatggagctccggcattaaaaaattttaaactcttgaaggacagaatgagctactagaattgtggctacagttctgtttccaggaactatgacgtcatgttgctggctgctgaatttctgtttaattaaattgcctatttgacacctggaggcagaactgggtgttcatggtgtggctgactgataagccaggactccacttgccccagagacccagcctcttacccaggaggggagaagtagggggaatgctgcccccacccaggcagttcacatcctcctgacaggagcccagggatcccttcccctcagggtgtctggtagcttcacagcaggaggtgccctcaggtgatccccatttagggaggaaaacaaaggctcccaagagatgagtctcgcccagccagggtcacaaaaggactcgaatccagtccttgccaaggcttcttttcgaatcatgaatttcgctaattacagtcctctccttcctctcttccaggttacctgatgcccaggtaggaactgcagctatttttaaactgagatttcctacaaattaaaattgctttgagtatgtgtgaatacatggatgtgagtgtatatgtagttgagtgtgttgtgtgtataagtgtgtatttgtgagtgtatatgtgtgaatgtatgttgtatgtataagtgtgcatgtgtgtgatgtatgtcatgcgtatatgtgttcatatgtgtgtatattgtatgtgtatatgcatgagtgtataagtgtgtatgtgtacatgagtgtgcaagtgtatgaatgtatgttgtgtgcataaatatgtatgtgtgtgagtgcatgtcatgtgtatatgtgtttttgtgggttgtggtataagtgtatatgtgtgagtatatatgtgtttgtgggtgtgtatgtgtgagtatgaatgtatgtcatgtgtacatgtgtgagcgtgtaagtgtatatgtgagtgtgtatatgtgtgagtgtaagaactgtgtgaggtgtgtgtgggcacgtgtgtatattacatggacatgagcatagatacttctaggctctctgttcctaagggttggggatcagctagggtccctgtaacagagcagaatttgattcctcatgaatgaaattgacattacagaagcacct

SEQ ID NO: 467733 - DNA, 1186 bp, Homo sapiens
gttttgccctctctggaagtgagaagagcccagaggcaggccctcccttaaaagcccagtgccctgaatggaggatactggtgtcctggggtggccagggagaacatctgagattcagatggggctggggccttgcagagcccgggagggctgccaggggctggggctgcacctacctgaaactatgaaaattctagaagataatattggaaaaacccttctggacactggcttaggcaaggatttcatgacaaagaacccaaaagcaaatgcaataaaaacaaagataaatagctgggacttaattaacctaaagagcttttgcatggcaaaaggaacagtcagcagagaaacagacaatgcacagacaatcccactattgggtatctaccagaggaaaataagtcattattcaaaaaagatactttcacacacgtttatagcagcacagttcacaatatcaaaatcgtggaaccaacccaaatgcccatcaatcaatgagtgcataaggaaactctgatacatatattatatatctatatataaaatatatattacatatatctatatattttatatatagatatataatatataactgtatatttatatataaatatttatatatatttcatgtatatataaatatttatacatatttcatatatatttatatagagatatataaataaatatataaatatatttatttatatatacatatataaatatatttatttatatatacataaatatttatttgtatatagatatttatatatctatatataaatatatttcatatatagatacatataaataaatatatatgaaatatatatatatttgtatcattcttatgcctttgcattctcatagcttagctcccacacatcagtgagaacatacgatgtttggttttccattcctgagttacttcacttagaataatagtctccaatctcatccaggtcactgcaaatgctgttaattcattcctttgtatgattgagtagtattccatatatatatatgtgtatatatatatatatatatatatatatatatatacatatatatatagaatactactatatggaatactatatatatatatatatatgcacactactgagtagtattccatatatatgattatatatatatgatggaatactactcagcc

SEQ ID NO: 467734 - DNA, 559 bp, Homo sapiens
atgtgcaccatgctcctcgctgagaacatgaacttcagatttggtgatatgcaatacaatgatcccttcagatgctgggcagtggcgtgagcacagctctcggccaacatatgactgcaggccaaacagctgctactccaggacgctgtggcgctggctgattctgcccaactgtagatgcactaatggctgtgtggaggtcgcccacggaccgctcacccaggacccccaggagctgtggcctgtggtcagagcaggtgctgccacagcaccggagacccaggccctggtgcatccagggatctctgcaggctgcggttgcgaagcctcctggtccatcaaggccttgggctctggttccagaacactaggggttatttcagaaacaagtatggggcacccaaaacatgcagctccattttaatgagcagctgctgtcctttttcagctgctatgggcccactctgtccaggctgcagcctctgggcagcctgaatccagccaccagccgtgagacttgggacagagtcaccctctcaaattctgttttgttctctgc

SEQ ID NO: 467735 - DNA, 1067 bp, Homo sapiens
gaagacccttgcgatgaaaggaggaaggaagatgaagaaggaagactggctaagttctggccgcttcttcgtccgcctctgatatgcgggccatgtatgcaggggttggcgagggggcaggcagcaggtgtgacagagaactggacaggaggagtccgcgccgcatcagggtggccgcggggctgcttctctgcctggagggcgccgtgctgccccttcccggcctaagtccctctgtgattcgcaactcggtttgtagcctggacgtttctcccgcaaccaccccacctccaggaaatgccaaactgcttctcacagtggtttgtactagcacaggctccgccagccgtgggacatgggaaggagggctgaagtcatctgagatgagccaggcccagccaatccactggctgatcactgatgagccagttaagatcagccacatccagcccagagtagcagaagtgccccatcgtcctgtggactcatgagaaataataaaaggttactattttaggcccctaaaataggctcccatcttcagtgggagaaaggaaatttccagctgggtaacttctaagttttgaagtggtttgttacagagcaacatctaactaatacgccagttatctgagagtactccagacccttgaggctctcagtggcattgttttatttattcaagctataatatttattgagtaccttctatgtgtgattccttaagggtactacttgaaaacttcagtcgaattttccctttagttttaatgggaaggtcaaggttatgtttctgttatctctaccaaggtggagtatttcacatacctgcccaggtactcattgcagcaggctaagactttagcagcactttggaagaaccaagatataagcataatggttcatgaaactctctcttttaaattttaaggccatttaaaactatgaatgtactactgagcatagcttaggcattcttcttttggttccaaaatattttgtttttatcttctgttattttactcccaatttactctttgacgcaaaaactattcatcaaagagtgt

SEQ ID NO: 467736 - DNA, 1331 bp, Homo sapiens
tcatcggggtgtggacactgtatgttctgcacagatggaacatttataatactgaccatgaaggtggccacaaaggaggcttcaacaaatagcagagatgataagcaggacatgctctctaatcacaatgcaataatgttagaagtcaatcacaggaagactgccttgagcccagttacatctggaaaacacaataactcacgggcccgaggaaaaacggtaatggaaaatacaaaagatataaaccaagcaatgatagaagcagcatatattgactctcatgggatgcagaaagaggagcctctcccatggtcatggccaccacaggcctacatgggatactgccaggctaccaccaatgttcactttaagcccaagcgcccttcagtcagcttatggtcaatgctgccaggcctgagcagcacagagttcaatgcagggtcccataatcactgcactctccttcctccagtgcacagattttccatgccacaggaccactactggggagtggaggaggggtggcttcagggattcaagactgtgttttctaccttcctcggtgcctctttcagcgataggaagttaaaaccaggtaaagattataaattcctgtagggtgttctagtggcagccctcaatttttgatatgtattattttatcagtgttgagttacaagcagttgcatagtatgaagtcttatgtgtctcactttttgcactcaatattttgtttgtgagatgttacatgtagccataatttatttattctcagatattatacataatctttcataaatgaatatgtcaccatttttccatctctctgtttgtggatatctggcttgtttccaatctttggatattatgaataatgctgctgtgaccatccttgtacacaactcttgaggtacatgtccatacattcatgttgattatgtatctaggaatgaaatctctggggcataggatatgcttatgttaaattctattccatgatgccaactgttttccaaattatttgtacaacatgcactttctccagcagtgtgtgagtacctacttctcctccagtcttgccaatgcttactattgtcagtttttaaagttttagccatttggcagatgtataatggcggctcaaagaggtgtgaatttacattttcctgactactaatgtggttaaacaattttgtatgtgtgtatgaattccctgctgctatggtttgaatgtcccctctaaaactcatgtggaaacttaatccccaatgtggcagtattgagaggtgggggcctttaagaggtgattgcatcatgagggctctgctcct

SEQ ID NO: 467737 - DNA, 1764 bp, Homo sapiens
gtgaatggttcactgccatctaagtaagcaatgacctacgcgttcctgcatgtaacacggcgagcgcgtgtgcacacggctctgggagttctcgtgcagcactcagagctcagcgtgggcgagggcgtcacccttcagggggcgtccatggggccttggagaagggaggctccggggcgccacagcaagtccccacccgaggacccgcagtgcccggccgccgcgagctcgcggggtgtatgcccgccccgaggctccaccgcgcctgtgtgccgggaagcctggctccacaggaccctcaggcactgggcgcgccgtcgctgcagctgccaggagctcctgaggaagtggctcgaggccccggggcggcagagtcgttggacaggtttggacaccggctgtctctttcgggcctcggttttcgcgtctgaaataaaagcgcgcatcctggccctggcgcggtgcctctgccgcggtagaggtttccaccatgagcccagtgcgccttccagactcgagggagagggagtgtgcgtgcgtgtgaacgcgtcacactcttgtgtgaacgcgtcatacgcttgtgaaagacggtgcttgtgcacacgcgtgtgcgtgcgtgtgaacgcgtcagggtacccgaggatgcacacacgcacgtgtgagtgtgcgcgagtgcgtgctcagaggacagctctcagcaggctggggacctccttcctctcacccctgagggttttgggggaccagcccccgtatccgggtgctgtgggatcccctgaggcgagcgcgcaccgctgtgctcgggctccggctttgtggggacccggccttcccggcccagaggagttccacgcagtagccacgaggtggcaccgcagactcgctaccgcggagcgcggcggctcccggctcccagcagcctcgcctagggctgtggccagggcggtcagtctcaggcccaggccgctgctgccaggaaaagcaggaacaatcgccagtcacgcctgctgatgcccctgaagtgcttatgctcccaggcatgggctgaccgcaacgtgcattctctccttttatgtccctactgtttggaaccctgtttttgtttttgttttttgtttttgttttgtaaatctgccgcttaaaatacccagggtggagctaaaagtacagacactgctcaacttacccctggctgcggcccgataaggccgctgagagtggaaaatgactgagtccacctgactaccgaatagcacagcgtgggggcctaccttggcctgctgagaacactgccctgagcctgcggtgggcagaagcatcaacacgaagcctgttttgtagtcaagtgtcggatacctcatgtaatcattgactactgtactgaaagtgaaaaaccgagttgccgtgtgggactcaaacgagggtttctgctgactgtggatggcttttgcatcactataaagttgaaaactgttaagtggaactgcggttaagtcggggctgtgtgcactagagacctgagttctgccgctccatagctgtgtgactttggacacatatttgagcctgagtgtcttctacacaaaatggatttcttagcataacatacacatgtgtacgcgcccgtgagcatacgcgtgtgtgtttgcatgaacacatctgtgtatgcacgagtgtgtgcacatctgtatgtggctgtcccctgggcttcccttgaggtcctggagctatgtgggctccagctctgggaaggtggacccccac

SEQ ID NO: 467738 - DNA, 694 bp, Homo sapiens
gaagacccttgcgatgaaaggtgaaaatctcaagctgaaatagaggcacgaccagaggaaaggctaatgcccatttgtgtgtgtgtgtgtgtgtgtgtgtgtgtgtgtgtgttttactaggaggaaggaagatgaagaaggaagactggctaagttctggccgcttcttcgtccgcctctgatatgcgggccatgtatgcaggggttggcgagggggcaggcagcaggtgtgacagagaactggacaggaggagtccgcgccgcatcagggtggccgcggggctgcttctctgcctggagggcgccgtgctgccccttcccggcctaagtccctctgtgattcgcaactcggtttgtagcctggacgtttctcccgcaaccaccccacctccaggaaatgccaaactgcttctcacagtggtttgtactagcgcaggctccgccagccgtgggcacccttataagcattatagatattaccgactcatgttaatcttcaaagcaatcttagaacacagcgactattctcatactgttttacagatgagggaactgaagcctaaagaagtcaatgaacttgaccaagatcacacaaattgggggtgtaatagagattcaaccatccagctccagagtctgcatttttaaaccaagatagcagtcagctgtgttcaggcatcacctgcactgttta

SEQ ID NO: 467739 - DNA, 662 bp, Homo sapiens
aaagaggatgcaatcatcggggtgtggacactgtatgttctgcacagatggaacatttataatactgaccatgaaggtggccacaaaggaggcttcaacaaatagcagagatgataagcaggacatgctctctaatcacaatgcaataatgttagaagtcaatcacaggaagactgccttgagcccagttacatctggaaaacacaataactcacgggcccgaggaaaaacggtaatggaaaatacaaaagatataaaccaagcaatgatagaagcagcatatattgactctcatgggatgcaggcccgatcccgtggttgctggttctgcgaggagattttgaatccccactagattgtcttaaggttcataggcatttttgggttttctatgtctttttcagacacgttccaagtttggtctcttcaggttactgtctgttttgtcagttattggcagaataatgttgtatagtaatttgtaaaatgtctgttatatttaaagttatgtctccatttgatttattgtgttatatgctgtgccatccctcttttcattttcttggtcaattattctagaggttggtttacttttattagtattttcaaagaatcaccattttaattttgttgaccctttctttttttaatttttaattttc

SEQ ID NO: 467740 - DNA, 1770 bp, Homo sapiens
gtgaatggttcactgccatctaagtaagcaatgacctacgcgttcctgcatgtaacacggcgagcgcgtgtgcacacggctctgggagttctcgtgcagcactcagagctcagcgtgggcgagggcgtcacccttcagggggcgtccatggggccttggagaagggaggctccggggcgccacagcaagtccccacccgaggacccgcagtgcccggccgccgcgagctcgcggggtgtatgcccgccccgaggctccaccgcgcctgtgtgccgggaagcctggctccacaggaccctcaggcactgggcgcgccgtcgctgcagctgccaggagctcctgaggaagtggctcgaggccccggggcggcagagtcgttggacaggtttggacaccggctgtctctttcgggcctcggttttcgcgtctgaaataaaagcgcgcatcctggccctggcgcggtgcctctgccgcggtagaggtttccaccatgagcccagtgcgccttccaggctcgagggagagggagtgtgcgtgcgtgtgaacgcgtcacactcttgtgtgaatgcgtcatacgcttgtgaaagacggtgcttgtgcacacgcgtgtgcgtgcgtgtgaacgcgtcagggtacccgaggatgcacacacgcacgtgtgagtgtgcgcgagtgcgtgctcagaggacagctctcagcaggctggggacctccttcctctcacccctgagggttttgggggaccagcccccgtatccgggtgctgcgggatcccctgaggcgagcgcgcaccgctgtgctcgggctccggctttgtggggacccggccttcccggcccgcaccacgaggagttccacgcagtagccacgaggtggcaccgcagactcgctaccgcggagcgcggcggctcccggctcccagcagcctcgcctagggctgtggccagggcggtcagtctcaggcccaggccgctgctgccaggaaaagcaggaacaatcgccagtcacgcctgctgatgcccctgaagtgcttatgctcccaggcatgggctgaccgcaacgtgcattctctccttttatgtccctactgtttggaaccctgtttttgtttttgttttttgtttttgttttgtaaatctgccgcttaaaatacccagggtggagctaaaagtacagacactgctcaacttacccctggctgcggcccgataaggccgctgagagtggaaaatgactgagtccacctgactaccgaatagcacagcgtgggggcctaccttggcctgctgagaacactgccctgagcctgcggtgggcagaagcatcaacacgaagcctgttttgtagtcaagtgtcggatacctcatgtaatcattgactactgtactgaaagtgaaaaaccgagttgccgtgtgggactcaaacgagggtttctgctgactgtggatggcttttgcatcactataaagttgaaaactgttaagtggaactgcggttaagtcggggctgtgtgcactagagacctgagttctgccgctccatagctgtgtgactttggacacatatttgagcctgagtgtcttctacacaaaatggatttcttagcataacatacacatgtgtacgcgcccgtgagcatacgcgtgtatgtttgcatgaacacatctgtgtatgcacgagtgtgtgcacatctgtatgtggctgtcccctgggcttcccttgaggtcctggagctatgtgggctccagctctgggaaggtggacccccac

SEQ ID NO: 467741 - DNA, 1408 bp, Homo sapiens
agtaggctccatgcagcactgctgcagagggtacaggaagaggccaaaggtcataatgacagcgggagctcaaacaagatcccgcccttcctgtcctccatgtgcctgtggaaatcaaccaaccgagcctctgtgccagactgctgttttcttaagagaacaattttatgacagttacttcaatgaaaatgcaaagaacatcagatgctatttggacctcatgatgcagaatgtggagtgccagatcaccacatactattatgttgggtttgcatatttgatgatgtgtcgctaccaggatgccatccgggtctttgccaacagcctcctctacatccagaggaccaagagcatgttccagaggaccacatacaagtatgagatgattaacaagcagaatgagcagatgcatgcactgctggccattgccctcacggtgtaccccatgagtatcgatgagagcattcacctccagctgcagaagaaacacagggacaagatgctgcgcatgcagaaaggtgacccacaagtctatgaagaacttttcagttacttctgccccaagttcctgtcgcctgtagtgcccaactatgataatgtgcaccccaactaccacaaagagcccttcctgcagcagctgaaggtgttttctgatgaagtacagcagcaggcccagctttcaaccatccacagcttcctcaagctctacaccaccatgcctgtggccaagctggctggcttcctggacctcacagagcaggagttcaggatccagcttcttgtcttcaaacacaagatgaagaacctggtgtggaccagcggcatctcaatcctggatggtgaatttcagtcagcctcagaggttgacttctacattgataaggacatgatccacatcgcggacaccaaggtctccaggcgctatggggatttcttcatccgtcggatccaaaaattggaggagcttaatcgaaccctgaagaagatgggacagagaccctgatgacattcacacacattatttaggaacctgttttgatatattacaggcaggaagtgtttttgctaccgtgaaacctttacctagatcagccatcagcctgtctactcagttaacaagttaaggaccgacgtgtttcaagtggatatcagtaaaggatctttggagccagaaaaaaaaaaaaaagatttgttctcaatgagattacacacagtaataatttttaattctcaaatctgtttctttttaaaacttctgagatttgtatctcagaagttcaacctttactatatttttttacacattatttacagatcacacatcattaccctttgtttcttttctccttcaaaagaaattggttaaatggttgtgaccaaaatgctgatagtgatatagaaagtgaag

SEQ ID NO: 467742 - DNA, 679 bp, Homo sapiens
cagcagcgtgaccttcgctgcaggagaaatacgcgtccagttcgttttcgtcagagttctgctacatcaggcctgccgtatttgctgtacacaaatcagccaacttcccaggcctgggtgcggagggttaaagagagaaaccaccagtcacgtgtatgtgcgatgtgtttcagggatctgagttacgcaaccgcgggagtggagggctgcaggaacatgctggaacgcacctcgggtctcatgttctccgcacctctgacctcggcagcgaggacagcctgggagtccgcgtcccgccccgcgcagcaggcgcgcccggcacccgccccgccgccggcagcgctggaagggcgctctgggccacgtggtcctgcggccgccccgcctgctccgggtgggcctcaggcggcctgcccctggaggatcccgcgttgggcgggctcagtgtggatgagcatttgcgagttggtgaagtgagcccagtgtggaaaaggcctaggacctgtggcatcattctgagtgatgccaagtcttcactgtgggataaagcctacatgtgactgtgctggaactattttctgtaattttgcctcaaattatgcagttttctctttggacatttttacctattctgacagctcctgctttactctttccattctctttcttggaactagct

SEQ ID NO: 467743 - DNA, 916 bp, Homo sapiens
aaatgcactcgaatggaatacaatggattttaatggaattcactctaatggaatggaatggaatggactcaaatgtaatattgtggaatggactcgaatggaatgttatggaatggactcgaattgggtggaatggaatggactcgaagggaatggattgaaattgaatggactcaaaaagaatggaatggaatgcaatggactggactcgaatggaagggaatggaatggattcgaatggttgggaatgcaatgcaatggactcgaatgcaatggaatggaatggattcgaatggttgggaatgcaatgcaatggactcgaatgcaatggaatggagttgactcaaatggaattgaatggaatggacccaaatggaatgcaatggaatggaatggactcgaatggaatggaatgcagtggcatttgcaagaatggaatggaattggatggattggattcaaacggaatagaatggagtggactcaaatgacatgggttggaatggaatggaatggaatggaatggactcaaatggaagagaatagaatggaatggactcgaatggaaaggaatgtaatggaatcgaatggaatggaatgtaatggaatcaaattgaacagaattgaatggaatggactggaatggaatgaaatggaatggaatcgaatggaatgtaatttactcgaatggaatggaatggactcaaatggaatagaatggaatggaatggaaatcgactcgaacggaattgacttgagtggaatggaatggaatggacttgaatggaatggaaatgactcgagtggaatggaatggaatggacccgaatggaatggaatagaatggactcgaattgaatggaatggaatggacacgaatggaatggaatggacctgaatggaatggaatggactc

SEQ ID NO: 467744 - DNA, 1665 bp, Homo sapiens
tggaacggacaataatggaatggaatggaatggaatggaatggaatggaatggattcaaatggaaaagaattcaacaaaccctaatggagtggaatgcaaagaatggtttcaaatgtaatggaattgaatggactcgaatggaatggaatggaattgaatggtctcgaaaggaatggaatgaaatgcaacggaatggactccaaaggattggcatggtgttgactagaatggaattgaatggaatggaccggaatggaatggattggaatggaatggactcgaatggaatggaatgctacggatttgacttgaatggaatgcaatggaatggattccaaaggaatgtaatggaagggaatggaacggaatggactcgaatggaatggaatgggatagaatggaatggaatggaatggaatggaatggcatggattcgaatggaatgtaatggaatggaatacaaaggactcaatggaatgcaaaggaatgttctcgaatgtaatggtatggaatggactcgaatggaatggaatggaattgaatggtatcgaaaggaatgcaatgaaatgcaatggaatggactccaaaggattggaattaactcgaatggaattgaatggaatggaccagaatggaatggaatggactcgaatggactggaatactatggactagagtggaatggaatggaatggattcgaatggaaagtaatggaatagaatggaaagcaatggactcgaatggaatggaatggaatggaatggaacgaaatggaatggaatggaatggactagatggaatgaaatggaatggaatagaaaggactcaagtggaatggaatggaaaggaatggactcaaatggaatggaaaggaatggaatggaatggaaaagaatggaatggaatggacacgaatggaatggatttgaatggaatggaatggaatggaatgaaatggaatggaatggacacgaatgggatggaatggaatggattggaatggaatggaatggactctagaatggactcaattggatttgaaaggaaaggagtcaaatggaaaggaatggaattgtatgtacttgaatggaaaggaatggatttgaatgtacttgaatggaatggaatggacttggatggaaaggaatggactcgaatggaatggaatggactcgaatggaatggaatggaatggactcgaatgcaactgaatgcaaaggacttgagtggaatggaatggaatgcaatggacttgaatggaaaggaatggaatggaaaggagtggacacgaatggaaaggaatgcaatggaatggtgtcgaattgaatggaatttaatggaatacaatggaatggaatggaatggactcaaatggaatgcaatggattggaaaggacacgaatggattggaaagaatgatctccattggtatagaattgaatggactcgaatggaatggaatttaatggactcgaatggaatggaatgcaatggaatggattcgaatggaatggaatgaaagtacatggactcgaatggaatggaaagggatggactcgaatggaaatgagtagaatgaaatcgactagaatggaatggaatggaatggactcgaatgcaatggaatggacacgaatgaaatggaatggaatggaacgtactc

SEQ ID NO: 467745 - DNA, 1605 bp, Homo sapiens
tccattccccaggagggtccttctgatgcttgtcgactcagcacttgatggggcgttgggactccgcagcagcagcgcagggtgcctgtgtccctgtgcaccgtgtctgcgctcacggacaggaaaggtggccggagacaggggttgtgcaccctttcaaacactgcttttacttttacccacatcaaaatagcatggagccatgcagcaggctgttcataggtggaatgtgtctgctccacagcacaccaatcacagacagttctcaggccacagcccccaaggagcctcccagtgctgggtctcttctcctgcccccagtaaactatggtgagaatattaagcctgaagatctccccagatctgtttccatacctggtgcactgagagcagaatcaaggagttacagtggcctgggactcaagttctcttttaccatcaggaaagagagagcggtgaatccagcatttgccatctcgtgggagctcactgactatcacgagaactgtatggcggaaacttcccctgtgattcagttatctctgcctgatcccacccttgacaaatggagattattacgattcaagatccaggtgcactgcccttgtaggcaggactcaaggctgtttgtgactagcaatgtgctcgtgggctcagcgaaagtcaatattgctcacttggagactcagaaaaccagcccagaaatgaagagcccttgacgccgaggcaggcctgctcttgacggcatgcgccctgatcctggctatgtaattggaagatacttcattttctgtggctatcagatgcttttgtgaagcctcttccccgtctgcctctcagaactctgctttttactgcactatatgtggcgacaaatactgatggacagagattgtggaagcctcaggattcttcttggcagaatgtttaggagcccccaccttcctcccgctcatcctgtggttgagttgaacatgcctgacgctaaagacctggagcgggctgtgccctgaggctaacttcctgatcatttaaaggtgctcacttggcaacgcacgtgctatcagccctcgaaaactgtcaatacctgatctgcggcaatgccgttctcagctcttaaaaggcttatgtaaggaaattccttcttcagctgaggcctccagggaatacaattttatttgtacaataaggctcagaaaataagcttaacttgaagctgtgctacccagtggctcccaccttggccttgatggacaactgcagttacgagagaaatagcttcaggatgcaggaccaaatggtccctccaccatccttaccgacctgggctttctgatttacctggctgcctggtgaaagccttcatcaccaggccttaaatcaacctaacagggggagcctgccgaccctacctcatgcatcttcatttgtcttttgcaaatagaggaaggcagcagagtcgccaccttcttcttccatcttcagcaagtgacttcagaaaccccaaaacaaaactttgtgatggaaattcctcatgtagtttctgggcttgcattgctaacaagaaatatgtttatctgtgctgtctggattgttgactcaggg

SEQ ID NO: 467746 - DNA, 518 bp, Homo sapiens
ttaaagtaatatgaacaatgcacattaatttaaccaaaaatcataatttgaatggaagaatggggtcaagaagtggagctgtttctgggcatctgcaggccacagaggggacagtgcttcatacctcagagcagaaatctgagactctaggattgggcatctgttcctcaaatatccctctgcccctggctgcggaagaccatgcctgcccccgtggatgcgggctcagctggcctcagcatctcatttcccaatcccgtgtcttttctcattatgttcctatccttgaagattgcctccagccatcccaattcgcttccctctgttgtgcagaaggtttcatctctcttggaccttattcctcaacactgctcctagctcccattaggacatccaaagcctatcaaggttgctgagatgatgaggaacccatgggcttgtgcaatgcatgtccagatagcaagctgttctgagctctccaatatttcatgaaccatgagggaatattttcatctcct

SEQ ID NO: 467747 - DNA, 732 bp, Homo sapiens
gatttccctgagcaagacgacgtcatggttcatgccatggccttgatgtgtccttcccgatatggttgtaagtttggaacagaccctcaaggcaacgctggaggtgtctgttccagagttggcagctttggggtgaagctgaagctgccactgtggacaaaagcaccaagtgggaaatgcagacggtgctgtggctcggttttcgttgttgctgttgttgtttttgtgtacaccgtcagcatcaccatcactatcaccaacgacaccactgtcatgttcgctggagagctggggctcacccagtgttctgtggcaggttgccggggaagctgtcagcccatgggagtggtgaaagtttctgtatctgttccctatccttcccagcctctggtttattcagggaccctctgtgataaggaacctggagccaggctggttgcacaagaaactggagtgaggttggctggggcttcaaaaaaaaagggagcagaagctgaggcagccaaggaaaagaagtccaggcagtaaggaccctgaggtggtaaggtctttttaagttccattcttatttctagtcttgttgaattataataaaacagtattgcttgtaatattactattttttagaaaatttacttaatctgtctttgtaagttaacatatgattactctttgtgaattgcatcagtgtgctcaggctgccataactaaatatcacaaactgaggggctt

SEQ ID NO: 467748 - DNA, 1081 bp, Homo sapiens
agctgcctaagcaaagaagagagactggaatactagcatggacttgtcacttaagttctattcacaccgggaggatccagaaaacacacctctcaccacaagtataagaaataaatttgtgaggggagccctggcatctttgcagagctctgtgatcgctcttctctgcaggccagacctcacagcagaaactgcagtcactgagctgggaaactcacacaagggagtaattggatcctgggtggcaggagcactcaaccccaaaaggcagaggctgccggacacgggttctgaactgacattaattccaggagatccaaaaagtcactgtggcccaccagtcagagtaggggctcatggagggcaggtgattgatggagttttagctcagatttgtctcaaaggggacccattgggtcctcaaacccatcctgtgctcgtgtctccagttcaagaatacataattgagactgagacacccaacagctggcagaattcccacagcatgggcttggaaatcactgtgggctttgggtgaccttgggcaaaataagagggttaaatgaagaaacctgaatgcttggatgagaattgcaattaaaggtaagcattattgaagaacagttccttagcttaaaaaaacaaaatgaaagaaagaggctggttatatgacagttgaaaatgcccatgatgtcccagacaaaatgagtgaaaaaatgatcacagttttgaatgaaataagtaaaggaaaagccctaaaagcacctagattgatgtattagtctgttctcatgctgctaataaagatatactcgagactgggtaatttataaagggaagaggtttaatggactcacagttccacgtggctggggaggcctcacaatcatggcagaaggtgaaaggcatgtctcacatggcagcaggcaagacagaatgagagccaagggaaaggggtttccccttataaaaccatcagctctcgagacacttattcactacccgagaacagtatgggggaaactgcccccatgattcaattatctctcactaggtccctcccacaacacctgagaattac

SEQ ID NO: 467749 - DNA, 666 bp, Homo sapiens
agtgaaggcagcatgcaaggaagagcagatctcccctaccctggccatgggagcctgagcaagggctcagggtatcatcaccttggggagaaccgttaccccaggcagagcagccgggttgctctgtatctgagatctgcagactgccttgcacacgtggttctgaaaaaggcagtggagaggaagtggattggaggacacttagacggaaggacagttagaattcgacggctgactgtgttggggataaaggaaaagaaggagtcaggggagaacccacatttggagccagaagagcactcagtgcctcaggaatcattacgagggtcagatgacaggttccagaacattcttcctccaccagctgaactgtcagctcaccaaggatcagttatgtctgctcccaagttggtttatgccaaaacagctggtcagggtaaaatggacttcactggaatgtactgactttcttcaaaaaaattcattaaaaccctggcaaggttgatctgcatcagagacagctatgactaatatgaatcttaaaggggaattttatgccagtaagctgaggagttggagctgaaatttggattggtaaggccaatgacacatgggtcataaagtttgactataatatactgtattagtccattctcacactgctat

SEQ ID NO: 467750 - DNA, 510 bp, Homo sapiens
ggcttttctcaggcttggagcccgaaagccgaggtcatgagatgctgcagcgaggccaagagcatccaatttggggaaactgctcttcagggaagtgtttgggtgtgtttgctttgggagattcctcttaatggaggatttgatgactcgagtagagaagctgcagtagtcaggctgatgctgagcagcgttaaggaggtcaatgtcacacgtctgggagaatccacagggagagccaggggcctgtggccggggaagacctgggatgccagcggggtagctgggaggattcctggaacttcggtgcggttacccggccctggccttcagggcccatcccgctggtactggggtgaggtggaggggacccagtgggtgggaggcagtaggcgctgccagtctcttggtgcctgttcctcggcacaagtaccacaccatgctctgttaaaaggaacttcatagtggaataagtgtgcgggccacaacacattgttcagctttgtgtaattc

SEQ ID NO: 467751 - DNA, 641 bp, Homo sapiens
gtggcacacagcaagaccaacaatatgagcaaaacttcatggcgaccctttggaatccaatcccaggacaacaaggatgaaagaacaacggcagtgagagaagcaaaggaagaggcaaagcaaaagcaaggtgcattcctgagctggtctcacatccatagaagacagctggtgttccgcggcttcaggaaccactgtgtcctggaacagttcaccaggcagcgggtggagatacaaatcatctgtcaccaagtctttggtcacatttgtctgcttgctcctttccatccaagtttgccacagggttcaccacctactccttcatactgggatgtgttacctgggccctctggcagctgctggacagtcatagtcctagccccagccatgattcttcatgtttcctctggttttcaagagaagacactggacgatgctggggatatgggtggggacacagctgatgagatgggttctccattaaggacaggaacaggcctgatatttaatcacaaagtccaggatttagacttcatttgtggaagttaagaaggaggtgtcatgaagtgagctggtcgtgatgtccttatgctttctccaggtttgcacagtagatgctagctgtttgtcaccacctagta

SEQ ID NO: 467752 - DNA, 1100 bp, Homo sapiens
tcacatgcctacgatatgtgaataatgtcaggtcagctaaaaaggggctttgcctttgtaacttttgatgaccatgactccgtcgataagattgtcattcagaaataccatactgtgaatgaccacaactgtgaagttaggaaagccctgtcaaagcaagagatggctagtgcttcatccagccaaagaggtcgaagtggttctggaaactttggtggtggtcgtggaggtggtttcagtgggaatgacaactttggtattggaggaaacttcagtggtcttggtggctttggtggcagtcgtggtggtggtggatatggtggcagtggggatggctgtaatggatttggtaatgatggaagcaattttggaggtggtggaagctacaatgattttggcaattacaacaatgagtcttcaaattttggacccatgaagggaggaaattttggaggcagaagctctggcccctgtggcaatggaggcctatactttgcaaaaccatgaaaccaaggtggctattggcggttccagcagcagcagtagctatggcagtggcagattttaattaggaaacaaagcttagcaggagaggagagccagagaaatgacagggaatctacaggttacgacagatttgtgaactcagccaagcacagtggtggcagggcctagctgctacaaagaagacatgttttagacaaatactcatgtgtatgggcaaaaaactcgaggactgtatttgtgactaactgtataacaggttattttagtttctgttctgtgggaagtgtaaagcattccagctaagggttttaatataggttttttttttgcacccatgctgttgattgctaaatgtaatagtctgatcatgacgctgaataaatgtcttttgttttaatgtgctgtgtaaagttagtttactctgaagctatcttggtaaatttccccaacagtgtgaagttagaattccttcagggtgatgccaagttctatttggaatttatatacaacctgcttgggtggagaagccattgtcttcagaaacctttggtgtagttgaactgatagttactgttgtgacctgaagagagcag

SEQ ID NO: 467753 - DNA, 647 bp, Homo sapiens
agtctatccgtgttatgattatgttattttcaagtcatctcttttcccgaaagtccccacgaaagaaggctaagtggatgcagtttgttgtagaaagaacactcaaagccaggcgaagccttctgttcccaggtgaggggccaaggcgaggatggccgtccgtaatgaggtctgccatgccacgcctgcctggtgagaggaagggtgctcagagggtcctcaacccgtcagctccggaccaggcaagatcccgaggatgctaccggaggtggtactgggctgttggatgtggagaggtcccctcaggtcagccgggaaggcttgggaaggataaccggcagctggcgacctttaactcccttgtcctggccctctctcctctcttccctttcatgctgttgaaagaacagcaaacattcaccgacctaggaaaataagcttatttttaagcacgtttctctaataaaaatgactaattataccataggaaattgccataattttcatatgattcaacttaacacatcatcacactaacaaaaatgctagtcatttgtgtttgattttcagaatcaacatacaaatcaatcacgaaagatgtatttgcagagcaaggcataagtgataaaacttttcaaaatctaaaa

SEQ ID NO: 467754 - DNA, 1527 bp, Homo sapiens
ctgtgtttacccaaggggttggggaatggcacacacaaaactggtgaaaatccagaggtcagagggtggcattaacaccagtgtgccatatggtggtatctatgtgaaatccattgttcctggaagaccagctgccaaggaagggcagatcctacagggtgagagatggggatgggtcctcattgggaactctgtgctccatggtggggacacctggcacctcagcttcctttcccacttctccaggctgcatggaggggtgccgggcagggtcctcctggaagggaacctcctgcagcctcaagcaccaggtcatgacatgacatctatccctttcccaggtgaccgactcctgcaggtggatggagtgattctgtgcggcctcacccacaagcaggctgtgcagtgcctgaagggtcctgggcaggttgcaagactggtcttagagagaagagtccccaggagtacacagcagtgtccttctgctaatgacagcatgggagatgaacgcacggctgtttccttggtaacagccttgcctggcaggccttcgagctgtgtctcggtgacagatggtcctaagtttgaagtcaaactaaaaaagaatgccaatggtttgggattcagtttcgtgcagatggagaaagagagctgcagccatctcaaaagtgatcttgtgaggattaagaggctctttccggggcagccagctgaggagaatggggccattgcagctggtgacattatcctggccgtgaatggaaggtccacggaaggcctcatcttccaggaggtgctgcatttactgagaggggccccacaggaagtcacgctcctcctttgccgaccccctccaggtgcgctgcctgagatggagcaggaatggcagacacctgaactctcagctgacaaagaattcaccagggcaacatgtactgactcatgtaccagccccatcctggatcaagaggacagctggagggacagtgcctccccagatgcaggggaaggcctgggtctcaggccagagtcttcccaaaaggccatcagagaggcacaatggggccaaaacagagagagaccttgggccagttccttgacacattctcctgagtcccaccctcatttatgcaaacttcaccaagaaagggatgaatcaacattggcgacctctttggaaaaggatgtgaggcaaaactgctattcagtttgtgatatcatgagacttggaagataaacacagagaacagccgtcttccgaggcagagactgagggtttctgcatggaggtcctttggacagaagagccctcaggtgaccttggtccaaagagtgtacccaccagctctgccactgggaaagaaacctgtaggctcctgcaaaggtgacctgggatgaagggcctggcccagttgttaagagctcacttcaagaagagcatgcttgtcaattccaagactcattttgaatcatggctgttgcctctcttcagttctggggtttacgtccagcaaagctttgtgcgcg

SEQ ID NO: 467755 - DNA, 1259 bp, Homo sapiens
cagccatggaagctgcttgtggtgtgtctggtccagccaaagccttatagtgagctagcactcatgctggcacctggagctgcctgtcccagctgcagcagctgaagggtctggccaaagtccagttatgaaggtgagctgagatgggctccctcaaaggagccatagtgtggggagccccgggcagagcccagagagaaatgccagccccgagaccgagacacgctccaaggagtgctgccaagagcagtagacacagccgctgaggcccacggggcacagtgaggctgtgggagagggtggcccctctgtggccatttccctgcctgtgctcacatcccctcctcaggcctgtctcaccagctcttgcagcccatgacccacattctgtctgactctccttcctctcctggctacagggatccccagtgcccctcaccattccttctggtctctcctctgcctcccggaactgttccccaggaccctctcctgggccagcccttcctgcccctccacatcagtggttccgaaccccggatgcctttgggatcagctgggtacactttaaatccttccagcccagagccctcaggcccaagtcacccccgccagctcctgtgggaccccttggatcagccaaccattttatcatcatccatcatgtcccctgtcaccaagggcctctggcatgttctgttgtccccatgcccaccctggcacccctcacccaccaacctgtgcccacgtcctgccttgagcctgtttcccctcctgagtggtatttcctcactccaggtgggcactggggcagctggcagacatggctgtgagcttctgtcccatccagagggaccctcccttccagattacccagtcaagcttgaccccatggtgtcaccgagacggaccaaaagagggtattgaagccacgcagtcccccgagccccactgagctgcaccagctttggagccggagagagcctgggagactgagcactgagtgctaggtcccttcttcccactcttgagggagaaatcagtgtgatttcaatcagcagcaaagtttggaatgattgagttggggtgaaaatcagaatcttctgggatgcttttcttcacagaaagatgcctcacatccatcccgattttcctaaaaggcttctcagtgcctagagatagagggaaagtggagatgggaagatacatgtgtttgcagacttgtattttgaaaaaaaccttgcataagtgatctcagc

SEQ ID NO: 467756 - DNA, 508 bp, Homo sapiens
tctgaaaactttcatgcatgccgctatggtctaaaccactcgtggcggcacaagggagcttgtttgttcctctcaccatgcgaagacacagcaaggaggaagcctctatgagaaagcaggccttcaccagacaccaagactgccagcaccttgatcttgcacttctcagcctccaggactgtgagaaacaaagttctgttatttataagctacctggtctaatgcatttccttgtagcagcctgtacggattcggacagtgggctcatgtggatgatgacggtgtctccattcaggactaatggaagagaagggggaaggaaagagccacagagacatgtggccatagaagaagggcccatgggatgcaaggttgctaatggtgagagtggagaagagcccaatgccaaaaaatgcaggcagactccagaatgtggaaaaggcgagaaaaaagatcccctagagcctctagagatgaaggtagcctttccaccacctagattttagcc

SEQ ID NO: 467757 - DNA, 580 bp, Homo sapiens
gaaactcagaatctgcaagtgacacgtgatggaggaagagaggggcaaggaggtgggagctcagggtcttccttgtctgtatggagatcatggggtggaagtgctggaagataattttcaggaaaagacacctgaactctcagctgacaaagaattcaccagggcaacatgtactgactcatgtaccagccccatcctggatcaagaggacagctggagggacagtgcctccccagatgcaggggaaggcctgggtctcaggccagagtcttcccaaaaggccatcagagaggcacaatggggccaaaacagagagagaccttgggccagttccttgacacattctcctgagtcccaccctcatttatgcaaacttcaccaagaaagggatgaatcaacattggcgacctctttggaaaaggatgtgaggcaaaactgctattcagtttgtgatatcatgagacttggaagattaaatggctctcatttggtagccatcctagacgactgtcaaaggtagatccataggaaatgatagtctctgtgaagtgtgaagcagtcgtgtaataccgttggaccc

SEQ ID NO: 467758 - DNA, 905 bp, Homo sapiens
tgtggtatatatatacatataccactcattgattgatgggtatttgggctgggggctactccttgaacaccttcatgtgcagcaatgatgccaaagctaagacctccttgagtcccccggccagtgtctggattgtgcccttcccttctacatcttacttccagcaggtggagagtaagccatactttcacgttgaagattacatcccagcgagtctgatcgagaggatgaccgctctacgggtccaggttgaagtctcagagatgcaccggctcagctctgcactgtggggagaggatgctgagctgaagttcttgaggcaccagcgctcaataaatattgatttgtatgatgataaggatattgatgatgatgatgatgataatgatgatgatgacgatgatgacagggtctctccaaagaatgggataccagatttcagcaatacaacccttctgagagggcttcaaatgcctggagcaagaggtccttgctgtgggtcccagagacacatcaaccttctgatggggactggcgtcttcctggtgaagatgaaggtcactcagcagctcccagaatacggtgtgctggttcaccaagtattctcagagaagaggaggccagaagaggagatggccctggggatctgtgccaagggtgtcatagtctatgaagtgaaaaacaacagcagaattgcaatgttacggtttcagtggagagaaaccgggaagatttctacttatggctacactttccttctgggtaaagttttcttaatttggagactccattaacgttgagagcaaagttggaggtgggagatgggggttgagagtgtagtttaggttgagtggagcctgaaaggttttgaaacttcttcccgtgttttaattttccctttgcac

SEQ ID NO: 467759 - DNA, 777 bp, Homo sapiens
tgatcagccctgcccagcggcatgtgtgaaaccccctcccacagggtcctcagatctgctctggcccctggagtgcataggctgcccctgggtgccaggagtgtcagggaagcagagcccaagggagagctggaatttccgcatgggaaagacgtcagtcagacaggcctcccagctttcctggcccctgctgagcctggcagaaggctcagatttgaggacctctgtgtggtcctgctgaacgggcagcacctggaggtaaaatgtgatgttgaatcaacagtgggagctgtcttcaatgccgtgacatcctttgccaacctcgaggaactcacctactttggcttggcgtatatgaaaaatactgaaggaagcaagaagaattcagggtccaattcagtctacagttacccccatttttactaaagataatcacaataagacaaatttgtttactaagaacatttatatcaaaactatatttataaatataacttaaagatttggcaccacttattattggataatgtttcccatgcattttaacatattgaataaacccaattagtttaacacctcttttacaagtgtagaatagagcattttaattaacagacccaaatatcttttgttcctctacaatgaggagacaaaagtatataagcttaaacttatgttcaacaactaatatttcagcataatatcttatttggaagtggtctattaaatgaatattcatcatttcatttaacttactataactgtaatgttttaagt

SEQ ID NO: 467760 - DNA, 487 bp, Homo sapiens
tctgtggcttcattcttgaagtcatggctgatatggtttggctgtgtccccacccaaatatcatcttgaatcatagctcccacaattcccgtgtgtcatgtgagggacccagtgagaggcttaagttctacataccagagagaaagttggatctacacaaagaaatgaagattccagaaatggttaaaatgaagataaacgtccatttatttaatgctggttacatcattacacatgtcactggatcttctactgtgtggcctgtttccaataactctctccaagacacctggaaggtcatcctagcctctttcaaccactggcatctagattcttgttataggctgaatgtgtccctgccaagttcatatgtcgaaatttatagccccctctgtgatgacattaggaggtgggacattgggaggcgattaggtcataagaggggagccctcatgagtgggattagtgcccttataagaagataagt

SEQ ID NO: 467761 - DNA, 559 bp, Homo sapiens
ctagttaagtaggtggatgataccgtgttgaccaagatggcttgggaatgtacaatcctggcatctgaggaaacagacctggcaagaggcagtgttcacacgaatcatgagattcacaggaatgggaagccgaactcattcccagctccagaagtggatgctgatattttaaaccaatcaccagatgccattcctttgatgatgatgattaatttgtccaggggcagcgaggaaaaggaaacgagatgtccagctgttggccccagtcataagaggaagctgatgctgcggatgaagagtggagcaatggaaataatctggggtccagaaaccaaaatgggagaaggggaaaccatgtggcctcagatgacaaagcaagtaagaaatagagcctgtttagatgcccaggtccctgatgtctgcttcaagtggtttttcgtttccctcagcatcactaaagatttaatgaaagcagattgatcatagctaaatatgcttcctctgtcagaatgaagagcatttggcaatgtaaaaaaatagagttttaagtgatgaaagc

SEQ ID NO: 467762 - DNA, 943 bp, Homo sapiens
ggacatttcaattgtctctctacagcactggccgtccatgtggccaattcaacccactcaatttaacatagttgaagttggtaaagcccctgaagtatatcaaagtagttatattttgcattgtaaaggacccgatggacaacctgcgactattcaaccaattataacttctgtacctataaatttatgtgggagagatttattacaacaatggggagcacaagttctaattgcagaacaattatatagccctcaaagtcgacatatgatgcatgaaatggggcatgtccctggccaaaatcaagagtcgatttggataccatcaagacttctgaaaccttatcataagccagatgccaaggaagaggctctgggagtatcccaaggatcccccagttgcagccatgttgagattgacaaccccaactgtcatgagcaacacccatcgaacacagccacccacctagggacggatcaagaagctgtcacagatggcggaagaaaacctgaggaaagcaggacaaccactcactatgagtaatttaatggtagctatgatagcagtgatcaccattgccatgagtattccttcaataagggctgacacagggaagaattatacttattgggcatatttatcaatcttggctggcaataatgcctagatgtaatcactctatgacacagttacacatgctttctgatctcagtatttaccataataaatttgctcctataattgaggcatacccccctcaaaaacctatttgtaaacaaaattgaacctggcaagaaaaaatgaatgtacttgtttaagaagattgcattgcagaacaggtagaggtgctgcacaacaattcctatggaatccttattaattggtcccctaaggggatgtttagcttgaattgcacctctcaggtacatgtgcacattgtgcagg

SEQ ID NO: 467763 - DNA, 675 bp, Homo sapiens
agattaaaaatggtgccacagtctccaaatcaggcctgggaaaatgcctacaactttgtctggtgtccttccctttcagtgtctccaagcttctctccaagttggcgccaaggctttggaggaacaaagtgctctcccttagcctggttgcatggatccccagtggaaagaaggccacactacaaggcagtttgtgatcaacattatgggaatgacccagctaagagttatcggagttctctaaagaaagaaatccctggttcctgtgggaaatacgggatgagaaaattccttggaggagaaattggattcactgtttctaaaaagaaaataggtgtagtaacccagtcctctggaaaagttcagctacatccagcatcccatgttttggactcaacacaagaagatgaaaaggccattcatgtggatttctatcagctcagatatttgcaggcacaatgaatttccagagcacatcatgtttaaggggaagcttaaaataattgcaccaaaagcattgtccaagggagctccttttcttgtagccagttccgaaaaaatgtttttcttttttgcttaagttctattctgtttaagaatcttttctctaccattaaatttagccaaattgtacccttttgtctgtgagtctttgatgttaatagcaaagaagag

SEQ ID NO: 467764 - DNA, 2951 bp, Homo sapiens
cccgggcttccagctcagcccgccccgggccaggtgatcggccgccacatcccctgcgactgaagcacctgctccgccatgaacttgccaagagctgagcgccttcgctccacaccgcagcgcagcctccgggactccgatggggaagacggtaaaatcgatgtcctgggagaggaggaagatgaagacgaggtggaagacgaggaggaggaggcgagccagcagttcctagagcagtcgctccagccggggctgcaggtggcccggtggggcggggttgcgcttccccgagagcacatcgagggcggcggcggcccgagcgacccctcagagtttggcaccgagttcagggcaccgccaaggtctgcggcggcctctgaagatgcccggcagccggcaaagcccccctactcgtacatcgcgctcatcaccatggccatcctgcaaagcccgcacaagcgcctcacgctcagcggcatctgcgccttcattagtggccgcttcccctactaccgccgcaagttccccgcctggcagaacagcatccgccacaacctctcgctgaacgactgcttcgtcaagatcccccgcgagccgggccgcccaggcaagggcaactactggagcctggaccccgcctcccaggacatgttcgacaatggcagctttctccggcgtaggaagcgtttccagcgccaccaactgaccccgggagcccacctgccccaccccttccctctacctgctgcacacgccgccctgcacaacccccgcccaggccctctgcttggggcccctgccccgccgcagccagtcccgggggcctaccccaacaccgcccccgggagacgcccttacgctctgctgcacccgcatcctcctcgctacctactgctctcggcccccgcctatgccggggcaccgaagaaagcagaaggcgcggacctggcgaccccggcacccttccccattgagagtatcatgcaaggggtcaggggagcgggtacaggggctgcgcagagtttgtcccgaccggcgtggagctactgccacatgctccagcgaccgtcaagcctgtcgacaattttgcagcaacagcagcggcatcaggaggaggtctgcgccaacggctgcgctcccaccaagggcgcggtgctgggcgggcacctgtcggccgcgtcggcgctgctgcggtatcagtcggtggcaaagggctctgggctgacatcgctgccgcccctttggccggagaggggacctcaccagtttttttagtatcgcccacgccaagttccctggccaagtccgcaaggccctcctagagccaggtgggagtggggagcgacccgcagctgctcactccaccttgcgcggcccatactgggcgtgtgcatttgaatcccgctggagagcaaacacgaacttctgttccctgcaaaatggttagaaaaaaacagctggattacgttcctctaacaaccacctgaacgtaaccttcgcagggcgtcaagtcatcttctctcgccttcggttgtggcttctgtggctttccggatttgcacatttcctggggtactatgaacgtgagtggggtattttgttctggcattaaaagaaaatcaagcaagcaaacaaaaatcacagcctccgatgccaaacatgttcccccttcttcacttccttggaactggaagtattattcctaagtctagtgcaaaatgcttctactctctgtgtcttcctgatagggatgtttaatgtaagtaggatattaatttcagaacattgatttcttatctgtgtgcctgacgtgccatctttaatgttaaaattaaggtgttaaaattaagcctagttatatagacgaaataaaatgctaagtcactacactacatcgtttattttctattacgtctcattcttccctttctaaatggaactttttaaaacctacattattttccctcaatttattttcacaattcatatttattatagatagcagaagtaatccattttaatatggcctttaaaaattccaaatatttgaggttgaaaatgtcctggcttttaaaataggaaatttactatttatgagacttctaaaagaatgaataggagggcatgtaaatatattctccatttatttttcattaccccccaacaagctggaaaaccatttgagatcaatttggaatgtagtggccaacatgtactcagggaaaataaaaggctataaatatacatatatatatatatactacattctttaagcactagaattttcaaaacttatttcctaaaaaaaaaactctgaaaagacttggccactacaaaggtttaagtgttactcggcgtcaggggacggagtggggggaaaccagacaagaacgcccatcatgaattgctccccacaaagaaaacaaatttctaggaacttggccgttttcccctgtcccgagtggggttcccgattccgtgccgctttgagggaagctgctctgtgaatgtgagaaagtttttcccccagcccccatctactccccacccccagctatgaatttcttatttcaggagggaggacaaacatggagacacacatttttacaggagtctaattggccgatttttctccggcttctcttctccatcccgtctcttggaatttcttggcatgccctacctgagatcccctacgggagatttcctcttggctcctgcggttctgaggacgttctgaaaagttcccaagccccatctttggtagctgcccagaccccagcttccaattcttccctcttctttgcacaggcagccgtcagccccatagccccaccggcgtccagaagagaccacttttagcaaatccggcagggctggggcagtctaagagttcggaaacaactgagaatagaggggtcctatgtcatgccagcttctcgctggtttac

SEQ ID NO: 467765 - DNA, 2142 bp, Homo sapiens
ttaccctgccctcccagcccagccgcacgggccttgcacacatgcctcggcatattcctgccttagggctggtgctcctgctatttcctcttcccaggtcgtgctccccatgcccttccctgccagaatgctctcgagtgagggagaaggggaggacgtcaccgtacagttacagggacattgcctatggccctccctcgggagtgtgctgtgacaggaaccacctgtcctgcatcactgctgacacaggattggacatcactgcctccgaggatggaggagagatatgtaagatcttgttgcaattcctcagtggggtccacctcatcatgaatgaaaatgccaccttgtcccacaaccatgacacctgttgccagaggggaagagcgacctgtgaacacaggccctgttcctgccaggctgtgtgggagcaagcaggggactcaggagagtgagcaaatagaatctattctaggagattccaaaaccacctgagcaatgagtcttctcccaacatgaagaagcttgaatgccttactcatcgcagcagctggcccagccctgccctgcccagcccagtgcctcaggaagagtcagcaagctctgcctgtgcctgtggttttggtcctgtcctggcttgacttgtcctggtggagggcgagacccagaagctccgctcctgggaatgacagctggcgaggaggtactggtctcagcactctgccacagcttaggccgtcagcacgagcagatgccccattagggggcctgagaactgagaacggggactgtaatctgctatttctgtccatttgttgttgacccaggtaaccaggaaatatgggaagcaggcagattctggttgtttccacaggagttgagacttaaccagacaactaactctcctgagtgttccctcttgggtgggcacaccacagttcaccccgtagtctgtggtagactcagcattagacacagtgctggtgcttaagaaaagtttccatgaacaggcagtgtgcttattgagtgccagctgtgtgcaaggtatcgtcccaggtcttagaggctggaaatactgggaaacttgaggccaattccctcctgagtgggagtccctgcttctcgttgaggagcagggaccctctgcactttggggcatgtgagcaggttaacagatgtatgtatccctaaaatatgtatattatgtatagtattgttctttatgtttaacatttacataaatggtatactgtccatgtctttctgcaacttgcattgtttttactcaccagaatctaagaggtgtgaaaaaccatgaagtaaaaaacgattcagaaaacattgctttcagtccatgtaataaatgccttattttaccttgaaatttaaggagaaactcattcttagatgctaaccacacccacccaccccatcctaagtctttgcatcccccaaaactatagctcctccagataatctctcctccatgattccaactctccttggactggccagcctggaggatggtaatgactcaccaatactgctaatgtttgcgtcattgtcccttatttattcccttccaggctcatgactcttgtctttgatatagaaaccctgtctgatgaagcatcatttcagaattttaagtcaacttacaagtgtgctattattcacatctgagcacaaatttaggactactattatttcttgagtactattatttcttgagtatttacaaagatcactattgttgtataagaactggtctcaacattaattggtagcaatacataatccactttatccaataaaaccgtttcagttttcaaaaacaaataaataaatgccttactttaagtgtacaggaagaggcacacgcttaacagaacacttatttctcccaggcttcattaaattaatgctgaataaatatttaaagaatagtaacttgaaggggccccaatgtggccctcattctttgaattgattccctaaacaaatgtgttggtttatgatcaaattcacagaactccagcccatggtaattgactggacagggtggatgcatgacccaagctgggccaatcagattctttttccccagcaaactgggggaactggactccagaggcagccagc

SEQ ID NO: 467766 - DNA, 6616 bp, Homo sapiens
gcagctggagcagccaccctatgattggctgtggcgcttgtgaacccaaagtaaagatggcgggcgggcaggcagccgccgcactgcccacttggaagatggcggcgcgccgcagcctcagcgctcgcggccgggggatcctgcaggcggctgcggggcggctgctgccgctgctcctgctgagctgctgctgcggtgcgggcggctgcgcagcggtgggcgagaatgaggagacggtgatcatcgggctgcgactggaggacacgaacgacgtgtcgttcatggaagggggggcgctgcgggtgagcgaacggacccgggtcaagctgcgggtgtacgggcagaacatcaataacgagacgtggtcccgcatcgccttcaccgagcacgagcggcggcgccacagcccgggggagcgcgggctggggggccccgcgccgccagagccggacagcggcccccagcgatgcggcatccgcacctcagacatcatcatcttgccccacatcattctcaaccgccgcacctcgggcatcatcgagatcgagatcaaaccgctacgcaagatggagaagagcaagtcctattacctgtgcacgtcgctctccacgcccgccctgggcgccggcggctcggggtccacgggtggcgccgtcgggggcaagggtggctcgggggtggccgggctcccgccgcccccgtgggccgagaccacctggatttaccacgacggcgaggacaccaagatgatcgtaggcgaagagaagaagttcctgctgcccttctggctgcaggtgatcttcatttcgctgctgctgtgcctgtcgggcatgttcagcggcctcaacctggggctcatggccctggacccgatggagctgcgcatcgtgcagaactgcggcacggagaaggagaagaattacgccaagcgcatcgagccggtgcgcaggcagggcaactacctgctgtgctcactgctgctgggcaacgtgctggtcaacaccacgctcaccatcctgctcgacgacatcgccggctcgggcctcgtggccgtggtagtctccaccatcggtatcgtcatcttcggagagatcgtgccccaggccatctgctcccggcatggcctggctgtgggggccaacaccatcttcctcaccaagtttttcatgatgatgaccttccccgcttcctacccggtcagcaagctgctggactgcgtcctgggccaggagataggcaccgtctataaccgggaaaaactgctggagatgctccgggtcaccgatccctacaacgacctcgttaaggaggagctgaacatcatccaaggggcgctggagctccgcaccaagacggtggaggacgtgatgaccccactccgggactgcttcatgatcaccggcgaagccatcctggacttcaacaccatgtctgagatcatggagagcggctacacccgcattccagtgtttgaaggggagcgctccaatatcgtggacctgctgtttgtcaaagacttggccttcgtggatcccgatgactgtacccccctgaaaaccatcaccaaattttataaccaccccttgcactttgttttcaatgacaccaagttggacgctatgctggaagaatttaagaaagaccaaccccccaaggcgagttgaccgggatttctccttctccctcttaattgcaaagttgaaagggtggcgtggatttggggatggattgaactagtaagtgctactaggttattttaaagcacaagactgccatcacttactttttcccattatcaaaaagcaggctgtgtaatttctgtgcatgacacttatttatttatttttttttggtcccgtgtgtgggcctctgttcttgaggggtctgccgccttcattgtctgggttctcagtgagtaggtgaaggtaggggctggctgatgccatgccatttggtggactttaatcacaggcatttggaaaacatgtaactagcttttgtaaacccagtgcagtcctttttctcctccttaaacatccacactggcctttcaaagatcgaagtacattttctatagcttctgttcctgcttgcctggcaacttgtggggaagattgaggtctgcctttgagggtaaggggtggggtaaactaagtatcgccaaaaaaaatcacccattttggatgtgacttctcttagctagaaaagagttgttgttgttgttttaaattaaagttattaatatgtaacttggaaagattagaggttagccagccttttgtgaagaggctgtatgtcccgtagccttcttcactatttgtttacatttatctgacaacagttacagttgcccaaaccaagtgtgattttggcagaaagcttgaacctttaacagtgggatgaatccctctattggggcttatttatttcttgactctttcagtttaacgtgttctttttttccaccttgatcatccgatacattaagttgaagtatgtctccgtcaactctcaccgttccaagatgcttatacagtacatcatttatatttgttcgtttgaccatataatgaacaggtaaatagcaacttgtactattattattgaagttctgaatgtttccagtaaatagtgttatttgaaaaccaagggatgctgagtttttgaattattaagatgctagggcatgtgcaggtattgaaatgtgtatgtaacctttcgtgacctgatagtcctcaaaaccaagtttcccttcttcaaatagaattttgatcactggtagtagtctctcctctgaaaaaggtgatatgtacctggtgacagctcactggatgtgatgatctgaacatactcaaagagtgtatggttgtcctaatgccatttttctggttgaatgatgtcctctctagaacaggatcacattgtagtaagttttatgtaaaggaacagggcagaatgtgctttgaagattggtaaatttgcatttaaaagcagaaggaggttcttctggtttcttaaatagtaaaaagaaaatgtccagtatctctaggtgacatagcttcttttgggggtgtcattctttcaccactaagttgttaattagagcatctaacttctttcattttgcagtaatatctgtaatacagaaagatatattgggatgtttggaaatgcccctgaaagtctttctattgctaaatttcccaatattgatacagatgatctattgcatgagttttttattacttagaattttgcacatttactcatgaattgataacactagtttgtacttcttgctgaagtcttttcttcacttctatatctttttaccttgagaatttagtttttcacctcacagctccttaatgccgcccttactcaaaatttcaaaattcgtattattttgaaatttgtgcttgattgaccttgaacaatttttctatgatggatttattttcatgaggagctgtttttccttcagaattaccactcagtatttttttgaaatgtattctttaaatgatggaattactaatatttccctatgaattctagaaaaataataatgcacaagatttaatttttgtctttaactagaatgatgtatttggttaagaagatagtccaagttaaaggcatacattcaagctagtggcatattcggaagagcaggcaaagatagttggttgcaaatgggaaatttaagccatgatcttaaaaggacagaatggatattttcttttgtctcaacactgcctcagagcctgttgggcaatagaaaagaaatgtgtttaaacatatatatggctttaaacccagtgcttctgtggtgttgtgcataacaactggtgtccccttttttgccattaaaacagttttttggcctgtgtgatcctaagtctaaagaattgtgttgacagcatttgcatatccagcatcaagattcattttggaaagttttgtactaacaatgtgctgtactaatgtgcttcttccatgggctgctctacagctgtttttcccatagctaaattatgtaatcatgtttcactattggtttcttatctgtttctgttgcaagggtcacatagtaattggtcaaactcagttttgtgttttaatcttggtttttatttacatttttgaatctatctgtataactggttgctaatgagcatcctttacacaactctgctctctgtattccatgcaaggaacctttctctttttttgtgtgtgttagttttgtagttacttacaagtctaaataagagaataaattcagtaaataccgctagaggattatgagaattttagaaaaactagagcaatgtagtgtaggggaaggaaaagcaaaatgaaaggctgccacctttgtgtgtggaaagcatgttagaggctctccattcacctgacaaaaccgtcctcacaaaagattgggccaccaagttgtctatgctgaggtgcatttgaagaatttgtaaccagttactgtttcattgtttttcttttagctttataacagttgcattccagtattgcagagcatgctatttacagctgctagggacttagccagcctcttttctagctttttcttagtaacagaaacagtgaaaaattggaagtaaatatctaacacttcaaggcaaggagtggaggagaaagagttaagaaaattataaatgtgaactatttccaaccattcagtgataatcttgaaagccacatagcaatatgggaaaatttgcactgattatttgcacggaatatagacatgcaaaaaaatatatatatgtatacactggaaggtaacgtggaaaaaatgaaaatagttgatgtattagggtggggtgatcatagccagtctttgtgaaaatctccttgttaactttgtacatgatatacctggaaaaaattcaaatctgctaagaacattatgaatcctgatcttgtgaaaactaaccattgctcgtattaaggaactcattccatttctcttgaggaacattttactgctgaaacagttggttcttttttaaaattttaaaaattgagatataattcacatatcttaaaactcacccttttaaagtatgtgatttgatgctttttgtcactggcaactaatttactgtctgtatggattagcttattctggacatttcatataacatgtaaatgaaatgtggccttttgtggctggcttctttcatttaacatgttttcaaggttcatccatgttgtagcatgtatcagtatttcattcctttttacggccaaatattcagttttatagatataccacatgttgtttatccactcatcagttgatgggcatttcgattgtttccactttttgcctattaataatgattctatgaacattggtgtgcatgttgcattcttgacaaatcccattctagtctgaagatagttcagtggtctcatagagtaggactgtgatttagtttgggcatgttattggggtgagttctgagcaacttaaaagtgtgtgagtcacaactaccttccttccattggtctgtactgggcttctgcctcagtgcccctgcttggaaaaaaacgcacaaaaaaagtcaagagtactcattaccaactactactgtatggaatccagagccttccagagtttgtagagctcttcatactctggctctagcccttgtttttattttctgtctaaaatggctaatctcataactgcatgtcatatatgtgtataatatatgtatattcatatgtatgtctgtatgtctgtgtgttgtatatatatgtgtttatgtctgtacacattgtctgtagttaacacacctctgctcatgttctcatcctaaagagtacttagttctgttcgtctaaaactctgctcagcctttaatacctagttacaattccattgttttcttgaaatctatgctgacttctgaacttctataccccttatacctaagggatccccacactgaagcagagctccaggctctctcctctctctgcctgcttctgtgcttccctttggcttgttccattctcccttcccttgttgttttctcctaagcattacatgagcttagctagttgctcagaggaggcctttacctacctgcaggctatgttaggtaccctcttctgtgttattgtaagactctatgtatccatgtttatcttttctttttttccctttggggtcatgaaagggcgaaatgaaataatccatgtgaagagctcagcacagtgcctgacgcatgctacgtgcccaggaaaagtagtttttgaaaaacgctgattttctatttgcactttattgaaaacttggtggatgctttgaatactgagaatttcattaccactttttcagttctaatgtgcatactgttgtacactggtacctactgtgcagatcatgactgaaaggtgtttgaaaggacagtattgtgaaatcttttgtcattacgttaatgttattgcaataaaataacaaatttttaactattaaaagtaatgccatctgtttttcttcatctgtgttttcaccacaaagagataaaactactgttgacattttgacatatcttttttcctccagtgc

SEQ ID NO: 467767 - DNA, 695 bp, Homo sapiens
agggcctggaatggcccaagtggagcctaggctaatggaaacctactacgggcaggtgctgaagagatcggcagacctccagaccaacggctgtgtcaccacagccaggccggtccccaagcacatccgggaagccttgcaaaatgtacacgaagaagtagccctaagatattatggctgtggtctggtgatccctgagcatctagaaaactgctggattttggatctgggtagtggaagtggcagagattgctatgtacttagccagctggttggtgaaaaaggacacgtgactggaatagacatgaccaaaggccaggttaatctggaattaacgtcattcataataactctttttgctgttagcaactacacacaacaaatcacatagattattcttcaaatattttttgtttaatcatacaagtacagaaatcacgttcaatgctgagcacaagcaaatttgacaactgaatataaaatctgcaagtggaaaagacagtggaacttaaccagacataaggaaatacagctccttatacttcaactaaacccaaatttcaaccagcataaaattccaagagaaggaaaggctttctggcaaaaatcttggttaagatgaagactcagctgtgacaaagaccctattttttttttcccctgaagaactgtttagtcctgaccatttttacctg

SEQ ID NO: 467768 - DNA, 1145 bp, Homo sapiens
agtgtggactccaatcattggaaagactgggaagatggttcagatgaagccatgtctgattttgattatttctctgagatgatgaaccacatgggtggtgaagaggatgtagatttagcagatggagcagatgatcattcacaagacagtgatgatgaaaaaatgccagatctggagaaagaattccagggcaagctggtggtggtagccagcaagcagcagcgcacagagcagaagagctggaggcccagagtgcgcaaccgttcgctaactgaaatgatggcgactggaacgccagagtctcaagcgcggttcggtcagtccgtgaaggggcttctcacggagaaggtgaccacctgtggtactgacgtaatcgcgctcaccaagcaggtgctgaaaggctcccggagctccgagctgctaggtcaggcagctcgaaacatggtactccaggaagatgccatcttgcactcagaagatagtttaaggaagatggcaataataacaacacatcttcaataccagcaagaagctattcagaagaatgttgaacagtcatcggatctacaggaccagttgaatcatctgttgaaatagaatgacattaactcagaggagatacgtgttttatttgtgatagcaaattcctaaatgaacattaggcaagtggtatcattatcaggccagctgcagcctcttgccttgacctgcattcctagaatttctttgttgctgtaattcttgattaagtgaccttgactttcattttgtaattttgctaatcatcagcaaattcacttgcatgacgttactgccaaatatgaaggcagttgaattattatgagtgattgtggcagaggtttgtgccatggtgaaaactttgatgtttgtctgtgttcattggatccatctttttaaatgacattaccatgagtctgttgtcaaacctaaatatctttgtttgaatttaaaatgggactctatattgttgtagttcaggtcttcattgactaagagattgagagaaatctgacataagaaaatattgttttcactgcaggaataaagaggaagtaacagtgaatccaatatagttcatattgttattgtccaatcatcaagttaactaagcattatcagattac

SEQ ID NO: 467769 - DNA, 1823 bp, Homo sapiens
atcgctgccaaaaccacatgggctggagggccagggctgcatggacagtcacaccactgcacaccagcctgagttgccacagctcttctactccactgctgtctatcttgcctgccggcacccagccaccatgtgggagctcgtggctctcttgctgcttaccctagcttatttgttttggcccaagagaaggtgccctggtgccaagtaccccaagagcctcctgtccctgcccctggtgggcagcctgccattcctccccagacacggccatatgcataacaacttcttcaagctgcagaaaaaatatggccccatctattcggttcgtatgggcaccaagactacagtgattgtcggccaccaccagctggccaaggaggtgcttattaagaagggcaaggacttctctgggcggcctcaaatggcaactctagacatcgcgtccaacaaccgtaagggtatcgccttcgctgactctggcgcacactggcagctgcatcgaaggctggcgatggccacctttgccctgttcaaggatggcgatcagaagctggagaagatcagtgagtgccaggctggcccctggggctggggctggatcccacaggagctgctggagggagaggagggttgggcaggggaaatcagtacattgtgtgatatgctggccacccacaacggacagtccatagacatctcctttcctgtcttcgtggcggtaaccaatgtcatctccttgatctgcttcaatacctcctacaagaatggggaccctgagttgaatgtcatacagaattacaatgaaggcatcatagacaacctgagcaaagacagcctggtggacctagtcccctggttgaaggagaaattccggagtgactctatcaccaacatgctggacacactgatgcaagccaagatgaactcagataatggcaatgctggcccagatcaagactcagagctgctttcagataaccacattctcaccaccataggggacatctttggggctggcgtggagaccaccacctctgtggttaaatggaccctggccttcctgctgcacaatcctcaggtgaagaagaagctctacgaggagattgaccagaatgtgggtttcagccgcacaccaactatcagtgaccgtaaccgtctcctcctgctggaggccaccatccgagaggtgcttcgcctcaggcccgtggcccctatgctcatcccccacaaggccaacgttgactccagcatcggtgagtttgctgtggacaagggcacagaagttatcatcaatctgtgggcgctgcatcacaatgagaaggagtggcaccagccggatcagttcatgcctgagcgtttcttgaatccagcggggacccagctcatctcaccgtcagtaagctatttgcccttcggagcaggacctcgctcctgtataggtgagatcctggcccgccaggagctcttcctcatcatggcctggctgctgcagaggttcgacctggaggtgccagatgatgggcagctgccctccctggaaggcatccccaaggtggtctttctgatcgactctttcaaagtgaagatcaaggtgcgccaggcctggagggaagcccaggctgagggtagcacctaaaggctgtaactcacagcccctgtccaccctatgtggccccacaacacagatttagagatacaaccccccacccttctccgccattcttccctactcccaacccactctgccttctttttcagcttgtggcaatgccagtgatgtgcataaacagtttttttttttccataaggtccctgagtag

SEQ ID NO: 467770 - DNA, 651 bp, Homo sapiens
aacaaagaccttgctgacatgttgtggttctaaggcccagggtcagtgcatgggtatcaggtcagttgagggtgatgggtccaaccactctcctcacctccacagggagaagacttcgatggccaatctttcccaaggaggcttggctgataaagagcagaagcaaaagggtagcagtcaactcaaggaagacttcctggtgagggagttggtaagctctgaggcgggtctggaaggatgccttggatttgcagatgctgggatgcaagagaagagagagtggctatggcccactggaactggggagttcactgagatactgaccagcagggaattacccagtggaaattggcaaaactctggagggttggtgccagtggttttcctgaacactgctggcagcccttcccatgggtgcaagaaagtccttcaagatctaagatccaagctccttccagtctgccactccactctccctcagttgaggtccttgtcctcatggtcaagacggtatgcagagctcaaatcatcacgggcatggtttggatatggaaggggtggaaaagtaaaagagacaaagaatgtgtgagaaccagcttcttgggagctgccatttgtcacttgtgcttcatctcattggacagaacttag

SEQ ID NO: 467771 - DNA, 4044 bp, Homo sapiens
ggtggcagtaattataggaggactcagactccttgaattctcccaactcattggcctctccctgggctacactgatgctaagagtggccagaagagggcgatgataaggacaacctgggggaaaagggtctgccaagatctcttcctggttgaaagcaaccagaagctggaggaaacccgaggggaaactggaggatgccgtccacagaagcacgcttcctggacacagagcagagtggagagggtgaagaataagtgtacaaagtataaccataaattcacccacttatgtgtttccttcccagctgtcttttggggagacattgccttagatgaagatgacttgaagctgtttcacattgacaaagccagagactggaccaagcagacagtgggggcaacaggacacagcacagcccgagaggaaatgatattgctgcaactggatgaatacccagagggccaggagctggcagcgaacacccggcagctgcagggagtgtgtgggcttgaagagcaggcatctgagagcagcccagacaccacagccatggacactggcaccaaggaagctggaaaggaagcactgaagtctgtggacgtgagcggggctggcgtgctgctggcgaaagggatggaagggcggcatttggtggtcaggaacagcatagctctcagataaactctgctctcttggctggacttttctgccttgtgcatggatccagtagggagaactcattatcagtgtttttaacaagtaagctgtggcttattgatatttaatttgtactcctctgactgctggtgccgttgaacattttttcctatgtttgtcagtgggaatcgcctcttcctgtcctgtgcccattttcctattgggttgctgatcttcctcttcaatctgacttcttttagagagaggcagatcctttagtcacccatgtaactaatctgcatttgtttcttagctatacagcttgttgtttgggctatgtgcagggcttgctttcagatccgcgtttttctgctttgcttatttaaggatattttgacttataagtttttgggctccccagacatctggtactcaatggtccttcactttgccacaaatgatcagcacttagtggtaaaaatggagcatgtgtgaatgaatccagcagagtttgtcatcacactgcagtgacaaagatgccacactcatttttcttccttatttatgtgatttattgttgcataaagaccacacccaaacttagtgacttcaaacaatagtttgttattttcatgattctgggggttgactgggttcagtagggtggttctttggctgatgccatctggggtcactcacttgactgaatttatctagcaggtggactgggctggaaggtccaaaaaaactttagctacacctccagtgccccagtgtgcctccttgtggccctgctctccatgcagactgtcaccattcagttgtctaatcagaaacttttcatagcatggtgattggcttcccagagggaaggaacagaagttgccagtccatttaaggcctggactcaaaacttcaagaatgctacttctgctacgttctgttaacaaaataagccaaacgaccagaccagattcaaggagagagaaatagattctactccttcacgagagaagtggcatgacctcacagggataaggggacttggcggccatatttggagactatctaccaccttccccccttgcctctgctccccagcaatagatattgtcagagtttttgatatttactagttcgttgggtgtaaaatgacccaactataaacttggacagtcagacacacttgggtttgaatcccagctcacccacttagtagctatgactttggataagttatttaactgcttgtatgaggtttagagggaattagaaataatatttatgtaaagcacatagccaggtgtctggaacttaaaagaggctcaaggaatgtagctcttccacctccacctccaggaattatattatccagcattgaaagtgcatcatctacctctggactgggattccacagctgtgcaacagctgcatagaaacacaattacagaggacaggaaggaagacggcggctgtggcccattaaaattctgcctctggtggggttgtgcacagcacccacactgcaacaaaaaatcttgggcttttcagggagggtgatgatagcagtgccctagtctgcagttcccccaaatggccctggtttgttcgaagcggataaggaatgtgcaggctaggccagtcccttcactctgcattacagcagcagacaagcatgtctttaagcatccagggcagtcctgaagaggaaggaaatctcgaagtgaggtgagggcaggccgttctaaccagtccctccatccttcccatcccaaccctcaggatgctgtcggcgccagcgctggatgcctcttgcttttatttgaatgaaagataagacacgttgtgtcaatctcaggttccctttaatcacaacttgccccccttccaccacccccaggaaaagagaccgcccaggcaggagaaaggatctgagggaagcgcccagtttcggcagcaggtttatttcctggcattatgtggctcccctcagccctgacggtggggatttgtgcctccagctttggggagggggaaagggctgaaatgctcactcaacatcccctccggcagaccctttggtcagaaggctctccctcctctggagatgagagctcagcatgcatttcagggctgataatgggattaatgaaatggagtgtgcaactgctccatgaatgaagctgtgactgttttgatagagcctgatttccagaaccatattcatgaaagagaatggacctttcactttcagtaacatttcctaggggctttgtgtgaaagcaaataataatggaatctggttgaaccagaggacaggcatcccacaaacttgggtgcaaaacagcactcgacgctggaattcctaacatcacttacgtcagtttacttgggtgtaacaactgagccccacgaacttcaggccttcctttttagcctgtctcaaatgcagactttcgtagccattgtggcagctcacactgagcccttactcaccgcaggcatttgacattcattacctgggtcaccaccgccctgcagcaggaagtgaggctccgaaggggaagtgatttgtccaaagccatgtaggtagcaaatggcagcatttatcttgagcttaagtccccctgaccccaaaccccttgatcttaacctttgggctgtatcagtggttcccaaacttcactgagctttgtaatcacctggggagctttagaaactgcaggtgccttgactccactctaaggccaattgattctcagtctcagagcagggaggcagacaccagaattttttaaaagctccccagttgaatctaatgtgcagccaggtttgagaaccactgtgcagaatggtctagtctcccctttacttagcggccttcagcctttcgagattgctgcaggtgaggtgcaaattcacccatcacctttggggtgagggttatgcagatggctgggctgtcagcgtgtttacttcccgtgtgggaatgaccaattgcctaatctaaaaattgcacttcctcactggagaaggctgcctcaggcctggttctgtttatgacatggctgtgccttcagctggaaatagaagattgaaaagcaacaaccgctttgctctttcagagaggacagggctcgctcccagagccagagaatttaaatgggctttatcccccctcaaccctacccccagcgtgttaaatcctgtcagacgccctgagctcctcttcaaatgcaggactcttggccataataaataattacatccttctatttggactccgattccagatagtagtaatccaagaaaatccaataatgacagttgcattaagatccttcttccaggctaagcagaacatctgtttagacatatttttaatc

SEQ ID NO: 467772 - DNA, 1640 bp, Homo sapiens
gtgactcttctccttttcattaaaaatggcccagcagggactccagcaccttgcaggtggaggggtagagtatggtatggactttatgtcagagagagaccgtatcttttgttggcttttcaagaagattcataaccacaaaaagctcaagaaccatttttggagggaatttctgcattgggtcattgggtgggaagtgcctgacttggttttcaaagggcttaacacagtgttgtgtcacaggtcaggagtataatttcttaaaaatggaagctggggaagtgagctctctgggagagacatacgactttgacagcatcatgcactacgcccggaacaccttctcaagaggagttttcttagacaccatccttccccgtcaagatgacaatggcgtcaggccaaccattggccagcgcgtgcggctcagtcagggagacatagctcaagcccggaagctgtacaaatgcccaggtcctacttgtgcttttgttagccagaaaacatcaatctgcttgctacacttctcaccaacctgttccgagggctttggctggcaaagggcgtgtggggagaccctgcaggacacaacgggaaacttttctgcacctggtttcccaaatgggtacccatcttactcccactgcgtctggaggatctcggtcaccccaggggaaaagggtggtatgttttcaaccctactgcagggcacgtactgttatatccattatctggataaggaatttgaggcttgaacattaaggaaagtgccaaaagtcaaggtctaggttaggggatacccccagtgtccccagagctctctataattatacctgttatagcatgtctcacggtatagtcactactggtttatttgacccccttctaaatcttaagctcattaagatcgtattaaacttcacatccatggatttgtttaaaagccgactgtgctggtatgattacgtggaggtccgggatggttactggagaaaagccccccttttgggtaagttgactttagacaccgttaagagaggagtgatgggatgttccccgggatgctgttaatgtctggaaggtccaccttgacagcggtcacaggaaactctcaagggcctctgtcattgtaaaactctgagcactccatttggccacacatgttaaaagcttttaaaactgcgaataccctttgacccagcaattccactttttggaattcatcctagggaactaattaaggaagtgtgcaaagctctagctacagggatgttcactgaagcaggaaaaattgcaagcaatttaaatgttcaacagtagggtttggctgaataaattatgatccatctttttaatggaaaacttcccagccattaaaaatgaagttgtagttgactactgatatggaaaggtgttcatggtacactgttacacacaaaaaagtatgtgacaaaaatagaataagcagtaggattccattttgattaaaaaatacatttatgcattttatatatatatatataatgcaggcattgcaaatgtagatggcttcaaggataacatgtaaatgaaggagatgggatttgtgtaataaaataaggagtggtggggggagtgtggtgaactgaacaccaaatatc

SEQ ID NO: 467773 - DNA, 893 bp, Homo sapiens
ggaggccgacagatctcggcggggacacagatccgaagcgcatcaccaactatggtttccggctggctggaatctcatgaattctggagatcctggcctgatgtgaacacggtgtttgatgaatgaagataataagagctccctgaatggcagcgtctttttttggctggcaaattactcagaaaacccccctaaattgcacacttgtttgagtaagagtcaggtcccgtgtggcaatgatgtaacatacctatttttggcagacttggcaattcagggagtgacccattttcctgtgcttcgtggaggtcattgcaatgggtttcatcaaccagcaggcttggaaatgagccataggaatgatggccatggagacgggtggagcagtggaacacatgttcttcacccgactcccgcgggggacattggctgcatcacaggaagtagaagtgtttttgtttgtttgcttagtttttgtcgtggtaaatgcaaccttgagtttctaggtgtccacaggacctttggaagattcatgacagcaacaaggtgttgtgaagctcctgctctggtgaggccccagctcccatcagaggatcagaaggttcccaagtaccccaggacaagaagtgagctgtgtggaaaagcccctgtaaagggttgtggtaaggattcactgagatacagtgtggattcactgagtacaggaaggattgggcttctccagcccctgagcacacctccctataatccttcatcatcttataaggtgacagtccacaactgcttggggactacagagcttgtgttttcattgcctttgttccaggatgatttgtgacttctcaggtggaactgctggtgataaaactaacatttcaaaattttgcaactgc

SEQ ID NO: 467774 - DNA, 605 bp, Homo sapiens
aggcacagccagcctgaagcagagatgcccttctacaaaatcacgaaagaaaggctcgcaaggccgtcacagggctgcgaggggggtttctgcatcgttccccaaacagttggcctaaaaccaaagtcaagaatggacttggccagtgtagaaatggctaagcagtttacctcatgggtcttgcagagcctccctcctgtggatctctccctgtgtcactggcataaaagaaaacagcccttccctatccatagaccactgtcagattctccagatacactgggcaactgtgcaggcactgctgctcccaggacaggaggactgacactgacattcacagaaacagacagcgtttctgggaatgggcagaaggggacaaaagcaggagcccaaggatctccagagagagtctgtgaccttgggatagttattttacctccttggcctccattttgtcgtcagtggaatggaattgataattgtgaaagtgctttctaacacaagccagtaagaactgtgtacatatttactgtttttattgctagcggtcaatgatcaccaaaaaaaaaaaaaaagaaaaaaaagaaaactggataggttcactg

SEQ ID NO: 467775 - DNA, 596 bp, Homo sapiens
ggggcagccgcagcaggattttaagtaagggatgacatggatgtcaatgagcaggtacagctgctcacaggcaatgggaactgaatttcactgctctctggaggtggttttcagaacatgcttcacatttgtaaggggcactgggccaggttgtggtaagaatatcataaaaacatttgatctcatccatcagagagcaaggggctgcaaggagtggggacaagtgggctatctaacccagatgaagactcgcagtgctgaaattccaggcattgaacctggcccaaatgcaaatgaggcaaagcaaaacaaaacaaaaacaatgatagagaaaggacagagatatagatcaattggacagaatatagggtgcagaaacagacccgcgcatacatggttgattgatttttttgacaaaggtgcaaaggcaattccatggtgagaggatggtctccttaatgaatggtgctagagcaattcaatatccatgtactaaaaatgaagcttaatccaggcctcacattccatacaaaactgactcaaaacaaattacagatctaaatataaaatatacaatgataaggctgttaaaagac

SEQ ID NO: 467776 - DNA, 563 bp, Homo sapiens
tcccagactccatgtggctgcccccatcacatcataccaaatgtagcagccttggtgggaacaggagcttcctggatccttggaaaaaccagctgagcaagctcccttctctctggtgttcacagaggttatttagcaaggaagtgtgggactcttgtcgatatctgggcaaagattcttctggatacagcaaaagcaaagtacaaagctctgatccgcaagcaaaccagggtgcctggagcacagtggtaaaggggagatggcagaagatgagggcgggaacgtgtgggaccagaccgagaactgaaggtccctctggataccatgaggagagaagggggcaggagtggaagcagagagagcagcgaggaggtgagtgcaatcatccaggtccttggtccagtgagagtgggaaggtggaggatgtagaaggggcactgaggatggctgactgtgagttccgggggtgaaatagagcagcgtcgggggctgaagaggggagggagggggatggtgtcagccagggcaggtacgggaccactaggcagatgcatgagggagag

SEQ ID NO: 467777 - DNA, 603 bp, Homo sapiens
agtttccaccatgggtacagctgccccttgtccagaggtgtccacagccactcagctcattgcctttgatggaggaagaagaggtaaatttcaagaactccggactcccaaactcctcctgggcacctctaacccgacacatcccaaagcaagcgcccctcctgccatctcccgactagtgccagacacgggagtgttatctctaaggagtgacccgatgcacaggcacctggtggctactaatgcatgcttgcaggatgacagtgcagccaatcgaggtgctgacccagacccctctccccacagactgagagccaataagacgtgctgggtggaggctggcgagggccagcagccttcagggacgatgcccttttccgggatgcccctgccccagctgctcttgatgcacccactctgtgatgatgtggggtcctggcctctctctccagctgggctgtgtgttcttcaagcgtgaggcttgttgaagggatgttaggtgaggtaccggttggtcttccttattccctgaaatgcaggtgggagaagctagtggcagcccagtgggccagccctctgccacctttccctcccttctcagca

SEQ ID NO: 467778 - DNA, 1294 bp, Homo sapiens
tatggttaccaagggctcagaatccgcacccccctcccaccgggatgaggattagggtcatgccatcagctcctcttgccctgcatgcttcagggacgatggaggtctcggggcacccccaggccaggagatgctgcccagaggccctgggaaagctcttccctggcctctgcttcctctgctttctggtgacctacgccctggtgggtgctgtggtcttctctgccattgaggacggccaggtcctggtggcagcagatgatggagagtttgagaagttcttggaggagctctgcagaatcttgaactgcagtgaaacagtggtggaagacagaaaacaggatctccaggggcatctgcagaaggtgaagcctcagtggtttaacaggaccacacactggtccttcctgagctcgctctttttctgctgcacggtgttcagcaccgtgggctatggctacatctaccccgtcaccaggcttggcaagtacttgtgcatgctctatgctctctttggtatccccctgatgttcctcgttctcacggacacaggcgacatcctggcaaccatcttatctacatcttataatcggttccgaaaattccctttctttacccgccccctcctctccaagtggtgccccaaatctctcttcaagaaaaaaccggaccccaagcccgcagatgaagctgtccctcagatcatcatcagtgctgaagagcttccaggccccaaacttggcacatgtccttcacgcccaagctgcagcatggagctgtttgagagatctcatgcgctagagaaacagaacacactgcaactgcccccacaagccatggagaggagtaactcgtgtcccgaactggtgttgggaagactctcatactccatcatcagcaacctggatgaagttggacagcaggtggagaggttggacatccccctccccatcattgcccttattgtttttgcctacatttcctgtgcagctgccatcctccccttctgggagacacagttggatttcgagaatgccttctatttctgctttgtcacactcaccaccattgggtttggggatactgttttagaacaccctaacttcttcctgttcttctccatttatatcatcgttggaatggagattgtgttcattgctttcaacaaccttatggatgtccctgcttttcttgaaatatgagaaacaaaacacctttattcttggaagttgtacttttagttaaattaaaatcttcctgagctgttctttgttacctgaaaaagaactagtgc

SEQ ID NO: 467779 - DNA, 570 bp, Homo sapiens
ggattcattgatagaggagatgacactaagtccatatgacatttgggttgtttctactttttggcaattgtgaacaatactgctatgaacattcatatacaagtatttgagttcctgttctcaattcttgtggatggggttcctggggcctctgggcaccaggtgtctaggaacaacagctcccagaaaatgctcttcttatggtgcataacagaagcccgaggggctaaaccaatccatgcaaacacattcaaaaccttggctgccatcacggctatttcactggctaaaacaagtcacccttttaaggaccatgaatcaataagtggcataaattattcacctcgcggaacattctcagaaatggacagcaggctggagaaatcgccagcaggagatgtgttcttgcagtgtttgggcctctgctcaccttctgaatggctggaactttctattaaaaattcagatttcagagaagaatgaatctaagctgttcagagatttcaatgagactccatgtttccttttcagacgcaactaactggtctacggggcctcttctgcagggtc

SEQ ID NO: 467780 - DNA, 810 bp, Homo sapiens
gactcagcaacatggcggcatccggcacgaaccgtagtgaaaggggcctgttcctgttgtaccctccccagagtaacccaggcctttcctttctcttgccaacatgctaccactcagctgttgtccctgcatggctgcaaggagccagcagctacatcatcgacctccccaagggttgggagttggtgggtgaagtccattcaggtgctcacagcaacctcaggtggcttggagggggacggagcagaccatcttcctctgggtcacctagggactggctctccatgttctccgacacgtaccaaagtgggcctgcaaatctgtgttcttctggaatctcagcttcactggtagctgtgaacgtgccttgggagagtcacagaactccgctgctcctgtctgtgatgggtgtcattgatcctacctgagatgttggtggaagggctgatcgaaagaacccccccgccccacctttgttttagatgtggtaaaattcatcagattaaccattgtaaccatttttaagcctgcaattcagtggcattagaacttactcatgtaaccaaacaccacctgtacaccaataacttatggaaaaaaaatattccggcagattgaactttgaccctcccacagccccttgctgaggttgagtttcttgaaatctttacaagaaagaagctgtgactggggctgaaacaggtcaaagtgaagatggtaagtaaaaggccacccttacaccaccaaactgcctgggcttaaaaagggttccaataaaaatctctaaaccaagtaatttcagtcttttgc

SEQ ID NO: 467781 - DNA, 682 bp, Homo sapiens
ctgccccttgagggggtttgttgaccaacatcatttgttgaaagaagatgcttatattacagaagtggttttccagaatgttcctgagtgggtgattggacagtccagagaaggagccaagttgcgggtcagactctagaattccatgctggaggagtttggggggcagtctgattggaaaggaaaagagggaaatttggaaaacatgacacggagaagagaacatcatgtgtacgtggaagcagagattgaagtgaagctgccgcaagccaaggaagtcagactgctagcaccaacagctaggagagtgacatggaacagcaatgttatcatcccaagggcatggccagaatttcgtggcatcagtgatgctgtagctcacgcctccgaacttgcttcacacagtcccagagtaacttctacaccccgccagctttctggtgctccatgttttgtgggccagacaccaactggacacccagatctggcctcctgcttgctgggctgtggcagcgggatcactctggggcccagggagaggtaacgaaggaacaaggagcctgccttccctgtcttgagtttgtgttttcctccttctctggcacttggcccagtttggccctaataacctttgagggaccttcatagctgacccccagcctctttctgctcacagctgccc

SEQ ID NO: 467782 - DNA, 634 bp, Homo sapiens
agggggcagcacccaacctatgctcaggcaactggcgctttctcctgggactttcaatcctgagcgtgaccggaaaaggaatctcctccagaaccttggtgaactaattaacccacagtttgctgtttatgatggaaagaattttgaggtcttacctaatcccaaaggtgtttatggcttcaaggaagttgctggtatcagcaatatctcaacccgaggctgccacgtagacatcacctcacctgccagtcctgctcggttgacagtggctttgtggggcactgtgttgaggaggattctgaaaccaaaactcattaacaaagtcagccagtgggagacagttggcagagcccctactaactttcagggggttgggaagatatatgttgatatggtttcgttctgtgtccccacccgaatctcatattgaattgtaatccccatgtgtccagtaggggcctggtgagaggtggttggatcatggcggcagatttcccccttgctgttttagtgctagcgagtgcgttctcatgagatctgatggtttaaaagtgtgtggctttttttgctctctctctctcctctctctctcctgctccaccatggagtgtgaaaatggactaatacatatatt

SEQ ID NO: 467783 - DNA, 552 bp, Homo sapiens
acctacatcatgggggagtgaccgatgcaggagggggcagagggagaagctgagctgcaatgcagtcccaacaaatgtctcagccaccctccaagtgatctagagctgggatggccatcagagttgagtgagggctgggttgtaatacacccccatcctcattttctggagaggcagcgtgacctaacgacgaaagcctccacaactggtttctgtcggtgtgagtcccaaatctgccactggctggctgggaaaccttggtcacatctccagacattgccaaacgtcccttggaggacaaagtcgcccccagttgagaaccacttctctagagtgatagctccaaaatgcatgagcagtcctatctctcccctcgctggtcctatctctgccctcgctgggacgtggcagttcaactcttgtacccggagcaggaaacagcagtatgatgctgttgggtgtggctggagggctggaggggcataagggccagcccatgcttggcagaccacacttaagtctgcagaccagggggtggttactctcgggacc

SEQ ID NO: 467784 - DNA, 974 bp, Homo sapiens
cgcttcctgccttgtgaggagcctagcaacacctagtaccgcctagcacaacccagcacagcccagcacagcacagcacagcacagcacagcacagcacagcacagcacagcccaggccagcccagcacagcccagcagagcacagcataaacattgattgcgcgaggactccagggcaggatcctgtaacacatccgggctgtattctagaatggttgagtggccttctcagaagggctggcagacctcagatgggcagatttcagataagcagatcttgatgggcaaccctcagctgggctggcagacgggcagacctccatgggtagctttcagatgggcagacctcactgagcagctctcagatgggcagacctcaatgggtagagctcagatgggaagattccagccaccaggatggcctttttcaagatctggcattttgcgggctatggatattaaaagaagatctagtgcgggcagcaccggccaagtgccagtcaatacatttgttgaggacacggagttcagatcaaaattacaaccttccttccccctccattcctcctcatgtagctccatccacacagtcatccaagtcagccacctggacatcttcttcagctcccctccgccctctgccccagagccatcgggcatcaagtcctgcctacctatccgcctctcagtgacttcccctctccctagccctcattgccctggattaggttcccagcatctctctcctggacttgggcgttgaaaatgttctaaagttagattgtagtaatggtgacacgactctgaatatattaaaaactaatgaactgtacactttaaatgggtgaattttaagtctactaccattgatgggcatttaggttgattccatgtctttgccattgtgaatagtgttgtgatgaacatacatatgcctgtgcctttgtggtagaacaatttctatccctttggg

SEQ ID NO: 467785 - DNA, 806 bp, Homo sapiens
aaaagtttccggatgatgtcggtgctgtggttcaggagctgctgttggagaaccactgatataaaacatgagggggtctttgttaccctttcttcattatatggtttctcctctgagtctctctgctgctttggtgcttcagaacataagaaaggccaaaaccttgttgctatgaaaaaggctatttcttggataccacttatttctgctttaagtggcattaagtcctgctcaaggcctgggggtgtacaagaagaaaggaagggagagaacagcaaaaattatgaaatggacatagatgaagctagaaaccatgatcctcagccaactaacacaggaacagaaaaccaaacactgcatgttctcactcataagtgggaattgaacaatgagaacacatggacggagggaggggaacatcacacactggggcctgtcgaagggtagggggctaggggaaggtgagcattagaacaaatacctaatgcatgtggggcttaaaacatagatgacaggttgataggtgcagcaaaccatagcacatgtatacctatgtaacctgcatggtcagcacatgtatcccagaacttaaagtaaaatttaaaacaataatacattttaaaaaataggtgacactggttttaataatacattttatttaacaaaatatatccaaaatattgtcatttcaacatgcaataaatgtaaaacatattgagttatctttcatttgaagtctgtgaaatcttgtgtgtaattcggacttacaacacatttcattcggactagccacatttcaaatgctc

SEQ ID NO: 467786 - DNA, 994 bp, Homo sapiens
attgattgaatgaaggaatcctctccatctggttcaaagtctcagtggtattctggtgcttatgatgccttggtttctgatgaagaattgaaaagaagagtagctgaggagctaacattggaacaagccaagaaacaaactgaagatcagaaacgactaaagcaagccacagagctggagagagagagggctgctgccaatgggcagttaaccagagccatccctcgagagagggtatcaagccaagaggaaggcactaaggcaatgcaccttgctaggcggctggaagagaaaggccgagtgctaaagaagcaggttgcattctgcaaagtggagctggctagactggaggagaggagctcagagttctacaaagtcaccactgaacaatatcagaaaattgctgaagacgtggaagcacggttcaagtgtatgagtctcatccagtctatgctgacctccaggccaaaattcttcagtgttactacgagaacacccaccagaccttcaaatgctccactctggccagccggtatatgcactacgtcaatcatgccaaacagagcatgcttgagaaaaaagtatcaacaacttttagaacaagcaaaacaccttcaacgttaatttcagagagggaatattttttttcctagtaagaaaataacccatttaaagagacgagcactaatgagaagaccactcaaaagagacagcggacaatggatccaacagaatcataccacatttccattggcagcaatttgaagggcggccaaaacctagatcaggatcagtcatcaaaggatgctcttcagtattagtaaacccctcttacgatgattaagagaagggcagccctctccaccttttggtactttctattcaaattctactgaacataaaatgtttatcttctaagcaagccccatcatttggtgaacctccaccctaacaaagtgtgatgggcagtgtgtaattaacctgtggaacccac

SEQ ID NO: 467787 - DNA, 531 bp, Homo sapiens
ctcccgccgaatgactggcaatacccagcataccccataaaaaacctacaggatgagcaggaaagtcaaatcagctgggtccctgctcaagttcctgctggcgtatgtgagcgtagatgtatccttcctgatgaatatcagttttatattcctgaggagtggaggaaatgaggaagtgaagaaggaaggaatgggaagaggggggagggaagaagggagagaagagggagaaatggaaagagagcgacgaataaagagaggaaggaaggaagaaagaagagagagaaagagaaaaaaggagaaaaagagaaaggaaagaaagagaaagaaaagaaagaaagaaagaaagaaagaaagaaagaaagaaagagaaagaaagaaagaaagaaagaaagaaagaaagaaagaaagaaagaaagaaagaaagaaaaagagggagagggagagggaaggaaggaaggaaagaaggaggcagggaggaagggaggaaggaagaaagaaaggagaaagaatgaaagagaaagaatgaac

SEQ ID NO: 467788 - DNA, 1125 bp, Homo sapiens
aacaagtttgcctccttcatcaacaaggtacggttcctggagcagcagaacaagatgcgggagaccaagtggagtctcctgcaggagcagaagatggctcagagcaacatgtacatgttggagagctacatcaacaaccttaggcggcagctggagactctaggccaggagaagctgaagctggaggcggagcttggcaacatgcaggggctggtggaggacttcaagaacaagtatgaggatgagatcaataagggtacagagctggagaatgaatttgtcctcatcaagaaggatgtggatgaagcttacataaacaaggtagagctggagtctcgcctggaagggctgactgagatcaacttcctcaggcagctgtatgaagaggagatccgggatctgcagtcccagatttcggacacgtctgtagctctgtccatggacaacagccactccctagacatggaaagcatcatcgccgaggtcaagatgcagtacgaggagatcgccaaccacagccgggctgaggctgagaacatggaccaaatcaagtataaggagctgcagaccctgcctgggaagcacgaggatcacctgcggagtacaaagactgagatctccgagatgaaccggaacatcagccggtcccaggcggagattgagggcctcaaaggccagaaggcttccctggaggccgccatcgcaaatgcggagcagcgtggggagctggccgttaaggaggccaacaccaaggtgtctgagctggaggccgccctgcagcgggtcaagcaggacatggcgcggcagcggcgtgagtaccaggagctgatgaacgaacgtcaggctggccctggacatcgagatcgccacctacaggaagctgctggagggcgaggagagccggttggagtctgggatgcagaaggtgatctgagctcagcctgcgggggcctcacaagccccggcctcagctacgccatgggctgcagctttggctctggcgcgggctccaactccttcagccgcaccagctccccgagggccgtggttgtgaggaagatcgagacccgcgatgggaagctggtgtccgagtcctctgacgtcctgcccaagtgaaaggctgtg

SEQ ID NO: 467789 - DNA, 1182 bp, Homo sapiens
gtcctatgagagatgaacaatgagtacacacattcgaaaataccggggcacagaggcccttctcatggagaggcagctcctacctctacttcccccgctggccagccccagctgctgctgggagccagaagccactgccatcagaatccctggggaggggcttagcaaccagcccacagcggacgggccagggggccagtgccggcctggggacaccatgggagatggcatggccaggagctgctctcaggggccctggaacaggccagggggcaagacgggagggagccggcccaagactgcactgggcctggtgtgcagcaggagccagcggaacgaccacccctgcttctgggccactcgcaagaagagaggctccgaggacacaggaagctcagctctccatcagagacgccaaacagggcggcggtggctgggatttggggaggggtcctcggagcactccagggcccaggcaggaagcagcggccaggacacagccgtgggcaagaggcttggagggtccggtgggagtgaaactgtcctcgctgggacacagcaagaaggttgaaggtatggtggggtggggctgtcctcgccggccctttcccggccccggggtgagttgaataaaagctcagatttgaaggcttttctgcattgcctcccttaatgggcttaatgtctcggctgagctctaatgccagtcattttacctcccacgcatagatttcagaaaagaaagcttacaatgaccctagtccgctttagcagagaaaataaaatagtagaaaaataatagtaaaaatgactgtgtaacgttcgtcacctttatttttgtatctgtaaatgcaaggatgcttacagttttttttgcttacagtttttttctcccctatctgcctgaatttttaacaatgcaagagattaggattaatttccaaatagcgcaacctttttggaaatgcacattctccacaaatgaacaaactgcttgtggtaattaaagtaatgtcctgtgctcaaattgcttgtgctaatgaggctaattgacagcagcgagtattaaccgcaattagtcatacatatctaatagcatcgctggtgcctatgattttctacgtggaggggattttacatctgctttcaggatttccatccttggctatatgcatttctctc

SEQ ID NO: 467790 - DNA, 2279 bp, Homo sapiens
tttgtagctataaaggtgaccctggaggcagatctgggctgagtgagtcacaggagtgggggaagggatgaaccagactttgaatagcagtgggaccgtggagtcagccctaaactattccagagggagcacagtgcacacggcctacctggtgctgagctccctggccatgttcacctgcctgtgcgggatggcaggcaacagcatggtgatctggctgctgggctttcgaatgcacaggaaccccttctgcatctatatcctcaacctggcggcagccgacctcctcttcctcttcagcatggcttccacgctcagcctggaaacccagcccctggtcaataccactgacaaggtccacgagctgatgaagagactgatgtactttgcctacacagtgggcctgagcctgctgacggccatcagcacccagcgctgtctctctgtcctcttccctatctggttcaagtgtcaccggcccaggcacctgtcagcctgggtgtgtggcctgctgtggacactctgtctcctgatgaacgggttgacctcttccttctgcagcaagttcttgaaattcaatgaagatcggtgcttcagggtggacatggtccaggccgccctcatcatgggggtcttaaccccagtgatgactctgtccagcctgaccctctttgtctgggtgcggaggagctcccagcagtggcggcggcagcccacacggctgttcgtggtggtcctggcctctgtcctggtgttcctcatctgttccctgcctctgagcatctactggtttgtgctctactggttgagcctgccgcccgagatgcaggtcctgtgcttcagcttgtcacgcctctcctcgtccgtaagcagcagcgccaaccccgtcatctacttcctggtgggcagccggaggagccacaggctgcccaccaggtccctggggactgtgctccaacaggcgcttcgcgaggagcccgagctggaaggtggggagacgcccaccgtgggcaccaatgagatgggggcttgagagccgcccacaggtgcttcccacctgtgcgagcccatgccctggagattcccgagccgtgagctgcctcccacctcgtccctgccaagtgtctggcccgccttcttgggggagccccaaggactttgcagctgcatgtgggggtcacttccctgcatgtcaaaactccccacaacacctgtgtcctggatctcacaatgcaaccccgctggaagatgcaatttatttgtttatagcagattatctggttgggggaaaatattagcttttagccctaccctgctttaagctggttatctatgggtggataacaggaatctcatttgaatatgaaagctttctcccaaccaccttctctgcctaagacggcatctttgtggaggaggcaggtgacctcgggtgatctttggccctatgctggtccttgggtggcatcaactggccaccaaggtggtgcccccgtgcacctttccccaggtgtgcctgaagtctggcaagtaaacggtgtcgccatcgccgacccggatctcgctggctgtgggccatgagactctgccccaccatccctctgacccctggccagcccttgacccctggcatttgctatgaggtcgccttaccctgtcacccctcgcacccagggcaggcctgttcgctttcctccaggccgcactgggaagggaagagcctctgcctggcttcactggcagtcactccagcagatgctgataggacagtgccccaggcagtggagggcagccttccaggcagtgtcccccagagccagagtctcatacctcactgactgtccctcccagggccccctcactttgcccaaaagcccaaagacggaacatctgggacacacatcagctggctccactctcctccctccccctttccttcccacagtcccctgggtccagaacaaggcagatgtttcctgcactttccacaaatcacagccctttcctaccacccagcatccagcctcgaggctcggggcttgcatggagggggtgcaagacaggaggtccctgcagagtcagtcctggacttaaagaggtgagggaggaggaaagacggaagtggaaagatcctgtctccagaccacagcctggcctgcaagcctggcacctggctgcgtcatcctgtttttcatgtcagaaggtgaaaatgatcttgttctttctcttggcatctttctgaagcagttttcagtctcctcccaaaagatggagccttc

SEQ ID NO: 467791 - DNA, 887 bp, Homo sapiens
ccactgctgtcccagatccacgcaggaggcaaaaggcgcaaaggcgagggtgacctgacggaccactgggtgtgcaagtgcgcggagagccgtcggaccccacacgagggagcgccgttcttactccatcaagcatgtgttaaaggcctgctctgccctgttcctggtctgcaggcctctgggtgaacagggctggcagagacctgtggtcccgatggatcccatggcccctgagtgcccctccgctatcaacctgccccacctcctgaccggggccatctgtgctgctcagatggctgagcacaggctgccagctctggacgcttcacccacactgctattcagtggctacacgtacaggaaggccctgcagaccattagaatagggaccatgtctgtaccggtgataactagcccttccctgagctccctgaatcccccttcccgtggccctcgttgccccagcctcttccccaggacccctgtgacctctctttcagtgactcaggaactaaagggtgggcacctggcacagcagggccccagcagctgtccgaggccatgggtgtctgtgccagctgctcagtccctgtgccttgctggtgatgagatgtacctgttccccattcgccttccaccgtaactgtttctggaggcctccccggaagctgagcagacgccgccacgcttcctgtgcagcctgcagaacgactctgctaccttctccctgagtcacaaggttatccttctgtgtgtgtctgtgtcttcatctccacttcttataaggacaccagttgatatcgtttggctgtgtacaattcatcttgaattgtagttcccatcaggaggaactcggtaggaggtaattgaatcatgggggtggttac

SEQ ID NO: 467792 - DNA, 441 bp, Homo sapiens
acagagatgatgcttacactgagacctgaaggagaaggaggaggtggctgctcacgcaacccacaggaaagtgttccaggatcaagaacagcagccggtgccgtgaccccctctgtgctggtgggctcaggggttgatggttcagagcctacacttcatcctgtggtcccacaacatgtcatcgtctgccatgaaaaggtcattcctgtgtccaaaaactgctccttgcttaggatgatggggaacttggcaagacagagaattcagtgggtacaagccaacgggtccattgcatttgtgaaaactaagcttcttgatcagaagcaatgcgtggggaatacactaatgatctgtaaggtcccatacgcccatggatggtggttctggcagaagcactgtaggcaaggaagacaaatccatattcaaaacaagtgattggac

SEQ ID NO: 467793 - DNA, 1160 bp, Homo sapiens
caggaacaaatgtggtatctggggctggcggtgtacagtgccaccaacgtggagctggtgacacgcacacgcacggagcacctctctgatcaggacaagtcgaggagcaaaggtaaacccagctcccaccccttctccgtagcggggaagactccattccagtccttcctggggatggcgcagcagcattcctcccacaccggggcccccgtgcagcaggcagccagccccaccaaccccacagccatctcccctgaggagtacttcgaccccaacttcagcctggagtcacggaacattggccgccccatcgagatgtccagcaaagtacagagaccagatgagctggtgacccccatcatcgacctaatggccatcagcaacgctcactttgccaagctgcgcgacttcatcactctgcgccttccacctggcttccccgtcaaaattgagattccccttttccacgtgctcaatgcccgcatcaccttcagcaacctgtgtggctgtgatgagcccctgagctccgtgtgggtgccggcccccagctctgctgttgccgcatcagggaaccctttcccgtgcgaggtggaccccaccgtgtttgaagtgcccaacgggtacagcgtgctgggcatggagcgcaacgagcccctccgggacgaggacgatgacctcctgcagttcgccatccagcagagcctgcttgaagcgggcactgaggcggagcaggccacggtttatgaggaacagcttcagctggagcggacacccccagcccccggtccacccagctttgaagagcagctgcgcctggccctggagttgtcttcacgggagcaggaggagcgggagcggcgcgggcagcaggaggaggaggacttacagcggatcctgcagctgtcactcactgagcactgagccatagccccgggagggctggccaggccactccctgcccgcttttgtaatttatttatttataaactctctgctgctgagcttggggcctggagccccaggaatgagcaggcaggggagactgagatggaaataaagagactggctgaaaggagctggcgagagtcacgtgtccttaccaagcaggcgtcctgtgaaagtcagatcccctgtgccctgtcccacctgctggggacccg

SEQ ID NO: 467794 - DNA, 721 bp, Homo sapiens
gttactcagggttccttttccaaactgtaatgactgtaattcagttaggcttattgcctgttattcaagatgatactactgaggaggaggaagaggagaggaggaggaggaggagaaggaggaggaggcagaagaagaagagaaagaagaagaggaagaagaagaagacgaagaagaagaaggaggaggaggaagaagaagagaaagaagaagaggaagaagaagaagaggaagaagaaggagaaggaggagaaggagaaggggaaggggaagaggaagaggaagaagaagaagaagaagaagaagaagaagaagaagaagaagaaggagaagaagaaggagaagaagaagaagaagaaaagaagaagaagaagaaaagaagaagaagaagaagaagaagaagaagaagaagaagaagaagaagaagaaaaagaaagaaagaaagaaagaaagaaagaaagaaagaaagaaagaaagaaagaaagaaagaaagagaaagaaagaagaagaaatgccaagagcaacagtcttccaaaattgctgacatcaccaggcacaggcatcaggtttggaaaaacttgggctcagattattcatctaccactcactagctctgttttctgaaatacatttaaatctatgtcctgttttccatagaggttgtactaattgacatgctcaccaacagtgtgtgagcatttccagcatacacttttttaaa

SEQ ID NO: 467795 - DNA, 795 bp, Homo sapiens
gatccttccccagccaagcctttgataaggatcaagccctgagtccttcgatatgactaacaatggctccgtgacttcatgtgaaactgtgcattccttaaaggaagggactgtgtcctatgtgatttcatacctgaagaaacaagcaccatgtcttgttcttgatagagacagaaatcaggacgttcttcatgaattctcagatcctgactaccgctcaatgggtgttctatctggaggaatatgcgatggacaagatctttggccaaaccataattccagaaatggagtggatgagccaggccctgctgatggtggacccagtggactccaggaacctagtcgaaatcactgtttttggatgaccctgtgtacagaattgggtaaagagcttgctcccatgcctggcatggtttcaccaaaaacatcatgcctgaactgtgaagaaaaaacaccttgagaagaatgtgaaggcctggtttagaaaaccagtgggagaaatctatggcttacaacaccaattaattttgttaaaataatctttcagatgtaaactggctttgctagtgaataaccttggtataatatctctgggctttggattctcgtctgtaaactggaaataatatttaccttacagatatattgtaaggaattaatgagataagtaaagcacctatcttaatttctggcatatggcaaatggcaaacagataataaatggtagcaattgttattattaagattgagtatatggtaagtggattgatttattccgttagttaactgtttccc

SEQ ID NO: 467796 - DNA, 748 bp, Homo sapiens
cttccctagtgtgaatgtgggagcatgtggcgggcactggggaccgtggggtcctgggttgggcctggagggaagttcacggtgatgctgagtgaggatgagcagctctgggatggaatgcgacacgctgagccatgccatgtgcaacgtgtttgcgttgagaagccagaagaagtttagggattttctctttgctgtgacctgcagtccctttacttcttcagcgggactttctttctgaggggctgggggagggtgactgcctttgagaactggtgtcagagggaggcgcagagcaggcggccgggcaacactagaatcactgggccatgaagatcaggtcacagggaacagctcagtctgagttctctactggaattttccagcacaacttggaagtcagagctgtgctgggatcccagcgactgggggaggcaaattcgggtcaggggagggagggcgggggccatgagggagacacagcatcccagaaacattcgaataaacaaagaaccggaaaatcagagcagcagcaggtgagaaggaacccaagggtgggcgggctgttgctggacgccagcctgatctgtggcacggtttgcagcgaggtacacagggatgagctgccctggctggagtgcagtggtgtgatctcagctcactgcaaccactgcctcctgggctccagccattctcttgtctcagcctccggagtagctgagactacaggcatgtgacaccatgccca

SEQ ID NO: 467797 - DNA, 854 bp, Homo sapiens
aggagatatacctaatgtaaatgacgagttaatgggtgcagcacaccaacatggcacatgtatacataggagaagtgatcccctctctctgtgggaaacaccctaaatacacgaggggcacggcgaggaaggccagcgccagcttcctgtgtatccgtgtccacggcagccactcaggctccagccagctcgtcggaattggggccgtagcttcagaaaggcgagaggtgattgtccccacctctgcagctgacctcggggtcctcgggcccaagcctgccagctgttgctctgccccagcagaaccacgcaaaggggtgtctgacttgctgcccgtgggtgcagtgccctgtgacctggagagcgtgctcatcctctcctcccgtgcctttgtgccctgtgacctggagagcgtgctcatcctctcctcccgtgcctttgtgccctgtgacctggagagcgtgctcatcctctccgcccgtgcctttgatcggtggcagtgccctgtgcctatggacctgctcttcagtgcctctccaacaagcaacaaggtttccagggcagggaagtgcttctaacaaacaccgctaacaccttcccaggactccaacaacctgcagtgggtccttagagcactggtttttgataaaaaaaaaaaaataatgtgattaaacctatttgaccctcttctcagaaaaaaataattgtacatttatatatatatttatatatatacatatagatctatataaatctatatctatatgtatatatagatgtatatgtatatgtatatgtgtatatatatgtatatgtatatgtatatgtatatgtatatgtatatgtatatatac

SEQ ID NO: 467798 - DNA, 650 bp, Homo sapiens
tgccaaaatcccagaagaaatccaatgaggtttgactcacctagtagttacacttctaggaaatgttccaaagaaaaacattcaaaagtgtgcaaagcagcttacacaaagaaaagttcgtcaaaaagctgtttattcatgcagtcagatagaaggatgtcagtaattaaccatgtagaagttctttatgaatatctgctgcagagaagaaacattaggcgattgcgagtctgccttttacaaactgctagtactgtgtatgacaataatgttgatcacctgatcaaaggacatccagagggtcactactcatgttccgtggcaaggataagcttcaagctctctgactgcttgctaactgccatctgcaataaactgcttacctttgcattaccacctgaacaattgcctgccagagtggagtgtatggaaaatagataaagaagcttccagactttacaactgcaggaagaatcatttgcacgactgggtttgagaattttcagtctggaaaataactgtcctgtacgtcagaaagtataaagtgactccatttcaaagttccagagtcgaacaataaaatatctggctactcttatatgacatttaatttttcaaagtactttcatattttcattacttgcttattt

SEQ ID NO: 467799 - DNA, 921 bp, Homo sapiens
gatgatgtgtatagttatgtgtgtagtctgaaactgctaccttctgcaaaaagcacacccgcctctctgccccatccatctcccagcacaacgaagccgtcacaaggacatttttcctccaccgtggtacttagggccgtctgtgtggctgacccagagctgcccgcagtcaggaaataaagagaggagccagggcgcaagataacgccagcccccgcgtccctgtgatattaattactcgagacacgtgcatgacatgctgctcatttgttcctcaccgccagctatcttatctccactgacgaccgctgatgaaagttatattgtcaattctcaatttccaaccatggctccatcaagagctggactgtgggctgcctgctggattaaacttttcctcaatgctgttgcctctccaaagctggagctgcagagccctctgaagaccctggaaatcacagctcctggaatggaattccagaggcagcaacggagtgaaacaaacagctacgtggtgacttcttttccttcagttactgaaaccatcaacagtaagtttgcagttttggttgtccagggcctgccagacaattctcttgccctgggctttcttgtgtggacactggctacaggagaacctacggacaacgctgaggagctcacagggaaattgctcctgctctattctcaggcctgaatcccatttcgtttcaaactttaaatattaacgtggattagtaacttacaaaatcatgatacaacacatttttcccaatttatgcctgatcacagaccacttttcacaaggcatatttacggaggaagtgaggaaaagggcaatccagtttaggaagttttggggatttgagaagtaagatgtttgcatttttgaaatgtatttatttatgtatttacgtattt

SEQ ID NO: 467800 - DNA, 621 bp, Homo sapiens
ttgtgaacaaagacgcgtttccattgtcccatccttgcagagcaccctcatctgcattttgaagcaatgagctccttgaagtctaatgccattacgaacgagtgtgtcgccaagcagacagtgtgtgaacttccccagcgtgcaagatgtgggcaggtggcaatgggagtgtctgagatgggcaggtgctttggtggacagaagtcatccatgatcatgccccttcatcacatcagcatccctgacacctccttctcaaaccagggagcttgtacaatactaataaactttttatcatggactaaaaaattagttttaaaaggtggctctgaaaacattgcaagatgctccctggaagaccgggctaaagctgaaggcgtctgcttcacctctctctctgacagtgattgccaggggccgacagtcgctccttgttgcggcggcggctccatttgttacagggctcacttcaccaggaaaggcccgtctcctccacccaggtcacagcccaccattcatctcatctgaaaacgtcccacggggagagagccgcagtgcatagcaacggggggagccgaaacgctgtcggaaaagggctggcgccgcaggaggtggccgagc

SEQ ID NO: 467801 - DNA, 916 bp, Homo sapiens
aaccaataacattttttggaaatgcttaggccacatgagggaacagaaggcattgggaatgtgcttttccgtgatcagaggggactggtacaaagaagtcactgctcaggggtcactctgaaacctttcccctgtgaaactgagacgtttcaccccaaagctacaacactcttggtttctccagttctcttctccagttgtgtctctttatttacagtcaagctgatggccacgttcaagatgactggtgctgctgagagtctgattttcagattggcttggtgctacgcggctgtagctgatctgcaaggagagatctacagaactttttcatcttgcaaaactgaaaatctgtatccattaaacaatcattctccttcccccagctcccctgagctcctggaagcaaccattccattctgtgtctatgattttaactactctagaaacctcagttggaagcacatagtatttgttttgttgtgaatggcttatttcacttagcataatggtctcaggttcatctatgttgtagttcttggcacactgtcaaaaataatttaaccacacgtgtgaagatttatttctgagctctttattctattagttcatatgtctgtgtttatgccaataccgcaatgttttcattattgttgctttgcggtaagttttgaaatcaggaatgaaatgtttaaatttgttgtgtttatattcatgttttttatcaaatatggaaagcattagccattattttattgaatattctctctccccttttattcttctttttctgagacttcagcaatccatatgctcgtgttggtggtgtcccaaatgtcccttaggctctgtttacttttctccaatcttttaatttctgttcctcagattcaataatttaaactgtcatatcttc

SEQ ID NO: 467802 - DNA, 602 bp, Homo sapiens
gagtaactcattaccagcagtgacagcatgacacgacgataatgcaaaacagaccaaggtttgatcaattttgttattggtttttaaaatcctccaagacaatgcacctgctttttgcccatatctgcagagtgttcccatgcctgcctttgtgtgccatgctgagtcttcccaaaagattgtacagtctctatgcccatagtcatttaattccttctgaagtgctacctgttccatgcatggggcaaggaggaagtcaggagcaggaggcttcaatgcaacttcgaagtctggagcagcttctgtgctcccaccctctctcgcgaggacatcacatcctcattgtgggtcctagaataagaaggtccatgatgcaggcaacatgcagtggcttcacagcccagaacagaggcccagtcaaccctcagcccttaattaacgtaagaaacaaatgtttgttgttgtaagccactgagatttgggggggctgtttgttacgtggtgagttatatatgactgaaacactaaagggaagatgagggaatagcatactaagcaagaaatggaagagagtagaatcgaacagccaaaccaggtgtctt

SEQ ID NO: 467803 - DNA, 745 bp, Homo sapiens
cactgcagtttttcaggaaagtatgtcatcttctccgttatccccattagtctcttcaataaaacgccccttgtccttcccccagtgtgctgatgcttcgctgcctgcactgaccatcaggcacctgggtgtttggaaggagtccactgaatttccatggaaacctggtctcactgatggacccagtctggggagggttcctgggattgaggacgaggcttcggcactcaggagctctgaatgtgctgttagcacagaggtatctccagacatccaggtgaaggcagatttggggcctatcaatttaaggcagttcacagagaaaatgttttcccttgatttaatgtttccggatgtgaactgtagggcagctgattcaaatcagagaaaatttctagtccgccttctcggaggactttgcaggtccaggggggttagatgcacctgttggtcgtcagcgtggatcagacctgagttttgacgatacactggctccccctgctggttgcctcttggattctccatagctgaaactgttaactgcctgctgttccttctcaccccaggacgtgagagagctttcggttccctccccacaaggcgagtgtgcatcttccactgcaccccaaagctgctgcctgcttctcctctgttttcataacctgggatgccttcctctgaggtctgcttcacaagaatggattcatcacttcaatttgcaaagtcacagttgggtggacattcc

SEQ ID NO: 467804 - DNA, 1113 bp, Homo sapiens
ttaacacagctggtcaaggcagacatggacagcagctgcccaccagccccaggcaccatgtaccctggaggctggtctgaggcactgcctttattatttattgctgtgtgatttcacagcttcccctgatgtcagaacgcaagcccagatgatgcctgtgtgatggggcttccctagaaacgaagggatttattttaattgattgccttttaatcagaaagttgtgtgaggcatgaagccctgtccttgggcatctcctgtttcttgaaatgaatgttcagggtgaccctggctcaagaaattgcaaaccgtggccactaaaaggccagagagcgcccttcagtggggattccccaattccacgtgtaactcgacccaaactctgcagcatctgcaggtcagacatggccccacgcaatccaggaccctcacagctcagctcccccgtgtccactggaatgacccccctcacctggtgtccccacggcttcacggccctgacgctgcttttcttcctgttttaccgctcgcctgggacttcatttgctttagttgtgcagtattctgtgtcccctcctgtgaagctcatctgtactctcaagggaccaactgtccctgatgcgggcacacaggcctgtgctaggaccctccctgctcctggctcacagatgccacaggccagtgtttgtggggcacaagtggaggtgtggagactgaggcagggcacagtcaaggatgatgaccaacacactacccagaatacacagacagagctggattcactgcttcctacactaaaggagatggctctcctagcagccatagcatccctgaagagagtaagaggcaggagagttacatcatctgctgacaccgtctgccggcacagcactgtgattggctctcaggagcacagttgcagaagtgcttagccctgattggctgatttccagagcgagggctgacactaattggctggcttgcaggtatgtgctcacagccaccattctcattggccagtgggctgggtttaaaacttgtgctgcagctgtttcttatcaagttattgaacaaccagtcttttcctagttgatgggagctttttagatttta

SEQ ID NO: 467805 - DNA, 1439 bp, Homo sapiens
tcccatgtggctggtggccagagtgcagaaccagcagtggcagaagacaaggtggagagacagaagatggctcttcagaggacagacagcctctggctacagcgtgtatttgccaggcgctgtgcaagtctcagggacacacaaatcaacaccctgatatggtcgttgaggaactcagagcccagcgggggcagcagggaagagaactacgtatccccgtgcgtaattcccatgcaacaggaagtatctgtttgccaggcagaaagcgcctgtagctactggtctctttctgcagccctgccaaacacaagcagcaataaaccaatggccattggcttaaaaagctttgtattcaaattacaactctttggtgtttgtcacgtgcttccttgggagatgaaagtttgtgttcaaggctcactaacagggaacacaatctgttcagtttgtccaacaatattcaccgttccattttgtgtcagcctcaagatacactgtaaacctctcagaaacctgcccagtttctccatcagtcctttgaattttctttcttagcccttcatgctgagcacagcttgaggtcagtggctgagactggccagcaagcaccgcgttaaggacacaggctgatcacaagagctaacctgtcatggttccacagcatcgtgccttcccctggtggcctccgaagctcatgcaagtttgcaggaagagacattcagagtgaaatacggcctgaaaagccactccaagttgtattatttatgaaacacaacactcaacacaagaagaaacccaatacagcacatcattctgcctgctccgtggcttctgcttctcaagcgacttaaaatgattgtctcactttgtctcccaggctggagtgcagtggcgtgatctcggctcactgcaacccccacctccctggttcaagtaattctcctgcctcagccccccgagtagctgagattacaggatcctctctctgggagccctcatctacctccagctgcaatcatcaccacaggagtgagagagagacttggacctgagctggaccctccagccctccttcgctgaactaccttccaaccttatgttcctactgatgtttaccaggttattcaataaatattgtatgttctgtggcagtggccaccagtcattttcaaatacctgttttcccttcttccttaccaaaaacacccatggtttttagctggacacctggttgcccaaaataaacactgcatttgcagcctcccttggagattggtgtggaattaaattaagttcaggccagagggacataagctaaagtggcaacttcccagagccttccttaaaaggaaccttgtacacaactcttgccccattttcaaacttttcctcttcttgttggccttttctccttcttgttagcaggaatgcagatgtga

SEQ ID NO: 467806 - DNA, 1265 bp, Homo sapiens
agggagcccttcttttccgcttctcagcgctttataatcatttagtatgtcgcattcacaggacattgattagtcccggaaaagcaaagtaccataaaggatgctgtgtacatggcaaccacacagaacacaggaattctcaggggcggtgggcaggatggtcggcctgcccatacggctgtcacgcatctccttccaaaatctggatgaagctggtctttgttcagccaggttgtctcccactggaattggtttcttaggaccccagatactgtgctcaaccaatgggcacacgtacttgcagcaaacaaggttccaagtgcagctgtcacctctgttctccactgtcccaatttttcgctcttcttcctttgaaaaggccaaaggatattcatcaacctacccagttgctccatctgagaccctaacaacagtgtttcaggcccagtttaacagaacaggcatctgggcagccgatcctggcattgctaatgtcatcctggaaccagcgacctcagtgtttttaggttggtgcaggaggaagtgcggtttttgccattgaaagtaacggaaaaaaaccacagttccttttgcacccacctaacagatgctcctagggtgcccctgagtcccagcttgcttaggacagtgtgcacagatgttcttgccagcatgctttttaacaccagcctctcttattctgaaagtatcccatttggaccagaaattacagcagattcaccccagctatgttgctcatgcagcattcagctgcattttcactttattgcacaatcctgaagacctgctccagaaagagtaaaggcagcaaacagttactttatttaccgatgcctgaggctgcacctgagcttctcagttgtaagaagagccttgagcagaactaagctcttctctctcactgctgtctgcttcttatctcaggtctttctgcctaggaaaaagctggatgcaactggcccaggctatggtcagcccttgacaaggcctcagctgctgagaagttactcaggacctctgcttgtccctgcaattggctgctgcagtctgctgcctagtttctgcaaggtttctgaggcctctcgcatgacgctggtgtttgagggccaataaatgacacagctttcttccactcaagtgcacaatgaatttggaagtaaggcagaggcctgacaggagagaatcaatagtgttatagctttaagagtctggatgaggcccttggcttagatctgtagcacagc

SEQ ID NO: 467807 - DNA, 1061 bp, Homo sapiens
gcatcgtggctgctgcttttctgccgggactcaggaccactggccactgccaggaaagccggctgcccccgaggccggcaacatcgtccccaggggctaccctcggggtgctgggccctctcttgctggacacccacacagtccactcatccagtgacagatgagcttggggtttaaagtttcctgggctctgggccaccatagctgtgagccacatttcatatcatttctgagagcttccctgcaggatgagcttcagtggctttcgctggtgttgggtttaacgacgcactcgttatcaggagccttcacttctccacatcctgtgttcgctctcgtgcagatgctcctgcacacgcaaaacaacacacgtgcaacacgcatgcaacacgcgtgcactccacccaggggaagctcaacatgcgtgcactccacccaggggcagctcaacacgcgtgccctccacccaggggcagctcaacacgcgtgcactccacccaggggaagctcaacacgcgtgcactccacccaggggaagctcaacacgcgtgcactccacccaggggcagctcaacacgcgtgcactccacccaggggaagctcaacacgcgtgcactccacccaggggcagctcaacacgcgtgctctccacccaggggcagctcaacacgtgtgcactccacccaggggaagctcaacatgcgtgcactccacccaggggaagctcaacatgcgtgcactccacccaggggcagctcaacacgcgtgctctccacccagggacagctcctgcgagactcgagtctgaggggagcacaggggccgggatgactgccgtgcaccacagcccgcaggcattcagatctgcaggttctgtgttttcaaaagcttggaatagataggtcattcctggtctcttattttgaatcatgaaaaaaactagtttttattgtagtgagcaaaaaaaaagtttactttttaattgtccacccaatgaggaagatactgatagctataaggcacccatggtgtgctttcaggcaccgatctaaaaaatgtac

SEQ ID NO: 467808 - DNA, 517 bp, Homo sapiens
acattctgaggatgctactccgacatgaggggccctgaaaaagggctgatccctccgcaaactcagaagaacgctttgggtaagagtgcggagacaattgccttgttcccattacagtttgcagttattaatttcatggaagagagcacgtcacaccgggggcaagacacagtaggaactgccagattaagtagcacagatatcccggaaaaagaaatcagtgcattaaatataagaaggaagaagaagaagaagaagaagaagaagaagaagaagaagaagaagaagaagaagaagaagaagaagaagcccgaaaaaaaaaaagaaaaagaaaaaaaaaaagaaaatagaatggtgaaggaaacacaggaattaactagaaaattgcaaaatctgattggtcatttgaaaaagaagtatactgccttgggcaaagttctacgagcctgagagtgtgaagaatacggatttccaaaataggtcatgagggagacctctctcctcacttctcaatttc

SEQ ID NO: 467809 - DNA, 1146 bp, Homo sapiens
ttaagtagcacagatatcccggaaatccatctcatccatgaataggccatcagctcccccagaccagcagcgatgggctttcctttgaaatctggagggtctggagggctgcgcaaacttcccttgacttagttatctcagagcattgtgatggaaaagaaacatcccatgcaaaagcagaagaaggaaaaggataagaagaagaggaagaagaagaagaagaagaagaagaagaagaagaagaagaagaagaagaagaagaagaagaggaagaagaagaagaagaagaagaagaagaagacggagcatgccggtgctttgtgtcgccaaacccctggcaggaccagattgagggccgagcttctcagatactgccttcagcaaagttctatgagcctgccagtgcgaagaatagggatttccaaagaaggtcatgagggagacctctctcctcacttcccaatttcgccttcttcatctctcggaatcagagagcacattctggatggagaagcaccacccggaactgcctggcttgggggcacagctattccagcacgctctagagttgtgatcgtcacctgctccttgccgccaccgccgcccggaagtggtcgatgaatggtttctgtgtttctctcccaccctctggagcatgcagggcttaacaaaatctgcaacttacttgacacttcttgctcatcgaagatttaaatgatactatcaatacagtgtaccaatgttttgctgttggtgcagacagttcaattctctttggactagattaggaaaaattgggggacttgatatacctctggagtaagaacataaatgcatacttttgtctagtccatgtgaatatgaactgtttctgttctttcttcctgataacaatagaaaaaatgcattccccaaatcaaagactgcatgccaaagaccatgtaatttttgcttttatgttcatattgtttataacatgattactttattaactttacattccaattctattttcttatgtattcaagtgaaaagtgttaattatgagaaattctgcactatggcactgctaatattgcaatctatatcccagacttcgttttaccgacagaagaaagcataccctcatcaatttgtcatgtcttc

SEQ ID NO: 467810 - DNA, 684 bp, Homo sapiens
gtctgtgtaccataaaaataaaaacagataaaaataagaagatcaatgtattcgacatctacacccaggcgtacagctctcagatgatcaactgggaagcgactgttgcccacccagagggaagaaaggggcaaagccggaggatgaggacgcggaccctgcaggccgctgcctcccaaaagtcttgtgttccacctggtttttcgggaccactcaacattcctgagctccatccctgccaaggtggagccagcacaggactgcaggcggagtctccagactcatccggaaacagccactgcgcggagccgggagcgcgtgtcaaacgagcacccacagaagctctgggcccgacacggttccacttgcttgatatttcagaaaagaaggaattatacctcagctgtaaagggaatacgggttacagctatcacaagtgccgggaagggttccagactgggctgaagcttcatgagacttctcctcgtctgtgcgcagacagctggccaactctggagcccaggctgttgcttcccggtctgttggtgaatcctccatagtctggcatgcatgtacatgcgtatgcatgtgtgtatgcatgcatgcacatgcgtatgcatgtgtgtatgcatgcatgcacacatgtatgcataaatgtatgcattgtgcacatgtatgcacatg

SEQ ID NO: 467811 - DNA, 725 bp, Homo sapiens
gaaaccatcttctggaaaatgtcttccctgacacctctcctacttttctgagtttgggttgctttcctcctagcactcacggagatccaggaagagaatcccggtgggttctaacctcaacctgtaaatccactaagcaagctcctactgaacacctatgatgcaagctcaatccaagaggccagcacgctgcaaggggaaggcaaccaaagcaatagcttcaatccccttcacacttcatggtgaagaaaacatcctccatgaacatcatagcatggataaagaaggagaatatctgtattttattcactgcgaattgctatacccaaaacagtctcttaacaagatatgtgttgagaactatcggagcattgttgtcataactgctccactgtatgcgtcagatgattttgacatctgtgtcctctcagtattgttattcgaggagtctctttgccatgtgaatgaagatctccctgtttttttcataatgccgaagattttggggcttgcacaaaattgccttgtattcaagttccaagtaccaaccagccttccacgtgttgttgtttcaaagataactctatttgcaaagcctttacgccactgttcagagatttccggagtgtgtgcaacttcagtgaggactggaaagtgggccattgcgcagttcagctctcaggctctttgtaggtaagttgtttgggattagagccacttattca

SEQ ID NO: 467812 - DNA, 858 bp, Homo sapiens
gaatacacattcagatgtgtgagtgtgtgcatcatggacgctccccccgaatacacattcaggtgtgagtgtgtgcatcatggacgctccccccgaatacacattcaggtcagcaaagtggaacgcgagaagaaccaggagctgcggcaggtgcgcgagcatgagcagcataagaccgcggtcttgctcacggagctcaagacaaagctgcacgaggagaagatgaaggagctacaggctgtgcgtgagacgctgctgcggcagcatgaggctgagctgctcagggtcatcaagatcaaggacaacgagaaccagcggctgcaggcactgctcagtgccctgcgtgatggcggccccgaaaaggtcaagaccgtgctgctgtccgaggccaaggaggaggccaagaaggggttcgaggtggagaaggtcaagatgcagcaggagatctccgagctcaagggcgccaaaaggcaggtggaggaggcgctgacgctggtgatccaagcggacaagatcaaggccgcagagatccgcagcgtgtaccacctgcaccaggaggagatcacccgcatcaagaaggagtgcgagcgggagatccgcaggctgccacatatcgatgtcaccttagcaacccaaggacccggcccaaaccagcactcataagaaccgggtgctttcttcgcgtgacacgatgcttgcttttctgtgcggggaaggaaggaagcgttgccactgtcccgggaaggtgggagggacaggtggctgcctctgcccagtgccacacgaccctttcatttgtcttggttggattcgatgctctcagtagaggaaggcagcttttttcttaagtaaaggctc

SEQ ID NO: 467813 - DNA, 1130 bp, Homo sapiens
ggaaaatggcataacaataagctaatttttaaaaaaagacgacacaaaagaaatagcgatgatcaaaatagtcaaccatggccaggtgtggtggctcatgcctggaatcccagcactttgggaggcccaggatcccggcagcatgggctgtgttctgggagctgctgccccggacgggcacagcgggccgcccttccaggtggctcgccacagctcctgctccagtgcccttagcaaacatttcctagacacgtctcctggtccaggcatcgtggacctccctggggtggctcgctgcagctgggtctgcgtttccccggttcccgtggacatcctcctcctgacccagggtccccacccccccctgcgagttggcggtgtacggagctgtgtgtccccaccctcccgtcccgccccccgcaggctggcggtgtacggagctgtgcgcccccaccgcgccacgagctttcagtgcacagaactgagtgttccccaccccacgccccgccctctgcgagctgagtgtcccctcatggagctgtgtgtccccccaccccgccacgagctttcagtgcacagaactgtgtgttccccaccccccgccccgccccccgcgagctgacggtgcatggagctgggatctagattttgacttattttgaatcttcagattgttgtctttcatcaattctagagaattctgtcagtatatcttcaacttttgcatctggcaagttttccccttcatttctccttctgagagacctactcattctatcttttatctctcgtagcttcttctctgggttctgcctctttgtttgtttctttgtacttaattccaggtaatttgttctcaattatcttcagagcatccgtcctctcatctgttgtccaatctgccaccaaaagcgtccattgtgccttttgttttaatttattacatttgttatttctaagagtgttctttttattcaaatttggtatatcaccttttatagttttctactccatgaagttattttcaagcttgtaacttatttcttcaaagaaatagaaaaagtttatgtggtggggagtaagggtatgtgggaattctgtgcactttctgctaactttgctgtgaacct

SEQ ID NO: 467814 - DNA, 1110 bp, Homo sapiens
tccagaacaaagggcagtgtgtctggcactatgacagtgagtgccgggcgctggccttggtgggaacaggctggccaacccacgtggcactccttgcctgctccccgtcccctgtgggtccctttggtcgctcaggaccccacacctgccctctccaacccacactcatcaggcgctcagacctgcagcttcctaacctgctgcatgtggcctgcgtcgaaagtggcttccagcagaggacacttgggagggacacagccacacccaggacccaaggcccgggtgagatccggaggctgtaggaacgctaaggggcggtgctggtggtccaaggacgtcccccgcagagtggaccaggaagaacgtgtcagaggatctctgcgccgcagcatctgggttgcatcctgtgagagacgccgcgggagcccagcagcacggcgttttctgagtgtggccccatgggcagcagcattccttaatatctggaatatgctgacgcctttcttcctggatctattcctgagaaggtggtcactgagcttcctcttccgagacagcctggcgctctggacgcttggcttccgctcgctggctcgccgacgccctctgctgtccacggttgggagacctgaaagtcgcaagagcgtgcccgtgacaggaggctatctgctccctgattctggaaagatggccgtaaggtggaaagttcctgggatcctgtgggacccctgcccgacaccacaacagtaacctcaaagcactgttgcctacctggggagaatcacgtagattagtgccacatcaaaatctcgaaacatttgggggtggtgatttctttaattcactttctggcctgcgtggaaacagatggatgatggggcaggactctgtacgtgtcactattaaaacctctttgaatattggaggctgatgtggttaggctttgtgtccccacccaaatctcaccttgcattgtaatccccaggtgttgagggaaggacctggtgggaggtgattggatcacgggggcactttcccccatgctgttcttgtgatactgagtgagttctcacgagatttgctggttttataaggggctcttcccgcttc

SEQ ID NO: 467815 - DNA, 2633 bp, Homo sapiens
ctgcgctattctgaatattgtagtttgattgcactgtggcagcgagggaaggagggaccggcaggcagtggcatgaaagtcagccctgctgcctctcctgcctgtgctgttcctcagcaccagacctgggccttgggaaaacaaggatggtttttatttgtcccagctccttgtgggaaatttcagaactcccccagtgagagaccaaaacctttttatttcaaaggtgctttgccctccagccttagtcatagcgaggagatcacagaggtacaaaataaagaggaaatagacaaggagggaattgtcaccaagcattgtcctcataaaaaggtgtgtcaatcacagcaatgtttcaccctcaatgtcctctgtctcaagtgtaggattttaggatacttggagccagagaaaaccagttggcctggggatgctgacagcataaaaacgtccttgggctccagtaatcactactttaaggtttccagttggtgagggaaagtaagcatttccttctcagtgtcttctgagctggggtcattaaacagcacacaaagtgattagaagtttgaagacaatttcacaatgctgatgtcaatgcctgcagttagaaacaattaaaatattgattttttttcttattggatgagaatttactgagaatttatgtacaataaaatgtgtaaattttatgtgtactgttagttgagatttgacaagtgaatacaccatgtaaacatcaactcagtcaaaattgacagcattttcatcttctccagaaagttccctagtagttctttttagttaactctcctcttccaaaagaaaaacaaaataagtgaaaagtttactctgcatcatagatttgctttgtctgctctagaacttcctgtaaattgatttatggaatatgtagtttttttacatctgacatctttccacaacatgtttttaaatttactcaaaatgttgaataaatcagtagtttgttccaatttataacagaaaaaatactccaatgtattaatataccacaatttatttatttattcacccactgatgaatatttggttgtttataattattgcctattatgaataaagttactatgaactaatttttaaattttttttgaggattcaggtatttaattcctttatgtaaatgtgtcagagtgtaattcctgggttataggatagctgaagaaatacaaagttttcaatattttatttttttgtacataaccttacaatgtcccattatttgaaagtcaggatattaaaaatagtctttctttttaaagtaacatattttgtttgcagaatattatatttatatatagtaaatttagaaaatataaaaaagattttagaaaagagagccttttgcaatctcaccactctaaaagcctattagaaattattttaagctattctccaaaatgggatcacttttagtaactcttaaaatgctttgtgaataaatgaatgtatgtcaattcacttatatatttgtaaaattatcaaaataagtcaagttctgaaggtagattaaataaaggaccatttgattgtgaaatgtataattcacatttaacaggcttccacattgcagagggtggtaatgagactcagtctatcaggttagtacatttggattgacaatttagttccaaattagaatcctgattgccagtaatctcaggcaaatgaaccttagagaaaacaacattatcttatttgaggttctacctaatctctctgggaaatttttcaatgaacttagttttcagtatatgactacttcataactttataatatactaacattgaccttattaaaatatttgtaatcatagagctttgaaacagtaggagatagagcctgagatctaagagaaaaggttagttatatgtgtttttatttaaaacatttcttaatgtattcccattatgtgaaacttcccccaaaaagtcataggttacatgagtcatacagtaaagagctgaatttatgttccttatcatttatttcatgaatcagtcagaaattaattttaccaaaaacaagaatgttcaacagatgctactgtgtgataagagtctacttctcaaattaattatcatgaacactgaaagtgcttcaggaatacaactgcctagttctataatttcctggctactgataaaaattttcaatgtattttattaggaaaagtaatacattaatatattttaaagtaaaatatggtttttactgtcttgcatattgcaattcaagtcacaactgctggtttctcatgcaagtcagtcacccaaggtaatataatgtgattgatgtaatcagaatggtttgcttataaggatgacatgtcctcttgagaatttaagctttggtgaaatatgttggcagtaagcacttcccttacagataaaactttttctttaaaaacattctaactgtataaatttctagttgaaaaatagaaaagttgaaaagtttttctatttagaaagtttttttctttctaatgccaagtttaaatgtattatctaaagtttttgcaattgtagctcaaataataaaccattctttaaatttcactgtaaactaaaaatatgatactttcatt

SEQ ID NO: 467816 - DNA, 465 bp, Homo sapiens
accaccatcaagaggacaaacaatgaaaatattcccctggcatgtcagaggtcttcatggcagcccctcccatcacagccccagaggcctagaaggaaaagacggtttcatgggccaggcccagggtccccatgctgtgtgtactgcatcccagccactccagctatggctgagaggtgccaacaggggccaatgtagagcctgggttgtggcttcagttggtgcaagccccaagccttggcagcttccatgtggtgttgagcctcctgtgaaagcagccaagagggaagctgtaccctgcaaagccacaggtgtgaagctgaccaagaccatgggaatccacctcttgcatcagcatgacctgtatgtgagacatggagtcaaagatcattttggagcattaagatttgactgtcccactggattctggacttgcatagggcctgtagcccctttgttttagcc

SEQ ID NO: 467817 - DNA, 611 bp, Homo sapiens
gcatacgtatcttctccaatagccatgagcttctcaggaggggaaattgccaaacccaaaatcctgattgatcttatcactgccatcagcaagctgcgtccatgggtgaggaccttcctctcaggggctgtgtgctctggaaaacaagaggagcaggttcacagcaaagttgagaggaaagtacagagatttccgatatacccccgcctccacacacacacagcctcccctatggccaacatcccccaccagactggtacttttgttacaattgatgaccctacattgactcatcataagacccaaagtctgtcctttacactggggttcactcttagtggtgtacgttctgtgggtctggacaaacgcatgatgacgtgtatccatcattattgcaccatacagaatagtttcactgctctaaacaccctctaggaaagccttttacatggctgtaactgtaatgtatatacaattttgtgcactggttttagatttaacattaaatagtaaatgaatagtaaatatcactttttaatggcagcatagtatgtccttaagttcctgtgtacttggcacttgggcgacttaagccacaaggactcagtaac

SEQ ID NO: 467818 - DNA, 664 bp, Homo sapiens
gagtaaaaccaggaacagccaggatcctgccactgtctgatcatatcactaatgtctgtggagcgaagagcagttactgcctctaaagctccctctacaaaagagttgagggtcagttgagaggtctgggacccagccatatgaacgatcaggagcaccatctggttttaaaggtgcagcccccgcatgtgaaaatgcacagcccaggcccccgatcccatgtgggggcactcaagtttgcacagcggaaaggggctggccgtgtggtgcacatctgcaatctccctgaaggaagctgcactgagaatgacgtcattaacctggggctgccctttggaaaggtcactaattacatcctcatgaagtcgactaatcaggcctttttagagatggcttacacagaagctgcacaggccatggtccagtattatcaagaaaaatctgctgtgatcaatggtgagaagttgctcattcggatgtccaagagatacaaggaattgcagctcaagggtccattttgtctaagacccacaggccttaatccaccttcaaggttgaagttagaagacaaaggcttagtggatgtttctggctaggactggcattctgacaagtctccatatgtagatgggcactgtgtcaaccagcttccagagtcctgaat

SEQ ID NO: 467819 - DNA, 583 bp, Homo sapiens
cacatgcatgtggagagagaagaggagtagggagagagagggcagcatggaggcgtgtggattctgcagcccatctctctcccagatcatatctgcccagagtcaggagggacttcacattttggggaaaagaaacagccctggagggctgctcctggtgggcatacccctgaacgggctgaacagccttgcactcatgctccagactgagaaacagccctgtaggccacccctggcccaggatgcaggcacactgctgctcaacttgtggggtgtgtctcctggggcagcccaagaggctgtttctcaggctcaggatatggtcacatggtttgtcagctggcctgtgggtgtgtctgctgagggggtgcccatggggctatttctgaggtttgggatttcggtccaaggctatcaggcatcccatggaagggtcatgcctatcagtggcatcctacggaagaggggctgaaaacttgggagacagatgaacatccaggtccaggaagctcaaagaaccccaaatacattcaacccgaataggtcctctctgaggcacattatagtcaaactgtcaaaagtc

SEQ ID NO: 467820 - DNA, 1227 bp, Homo sapiens
gagaactatcctcatcactgtgttgaaatgagaaccttggaaactcaagccaatgcacaccaatcccatgtacgtggtttatgctccatgcaaagcatggaagagcaggaagtggtctttcttccctgtaggagccgacatccttcttctcaatggctctccatatcctcacctcgcccccactgtctgggaaatgctggagagaaataaaagaaaatgccccctgaagattgagctcccagggatgagggaggcaagcggcctggaagagttctggaaggtaacgaagatagaggaaaggggctgtgaagaggcggcatggcagcgagtcatgggactggctgtggttctggagatgagcgaccaggtcaccagcgcatctgctatctctggtgctccagctctggctttctcaactcgggggatgcagacagcagcagctctgcctccatttctgtggctgttcctgccgtctgctgtctgtgcccagttggccagcacccatcaggcggaggatgatgtctgcatcaaggtgctgcctgctgtagcaaatgagtctgcaattgtttaccctccattgacaggatacacgtgggtctttgagggttgggctggaatatggtttcatgggcagctgcatgtgaagcttctacccgttcctgacactggcttgtcgtgtttggacaggacttggacaactccacttctctttttttctagtctacttatttcttcatgcaaggccttctcatccagatgtggctgaaaagtctaggatagacatagtttatgggatgtccttaactgctggggactaacatggtagatttgagcatgggctctggagccagctgcttcagtttgtatcggctgagtgatcctggccggccacgtggcttcacttccgagccttggtgctcatacgtaatgtggaaatgataacagtgtctacctcacatcattgctatggagattctctgagttaatttacatgaaatgattagatgagtgccaggcggagagttgacctgtaggtcaaaaaaatgttagcaatgattatggtgacttcagacttattctcctgtttatttagattttgtttggttggtaagttctaatctgcatacactcttcatggactccaaagagttgaaaggataaagaataaaagagagtattatataaatattataataattgcaggtttgaattcctatattagtcttt

SEQ ID NO: 467821 - DNA, 666 bp, Homo sapiens
attcacaggagtgtgcttgggtctatccccatccaatctaccatggcgggggatgggggccttagtatcaactcactttcccctccatattcctacctcaccaatgcctcaatcagagatgtccattcagctgtcactctcctgaaggaagatctggaagaggcaccaaccatctgggctttagcctgtgttctcttctctgctgctttatgcatccaagttctgggttcctcaacctttggtgaagccctgcttaatgcaagttggaaacctgagtgtcctgaggaaggagagagcatattgaggaagggggaccctgatgtcatgttagatatatctgggccagttttactgaggtgccttggaagtgacagaaagcagatagaagaatggttctttcttggctcagtagttctcaatcctacttggggtgatttctctgaaaagtctaatttttatgtagatggggctcaggcatcaaaaaaatttaaaatgactctggtgattctaatgtgtagccagagctaagaacccctatcttgacgaaagtagttttgaaagagaatgcaaggtcccaagtggagctccaaggatcagctcctgggaagtggcttattttctatcagatatgcttatctgctgccttggccaccaagttcacaatcc

SEQ ID NO: 467822 - DNA, 1016 bp, Homo sapiens
gtaacgtatggctgatttttcaacatttccattgacccttccagggcgtgtgttgctatgtgcggcagggggtaccttcgaagtcgaccagaccgtccccattgaggtccacgtcctggaggatctcgtccacctcccgctggctgaggcgctcccccagcagggccttgagggacgcccggagctcgcccacgctgatgcggccgtccccattgcccctcactcacggcagacacgcagcctgcccgccttcagccccagtgccgcactcttccggaaggcgtcccgtagctcccggacaccgatcatgtctgccgtctctgccagcagcttggggcccatcagctccacgaagtcttcaaagtccacctttccgccacctggggggccccggcgccagggccgcttggcacagttccccatgggccctgaaccatgccaggcctggaaccccgggggtggcccgggtgggcctcggcggatgctgctgcctgaggactcctgccagcccccagctgctcccgatgagagcctgggagaccccagctgggccctgggctcctcacctcggggtagccccaattgcttgcacttggctccccctgcctggactggtgccccgcccttggatgaggagcagaagggaaccgcctatgtgctgtgggcagtgacagggctcggctgcctgcacctgggcctcgagctcccggagaagctctcgtcgccgggtggctgctggggctccaggggcctggctggttcctggagtgcctcagaggggctggggtcccgttgggaggctgccctctgctgggccctggggctgggccatggagatgagggcttgttgaatctagaacttggtacctggtaagcaccccaaatagaaccatgttgagaatctacttcgtaaccaccaggataaggtaaaaaagacggacactgaccactgtgggtatatagtcaagggaaccaaaaacataagtttggggccaggcaaacataagtttggctct

SEQ ID NO: 467823 - DNA, 447 bp, Homo sapiens
taaaatccaggccagtgggcgcttaagcaaggaggccacatggtccctctgggggttgctcaggccttgagggccctggaattttacctggttttcgttgtgctacatcttggtgacaagctgtaccttcaaaacctctcggtattagtcaggggaccacaccccagactgctgcagacccagcctggtgaccgctctgctgcaactttgacctcagaggctgcagcctggtcctctgattctgctggctggcaacaccagaccactgttcttggtgcctctctgagacagagatcccagaggaaggagcaggcagccatctttgtggttctgcagcctccactggtgacacctccaggtgtgggaggaacccagatgcataggatctggagtggacccccagcaaactgcagccaccctatggaagaggggcctgaatggtaaaag

SEQ ID NO: 467824 - DNA, 703 bp, Homo sapiens
gcttccctggtgttgaggttcttggacctggactgagccatgctactggcttctctctttccccagcttgctgatgcctactgggagacctcaccttgcaatcctctgccatgtcatgaggacactcaagcagccctgtggagaggcccacatggcaaggcactgggcctcctgccaacagccggtgagcagctgccctgtgaggaagtcatcttagaaatggatcccgcaacccagtggagccttcagatgaccatgcaatgtggtttacttaatctgattagccagagagagggaggatttgagtgtgattctaaacctgtacagtacagcaaatcgtatcagcgagttcagtcctgggaaaggggaggggaggagcagggtcaccctgaaggctcagtaaccaaggactgggctgcagcagaagcttgcagtgtaggaagagggtccaggaaggaaccaaaaagccctaaagtgaaaatgatgtacaggtagaccacctggatgtactgtcagagcatagaaggtggctcctaccatctgtagaatgggaaccatgattgctgtttctctcaaaaggtttgtgcaaaacccacaaggttcacttaatacccactgggaggagaacccagttttctgtccaaacattttagcatttttctctttcttttcctctccccctttaaaaatgtttgctcttaaa

SEQ ID NO: 467825 - DNA, 483 bp, Homo sapiens
tcttcagtgacctgaagactagtagacatgttcagaccaacagaaagaggtcaaagggcatggatggatttgaacatctggattgtgttagcagcagctgtgggaagtggcaaaccagcaggaaggtgtgggcggagagggtggtcagactgtggaatgatgtctggaaaatggaagctctgtttaccgacgccttctgaggagcaagaaagccagtccgagtcccaaaacctcaaaagtagggaagccgacagtgcagccttcagtctgtggccaaaggcccgagagcccctggcaaaccactggtgtggagacaaatggaaccaggccttggatgacatcaggaatataatggagcagaaagctactgacctccctccatggatagatgcaccaaataagcatctacccacagatccatttcctcggaaagtcagagaccagttgagagacacctatccaccagacaaatgagaaaatgtt

SEQ ID NO: 467826 - DNA, 847 bp, Homo sapiens
tgtgacgcagggctgaggagtcggcgagtccctatctgcatggagttatcatggctttcacaggtcatccctgagagctcaccagaatattttgaatttctagttttgtctcacactataggacacacaccacatgttttcaaaataactttgagttcaaaagagttccctaagataacactgtataaccccagcacagaattaatggttttgaagactgttttctgtgaagagttgcctaagagcccgggctgcacagctggaaacctggaggtttttgctacctcgtccgccctctgctggatggaccgacgtctgcttacgaagtggcccacaaacagccgaaagactaagttgtgtcagatcattgtctcttccgcagtacaggaagagaagctaatctataaaacaatgagacttcactctggatgccaaaatctgcaattacattgtacggaggggcttcatgaataattcctggggtatgatctgacattaatctggaagttaatacagagctggggcattgccagcataaagctgactgatttctttataacagagcactttcaagagctacttttatttctgattattcatgcattcttaaatttcaccttccaatctttgctgaaatttctgaaagtggcctatgtttcaggtaacattgacgatttttttaatagaattttaaaggaggggtttgctactgttcttgtgtggttgtcattctaaatgtctccctctaaaggagatacttttaaaggactcgtttggaggatggataagaaggcaacagaacagttaggaggtttgcaataaacagtgtctgtagcaatacaagctt

SEQ ID NO: 467827 - DNA, 722 bp, Homo sapiens
cagggccattaggtgggatcccacagctactctcggctttcggctcggaggaggccaaggtgcaactttcttccgtcgttccgaatccgggttcatcccacaccagccgcctccaccatgccaccgaagttcgaccccaacaagatcaaagtcgtatacctgaggtgcaccggaggtgaagtcggtgccacttctgccctggcccccaagatcggccccctgggtctgtctccaaaaaaggttggtgatgacattgccaaggcaacgggtgactggaagggcctgaggattacagtgaaactgacaattcagaacagacaagcccagattgaggtggtgccttctgcctccgccctgaccatcaaagccctcaaggagccaccaagagacggaaagaaacagagaaacattaaacacagtgggaatatcacttttgatgagatcatcaaggttgctcgacagatgcggcaccgatccttagccagagaactctctggaaccattaaagagatcctggggactgcccagtctgtgggctgtaatgttgatggccgccactctcatgacatcatagatgacatcaacagatgaagaaacagctttaagttggttgcctaaagtcacgcaggtaattgatgcagtatggccagaacccatactaggcttaagggacagtgtaccataaactcgtagaggtcctttaaacagatagaaacgctgtg

SEQ ID NO: 467828 - DNA, 656 bp, Homo sapiens
cagaggtgaagctgctgtttcagaaacggtttcattgctggtattcagctattggtctgatgaatgcgttctctggctacgtggttacacgtggttagtgaagaccatgaggaacagtttgcttccagctggctggggcagcaattcaccatcactctctcacctcagaactttatcaaccttctgattttatgtcataatctgatctgcagaaatcttggctgcctctccattcaccaggctatgactcccatcgagtgttttgatgataccaagctgattggatctgatgagcaggaattagtgtctactgtcagcatttcagccaccacttgttaccaaggtctgtcctatacctcacattcctcttggaatgagcccctttttgccatcaggaccatatggaaagcccagaagagggagtctgtgtattcagcacatggatttccattctctgagtcacactaagtgatgggaatacagtcatggacaatggttactttgaaatcctttctgttagatctgacatctggtcatcttctgggcagtttctgctgcttgtttttttctcattgtatgggttatactttcccatttctttgcatgccttataattcttgattggcaactagagtttagataataaattgacgcaa

SEQ ID NO: 467829 - DNA, 505 bp, Homo sapiens
gacatcggtatgcccaaggcccataccctgctcaggcccgaggtggaccctgagccaggccgcatccagtggggagccctgcatgggcagcaggtgaagccccttggagatgcccagggatccaaaggcgacatcattgatggcaaggctgcccctcttggtctctggggcaccctggttggaagtttagaagccctaaaggacagctacaattgtggcagctgtgagagagcagctgttgttgatccacacacgggccagaaggtttattccgagagccttctgtgccgaatgagcgcagcagccaggtgcaaccggaatgacggatgggaaccaacagatgtccctcccacatggcaccagcagccagggcccctgaaggccactgttcaccttggccctcatcctgcaaacatcaatacacctcaccacattagtgtggatgtctggagaaagtgttgagactacattggcatctaaaaattccagttgtgtcgaacgtagc

SEQ ID NO: 467830 - DNA, 518 bp, Homo sapiens
ttcctccagcatcaaccacctgttcctgctggtttattttcttctccagggaaaaaacaaagataatcaatgaaagttgcaaaggggagctttggcttatttttgtccctctacctatcagagaataccttcttctctgagagatataattcaaagggaaagtttgattcccattgccagtgtttgcagcagagtgtttgtgtccctgggtacttgagattagggagtggtgatgactctcaacgagcatgctgccttcaagcatctgttcaacaaagcacatcttgcaccgcccttaatccatccaaccctgagtggacacagcacatgtttcagagagcacagggttgggggatgaaattggctggagggaaatgtcacgccggcatgtgcagtctgacgggggacagctggctggaaaggcgtaaatcagaaaccagcctcacctccttgctgtggaaattgccaccagaatgcttataaatagcgctctctgttcccagttctgtcagggggag

SEQ ID NO: 467831 - DNA, 2653 bp, Homo sapiens
gcagctttagaacgatttcaaagagaagaagatagtgtttcagtttctgatgcccctggaagctgtgtaatagattgtaaagacaagacagggaaaaaatcccagaaagaaacggaaagtttacattgcgaatatgtagcagagccagtaatggctcagtcaacgcaaaatgttgactataatcaatcaattacagggggtgatatatcctgaaacattaaaattagaaggaaaaggtccagaattagtggggccatcaaagtctaaaccacgaggaccaagtcctcttccagtaggtcagatgcccgtaacattacaacctcaaacgcaggttagagaaaataagacccaactaccagtagcttatcaatactggccaccggccaaacttcagtatcggccacccccagaaagtcagtatggatatccaggaacgctcccagcaccacagggcagggcgccataccctcagccacccactagcagacttaatcatacggcaccacctagtagacagggtagtgaattacatgaaattattgataagtcaagaaaggaaggagacactgaggcgtggcaattcccagtaacgttagaaccgataccacctggagaaggagcccaagagggagagcctctcacagttgaggccagatacaagtctttttcgataaaaatgctaaaagatatgaaagagggagtaaaacactatggacccaactccccttatatgaggacattattagattccattgctcatggacatcatagactcattccttatgattgggagattctggcaaaatcgtctctctcaccctctcaatttttacaatttaagacttggtggattgatggggcacaagaacagcaagttagagctatctgccttagagcctgggaaaaaatccaagacccaggaaccgcctgcccctcatttcatacagtaagacaaggtttgaaagagccctaccctgattttgtggcaaggttccaagatgttgctcaaaagtcaattgctgatgaaaaagcccgtaaggtcatagtggagttgatggcatacgaaaacgccaatcctgagtgtcaatcagccattaagccattaaaaggaaaggtttccacaggatcagatgtaatctcagagaaacgagcaaaggggccagcctcaggccccacaacaaactggggcattcccaattcagccctttgttcctcagggttttcagggacaacaacccccactgtcccaagtacctcagggaataagccagttaccacaatacaacaattgtcccccgccacaagtggcagtgcagcagtagatttatgtactatacaagcagtctctctgcttccaggggagcccccacaaaaaatccccacagggttatatggcctgctgcctgagggtactgtaggactaatcttgggaagatcaagtataaatctaaagggagttcaaattcatacttgtgtggttgattcagactataaaggcaaaattcaattggttattagctcttcaattccttggagtgccactccaggagacaggatttttccatttttactcctgccttatattaaggttggaaatagtgagataaaaagaacaggagggtttggaagcactgttccaacaggaaaggctgcatactgggcaagtcagatctcagagaacagacctgtgtgtaaggccattattcaaggaaaacagtttgaagggttggtagacactggggcagatgtctctatcattgctttaaatcagtggccaaaaaattggcctaaacaaaaggctgttacgggacttgtcggcgtaggcacagcctcagaagtgtatcaaagtactgagattttacattgtttagggccagataatcaagaaagtactgttcagccaatgattacttcaactcctcttaatctgtggggtcaagatttattacaacaatggggtgtggaaatcaccatgcccgctccattatatagccccacgagtcaaaaaatcatgaccaagatgggatatataccaggaaagggactaggaaaaaatgaagatggcattaaagttccagttgaggctaaaataaatcaagaaagagaaggaattagggtatccttgttaggggcggccactgtagagcctcctaaacccataccattaacttggaaaacagaaaaaccagtatgggtaaatcagtggccgctaccaaaacaaaaactggaggctttacattcattagcaaatgaacagttcaaaaagggacatattgagccttcattctcgccttggaattctcctgtgtttgtaattcagaagaaatccagcaaatggtgtatgttaactgacttaagggccgtaaatgccgtaaatcaacccatggggcctctccaacccggattgccctctctggccatgatcccaaagactggcctttaattataattgatctaaaggactgcttttttaccatccctctggcggagcaggattgcgaaaaatttgcctttactataccagccataaataataaagaaccagccaccaggtttcagtggaaagtgttacctcagggaatgcttaatagtccaactatttgtcagacttttgtaggtcgtgctctttaaccagttagagacaagttttcag

SEQ ID NO: 467832 - DNA, 1148 bp, Homo sapiens
gagcaccgtcgagtcacaagatgaacaaaatgatgatgtcagaagaacagatgaagttgccatccaccaataaggcagagccgctgacttgggcacaactaaacaagctgacgcagttagctacaaaatgtctagagaacacaaagatgacacaaactccagagagtatgctgcttgcagcattgatgattgtatcaacggtggtaagtctccctatgcctgcaggagcagctgcagctaattatacctactgggcatatgtgcctttcccgcccttaatttgggcagtcacatggatggataatcctatagaagtatatgttaatgagagtgtatgcgtacctggccccacagatgatcgctgccctgccaaacctgaggaagaagtgatgatgataaatatttccactgggtatcgttatcctcctatttgcctagggagagcaccaggatgcttaatgcctgcagtccaaaattggttggtagaaggacctactgtcagtcccatcagtagaatcatttcttacatggtaagtgggatgtcactcaggccacgggtaaattatttacaagacttttcttatcaaagatcattaaagtttagacctaaagggaaaccttgccccaaggaaattcccaaaggatcaaaaaatacagaagttttagtttgggaagaatgtgtggccaatagtgcggtgatattacaaaacaatgaatttggaactattatagattgggcaccttgggtcaattctaccatgattgcacagggcaaactcagtcgtgtcccagtgcacaagtgagtccagctgttgatagcgacttaacagaaagtttagacaaacataagcataaaaaattatagtctttctatccttgggaatggggagaaaaaggaatctctaccccaagaccaaaaataagaaatatccaaggggggctgttagagacaagacttatgccagacttacgatctcctatatatatgctaaaaatgtattggtattcttttgaaaaagaaaagcaaaagaattcaagtattcacccaggaaataatacaactaggttattgtgtttgggctcatataaacacagaaacacagagaaatcagcacaaactccttttgcaaaccagttaacgtgatttc

SEQ ID NO: 467833 - DNA, 679 bp, Homo sapiens
ggcacgtgtgggcaaggtttgcaaactatatcttcaaccagcttaagaaacaaagaacctccagtttccttggacaacttcttaggagaggaggagagattgtaaagcaacaataacaacaaatttctcagctaagaaagtctcaaagttcccgctttctacaagattgttcttgttttagaaaggaagactggatcatgtagcaatgactgctggtgacctattcaatgtccaccaatattcttctgtattaccgaaactctgcttcttttggagtatcaatacacttcattttccagcttttgttgcaaccagcacagccatatttaaaaatccagttgagatacatctggaagactttaaaaactgggaaagattctcatctggatgggatggtttaagtgtgatgctgcttgaatttggagccaacggccataagatctttccaggccctttttttgaattgccagagctctatacccttataccagtgatccttacttgggagtggtttgggtttcccactcctcccaggagacatttggcaatatctgaagtatcctacaatgtgcaggacagcccctacaacaaagaattatctgttcccaaatgtcaacaggccaaatttgagaaatactgccttatgttaacctctttttgaacctgagttactttgcac

SEQ ID NO: 467834 - DNA, 669 bp, Homo sapiens
ataattaatcttttctgcgttccgcaaggaccatcctctgcagtgttcagcatttggctgggactttgacgttttgttatcgccatcactctctttgttttttggaaaagaagaaaaacccatccgtggcacatggaccctacacgggggcagcatcccataaaatgacatgctgtgtatttgccaaagaagaggacggtgtgcacgggaagttgtgggaagagattctggcaaagctgatgcaatacgtggttatggattagaacaaaaaggaaacaaagctgacccttccaaatgtggggttctgagtgaaaagagccccaagcaaccagttcacccgcgtcaaagggagaacatagtcaagagtggctatgcagaaaagattagcagcaacaccatcaaggtcatcgtcatcatcatgctcattgtcatcatcatcacttctgtgaagattaatcagacacctgaaataagtcaaaagccccagaaaaaaataaggtgcatagatatgtatcacacagaacatagcattacccctgcctgcaaaaagacagcaaagagaaagggaatgcttgtttaatgttctgagtgctgggccttgtgctaagtacttctgtggcatacacgatactgggccttgtgaagaggttaataggcaaaaggcttgag

SEQ ID NO: 467835 - DNA, 558 bp, Homo sapiens
tcctgaatagatggtctggactttgaaatgggggatacttggtacttccccaccgccaaacggaggactcaggcctcggctcagattgggcaagaacaaaccacacccctgccatcagccaagctccttgcctaccctgagtccatagctgccctttccagaggagacctgagggtgcacccacgtaaagggggcaatttcaatgcacaaaagaaatactactatagctgtgaaaaggaggcccgtgacatggggctgtgttttcctgtgatattagcaaccgatgatgattattgtccaggtatggaaaatgttatctgtagaaggaacaaaagtcaaacatatgatgtgtcaacgaatgactttcactttgattttgaaaacaccaccaagagtttggaatggaaagtcaagataagcaagaaattctaacgcacattgatttgtcctagttcttcagtttgggaatccttttgtcttttattcaaatgcagaatccttataatttgttattatttaaccatttcttgatgagcacctagaaataaacttctcttc

SEQ ID NO: 467836 - DNA, 930 bp, Homo sapiens
gaccacacataccatttgcctcaatatgtcaaccaagcaagttcctgttttttatgacgacatctgtggacctaaacttggcactcagcatagcacatctgtgccagaaattgcaaagtatctggcagaaaagctaattaggccaactaatcttcatggcagtaagtgtctttcatataaccttgcctctgctttctccaaccagttgctgttggttctgcctgcagatttctgggccaaccccaaaaggggcaagaagcagaacagaatcctcattcttgctgctaacagatttaaaccagctctcacaagtgcctctaatgaatttggctgcttattgggcttatcaaatataggaaagtttcctcgtagagtggaagaatttcaagatgtcttcagtactgcatcacctataaatctggacttcattatgaatcacaaccaggaggataggcccgtgaatctacttccctgtgactaaattattcgttttattcatactattttctccctagaccaatagttcccaaactgtactaggataattcctgggacaaatcatctggcttgagaggtgggaaacagccaatacagttagccagctctacagtagccttgaaaacaaagagccctgtgatcataatgaaaacaatcatcctagaagctctgaagaagggagaatagctttggagctcccctaaaacattcccagagaactaccgtcatttgcctagaagttccctggaaacttcctctcgaaggggttgtctttatttggcctgaaccagtgatcactgactgtgaacagccattctccagatgtgtttgtcaaaaacaatcagcagtaactatttaacattaaagctgcctaaagctgtgataacatttggagacaaaaagaagctagccaaaaaaacttaaaaggaaaat

SEQ ID NO: 467837 - DNA, 791 bp, Homo sapiens
gatttcatgacttacaagatttgaaagtggacagactgacagcttcactgctaaggagcttctaagctgaaatgaaaactggaatcccagactttttcccacatctgcctcccactctctcatcaattagctgaacccaatggaaagccaatggacctgggagcccgggaagcacagaccgggagtcaaccctcctggatacagagcaaggcaggggcaggatgaggaatggatctgtgggcagcagacagagagaggcccagcatagagagtcagagatgctgtgaagaggagaggagaggagaggagaggagaggagaggagaagagaggagaggagaggagaggagaagagaggacaggagaggagaggacaggagaggagaggagacagaagagaagagaaaaggcatccaagcaaggatttgaatcccttcaaaatctattgattgaaatgcagggagaactagggtatccttcagccatttccacagaagctaaagagagtgaactgattaccttgaaaagatctgtggatgtggcttttatcaaatacagtgacatccaggagcaagctgacaaaactactcaactgcaaacaggagctacctttcatgaaaaaggaaagatgattcctaggatggaatcacaagccccggggggagatccaagagcctgggaaaattattctgcaatcttgaaatctaatcaagaaacttctatttgctcagatgcattttggaattgcctttaacaggtggcttttacctttcatttctccattttttgaac

SEQ ID NO: 467838 - DNA, 531 bp, Homo sapiens
cctgcctctacaacccattattctgttctagatctcaaacatgctttctttactattcctttgcacccttcatcccagcctctcttcactttcatttggactgaccctgacacccatcaagctcagcaaattacctaggctgtactgctgcaaaggttcacagacagcccccattacttcaatcaagcccaaatttcttcctcatctgcctaatcgccacacaccagcaaaggcaggttttgctatagtacaagccactagcccacctcttagaacctctcatttcttttccatcgtggaaatctatcctcaaggaaataacttctcagtgttccatctgctattctactactcctcagggattattcaggcctcctcccttccccacacatcaagctcgaggaattgccccacccaggactggcaaattagctttactccacatgccctgagtcagaaaactaacatatctcttggtctaggtagacactttcactggataggtacaagcctttcctacagggtctgaga

SEQ ID NO: 467839 - DNA, 660 bp, Homo sapiens
agggatgctttcggtgcaccccagtgaggccaagagcttcatctgtgagtgatgcctccttggggcactgttatcctttccgttgtgccctttagtgctatccccagagaacaggggcagaacagcaaaccttgctccaacgctttgaacaggagtacagctttgagtggcaaccttaatgtggtccccaacaatacgcgtctgactctagactacaggaaatggctgccatatgcaggcaaagaaaaacaggacaggataacgctccctgcgctgagcacctcaggtgcacctcagctcctcaagtcactccttgtgccatttgtgatgccaactggactagtgtatcctttctggcctaagaaggacatgatgaccagggacacagaccccccagggatgagggctgaccaccccaccagaagagaggtcagcagcaagctggagggcctgtttcttggtgtccatggagaagtctatccgagcagtgctgagatggatgaaagggaacacagaggtgcccaaccaggcccccaacgaaggacatagccagctgctgggagctaacagcagatagactttagccagagttgtattctggttggcctcagctgtagagaactacctcacccacttggatacccttcttcacaggatcca

SEQ ID NO: 467840 - DNA, 600 bp, Homo sapiens
agacacgggaatgaggcatcagatacaaaccagcccccagctgactttctgtgaccacaaatgcatagagctttcttctctaaaatttgagaagtaccagggtttccctcacatgcttccccagggacctggctgttggacatgctttctcaccttctcatctcctaaagatgtggataaatttaatctgcaatggctttcgtggggcctctctgccatgacttgtctgtctgcacacagcaaaggagccccaagctttggagtgccttccttgaaattgtctgtgtcccactctggtggctgtgaccagcaagggctggcagggttccccgagtttggatctgctgccaaatgggtcccagttgttggaaatgcataccttgaaattttctacgtccccatgcagtacctgggactggcggggccagagctggcagagctatcttggtggtgtaccctgaggacacctctgagatgactgttggtcccagtcctgtttccttttatggatgcaatgtcttttccttttctgccagtggttcctttctgtttgcttgtcacttagttctctgcattccatgttagaggctgtcttcacac

SEQ ID NO: 467841 - DNA, 620 bp, Homo sapiens
aggaaccgtctttgaaattccgtatgtgtgaaatgagcaagttcacctctccaagcaccagggtaggcagcggtctgtggggaagtgatggcactgggttccgctggcagtcgcatgaaagggcaggacctggaggaggcagcctgggcatgaagtctcagcaagagccctgcagggagatgatgacaccctggaccaccggcgagtgtggggattactcactcagcattgctgatgcagtctggacaggaattagtgacagattaaatgtcagcagaggcagggatgatggtgtgcaacagacacatgaggatgaacattgccaggaagagaactctccttccattgtaacaagagaaaaggagggtaaaatgggaaccaacatggagatattagtaaatgtggagaacagcgagaatgggcatttcctgagagataaaaaagacaagctcaacaggattgaaggcccccttaaggttagtgaacaattatttactgtaacccccatttgtagaaattgtatctattcagtagcctgagctaatgaatgtttattcatttgacacatattttttgagtgcctattatgtgtcattgtgatagaatctcagagaaataaa

SEQ ID NO: 467842 - DNA, 555 bp, Homo sapiens
tcacagtgactccttacccccgcaatgcaatgtgagcgtaacctatgtcattggctaatgcctccccatccccatctgtttccggatttcccttacatacatgacattttatgtactttgcaccataatgctttctctttcacatctgtgcttttgcacatggtttctccttgcctgcaaaatctccccctttcccattcttcaattcaatccttctatttctcctccaagaaagagtgtagacatcaccttctccaagaatcatccctgatattcccaattatcttaattcctggttggattagatgctggtatgttgaattttcaaaagcattaccgaaattgccaaatgttacctgggtgagagggggtgaaattgcccctggagagaaccgctgtcatgcacacctagaagttagaagtgccagattagaagtgccagagtctctggactttcaattggtcatgttttagacatgaaatgtcacgaagataagcattttaatgaaatttctgaaaacacaaattttattaatagcttgtgttcctattgct

SEQ ID NO: 467843 - DNA, 691 bp, Homo sapiens
tccaacagccaacagagtaggtggccagtgaattcgttgctgatcatgggtcttgtcaagggccctgctaccctgcacagccttacagccttggaacaccgcttcccacatccaagctgcttcagctccagccagggctcaaagaagcccagggcagtgccaaggggaaatgtggagttggaacccctgcacagagtccccaatggggtactgcctactggatctgtggaaagagagctgccactctccagaacccagaatggtagagccaccatcagtttgcaacctcagtgtggaaaagccacaggggtagagctgcccaaagccttgggaacccaccccttgcacctctgtgccctggattctctgtatcccaagcggacactacttcactgctactactcagaggctcaaagttctcaagggagatgctttcagtttggttttgcagtaaactgtcaaccctgcaggcctaagctggaaggcaaagccccagggctcattcaagcaggccagagcaagaatggcatgtggtggtgagcttagaggctttgtatttatgcaggaaagaaaatgctggcacttggagatcacaggaaagccagtatattacctatttaataacgatgtttaaactcccactgttctatgagagagagatgtaaaatatcacttaagtgtagctacagat

SEQ ID NO: 467844 - DNA, 543 bp, Homo sapiens
ctgtcttcatcacaccagttttggacattctcttccttggccaaggtgcaccagtatgaattcaaattcaaggccattctacaaactaattgaccagtacactctaaaaagtgtcaagatcatgcaagtcaaggaaagtctgaaaacagtcacagaagtgaagctgccgaccttcacattgagtgttacagctcttaacgcagtgcatctggagttgtttgttcctcctggtgggtttgttgtctcgctggcttcaggagtgaaactgcagacctttgcggcaagtgttacagctcataaaggcaatgtggacccaaaaattgtacagcagcaaaatttgttgccaagagcaaaagaacaaacttttcccagtgtggaaaaggaccccagcggcttgccactgctgactccggcagcctgcttttattctcttatctggccccacccacatcctgctgattggtccattttacagagagccgattggtctgttttacagagagctgattggtccattttgacagggtgctgattggtgcattt

SEQ ID NO: 467845 - DNA, 1649 bp, Homo sapiens
tgagcgtggcactgacacctcgtggagtttgacctttctagaaatgaataatttgatttctcaggaaagtagtgaacgtaaggtggcaatgcaacaagtggcctcattccctctcctttgcttcctggacttctggatcatttcagaaagactctggctgctaggcatgcttacctctaaggcagaccccaaacactgccaagaacaggacacgcagaagctcagaggaggagcaaaacaaaattatcagaggctggggacagactctggcgctcaacctgagctggggactccaggttccctgaatataggagaaagcagagagaaagataagaaagtgaactcagaatcaggaaccaggaaagactgggatgaatcaggaaaaagactaaaagcaaaacgagagaaacagggtcttgctccgtcacccaagctggaatgcagtggcgtgatcacagtacactgcagcctctacttgccaagcaccatggtggttgacaagaacaagcgccttacgaaaggtggcaaaaagggagccaagaagaaagtggttgatccattttctaagaaagattggtacgatgtgaacgcacctgctatgttcaatataagaaatattggaaagacgctcgtcaccaggacccaaggaaccaaaattgcatctgatggtcgtgtgtttgaagtgagtcttgctgatttgcagaatgatgaagttgcatttagaaaattcaagctgattactgaagatgttcagggtaaaaactgcctgactaacttccatggcgtggatcttaccagtgacaaaatgtgttccatggtcaaaaaatggcagacaatgattgaagctcacgttgatgtcaagactaccgatggttacttgcttcgtctgttctgtgttggttttactaaaaaacgcaacaatcagatacggaagacctcttatgctcagcaccagcaggtcctgagaaatccggaagacctcttatgctcagtaccagccaaatccggaagaagatgatggaaatcatgacccgagaggtgcagacaaatgacttgaaagaagtggtcaataaattgattccagacagcattggaaaagacgtagaaaaggcttgccaatctatttatcctctccatgatgtcttcgttagaaaagtaaaaatgctgaagaagcccaagtttgaattgggaaagctcatggagcttcatggtgaaggctgtagttctggaaaagccactggggacgagacaggtgttaaagttgaacgagctgatggatatgaactaccagtccaagaatctgtttaaaattcagacttcaaatagtgtcaaataaaaagtgctatttgtgggaaaaaaagagaaagtaatggtatgttttgcagtttaggttattgtattttatatatgtcaggcgatgtatactaaacatgttgtttaagtattctcatttttaaatttttgtttatttactctttcagttatggagagaagtatattaaaaatttcacactacagttatggactctttttttctcttaggtttgttaattactaaattatttattttaatgctataccattaggcacatacaaatttatattttttcaattgtactgattgttgactttttgataattatgaaata

SEQ ID NO: 467846 - DNA, 924 bp, Homo sapiens
ctattagaagccgtgggtcacggcagagaactgtggaacccagcgactagggttcagctcgattaggacaaacctgggcacttagccatggaggaacaatggcaagcctttagcctgatcgggagtggcaatgggtgcctcactggatcgggagcacagcggacaccctgccagatccggaggggtggaagtcagcggcgggtatgcgagggcggcaaacagcagtggtggatgtgtataatggcccctgcttttgctagtatgtctctccctaacaaaggagtggggctttcaggcataattagaaaggcatgtgaaaacagtaaagttccccagtcacaacttagtggctgggagaagtatctagtgactgcctgtcctaggacccctcggatagtgacagatctggaggacagttgtccaggacaggagagaaagactgagaaggccgcgccagtgtccaggagacagttaacctcctggcccttaatggtcaaacatacccgggggctctgtgagggtgatggcatgggctggcacttgcccccggcaccctcagtcctgctgctggatcatctgattagttacgctcaccgacgtagcagtcctgcatcctttttcccacatttcttgaccacaaagaaaggggtctgggctgctggattcgaatggtcctttaccagtgtgcccaacattgcctttgtgctcagggatgagtcctagagcagggctgggttcctgagtatttcataacaacccagttgccccatcaggatgcattcccataaacaacagttcttgtgcaaattcgtttcagagagggtgtaggtaaccttttgagtcaggattgagatagagttttttgattctccctttacaaacatgggggcctggcaagggtggtggggaacaggtcccatataa

SEQ ID NO: 467847 - DNA, 1725 bp, Homo sapiens
agcccagtgttttactaatattgggaaggatgcacttgctcagaggagagttttggcaggtgcgctctgctggccagatgttagagggttatggggaatgggttttctttggggatgatgtggagcttacagttgtatccaagagtgtcttcctgaactggccagcctaccagaaatgccggcagcctgactgtggggctgagattctctccagcctggtggtggccctgcatgacaacccctgggtatgtgactgtcgcctaagggggcttgtccagtttgtcaagtccattaccctcccagtcatcctggtgaattcctacctgatatgtcagggccctctgtccaaggcagggcagctttttcatgaaactgagcttagtgcttgcatgaagccacagatctcaacccccagtgccaatatcaccatccgggcaggacagaatgtgaccctgcgatgcttggcacaggccagcccctcaccatccattgcatggacttatcccctgagtatgtggagagaatttgatgtgttgacatcttctactggagaagacactgctctgtcagagctggccatacctgctgcccacctggtagacagtggtaattacacctgcatggcctccaactccattggcaagagcaaccttgtaatctctctccatgtccagcctgcccaggccctacatgcacctgattctctttccatcccctcggagggcaatgcctacattgacctgcgggttgtcaagcagacagtgcatgggattttgctggagtggcttgcagtggctgacacctctaaggaggagtggttcaccctctacattgcatcggatgaagccttcaggaaggaggtggttcacattggccccggaatcaatacttatgctgtggatgacctccttcctggcacaaaatatgaggcctgcctcagcctagagggccagcctccacaccagggccagtgtgtagcttttgtaacaggcagagatgctggtgggctagaggcacgtgagcacctcctgcatgtcacagtggtcctgtgtgtggtgctgcttgcagtgcctgtgggcgcctatgcctgggcagcccagggcccctgcagctgcagcaagtgggtcctgcgcggctgtcttcatcgcaggaaagcccccagctgcacccctgcagccccgcagtccaaggatggctcctttagagaacatccagctgtctgtgatgacggtgaagggcacatagacactgagggggacaaggagaaaggaggaacggaagacaacagctgaacaacccaggccatggggtggaaacggcttgggcttcaagcctctgaaaccaaccctctgcagcagctccatccatttatccagcaagtatatattgagcacccactgtgttccaagcactgaacttgacacagggggttcaagagtaaaaagggaaacagagtctttatcttcatgataaaggggacatagtcattatcttcgtaaagttaaagtcaatgaagatttgtccatcaaattaatcattttattatacatggtgattagaaatcactaaatattactctttgcatatacttagcctataacatttacatgcttatacgtaatgtctacgtataatattttacatatattatcctgtaaacgaaggtagacttctacccactttttataggtgaaaaactgcagcctggacagttcaatgatacac

SEQ ID NO: 467848 - DNA, 1251 bp, Homo sapiens
ctcatcacacgaaatcagttttactatgacgtgcctaagcatacttttaaacgccttctttggctttcttctctctggaatgttcccttacttttctgtggccatggctgccatgcctcctctttcctctggccagagagatgacaagttttctttcagaagccactccaagtcatgtcatgcccacagctttcctgtggaccaaagccacaaagaggagggactcacctggcgccaatcccttcttccaaatttcagctcccttgcaaattctgttcactcctcagaggcatcgggagaaccttgctctagactgggaaaaattatttcttcaagtttctttaagacacactctttttttcctgtaatattcaataatttaggcttttggaacattaaagccagaagccatatgagctacttttgtttccccctgctaaatgtttcccttggggctgtgagctcagagctggtgaaaggcttgtttaaaggagaaacgagaaggtcagggaaagataaaagatagcaggaagaaatcccatagcttgatgtttccgaatattattcagacacggaaaatgtcttcttcctctctagtcccccagtatgtatctcgatgccttgcatgtggtgatttctcaacaaatatttattaaatggatgaacaaatttgctgtgtaatattgggcaagtctcatgacctgtcattttgttctctgagctctaaaatggggataatgatactgatgtcacagtgttgctgtaggatcagatgtgattactcacactttgtaaagagttttctaattataatgttttgtcactgttattatgaatgttcttcgagctgagagagtgcttggcatctttgtccaaactatgggtgattccagacagaactagtcaactggaaacaggcttttaccttttccccagagaagctgcacaacttcaatgaattgttttgttctccgaaattatttatcctcctgatgacagtttttatgtcagtttgcttggtgattcctgcatgatgagaattgattttggattagattcttcccagcatggagtaaccggtacagtactgagaaaatgataataatattgtatctcatcttaaaggcatgctttggctatttgcatattttagttagaatttaaactgagttctaatcacatgaaatgttaaggtgtactttaaatgtacgttttgagtattcttaaaaagtgctttccaaactgcctgac

SEQ ID NO: 467849 - DNA, 1181 bp, Homo sapiens
aaggaggagctgcacctgactgaatgttctcagttccaaattgaaatttcctgaagaaagatgtccgacttgcttatcttgagtcactcctggaccaatgatctggaaccagggtctttaattgatctaacagtgggaaccccagtcactcaaccacaaactttaaatacaatgggaataattggatcccgaggtggcaggggtcaagtggcagcactcaaccgtcaaaggcaagggactactgacactggccctgagctgacgttgattccagaggatccaaaacattattgtggtcctccagttaaagtgggggcttatggaggtcaggcccaccagaagcaatttgccttcagctggcaaggccagcaatgtacttttactttcctacctcagggatatatcaactctctggctttgtgtcataatcttattcggcgagatcttgatcgctttttgcttccacaagatatcacactagtccattacattgatcacattatgcgattggattcacctgcactgacggcttcatggggagttctctatgatcagctgatagaggaagagaatactagggactggttcacaggtggttctgcaccatatgcaggcaccaccccaaagtggacagctgtagcactacagccccgttctaggacatccctgaaggacagcagtgaagggaaatcttcccagtgggcagaactgcgagcagtgcacctggttgcgcactttgtatggaaggagaaatggtcagatgtgcgattatatactgattcatgggctgtagccaatggtttggctggatggtcagggtcttggaagaagcatgattggaaaattggtgacaaggaaatttggggaagaggtatgtggatggacctctctgaatggtcaaaaactgggaagatatttgtatcccacgtgagtgctcatcaacgggtgacctcagcagaggaagattttaataatcaagtggataagatgacctgtgctgtggacaccactcagcttctttccccagccacccctgccatcgtccaatgggctcatgaacaaagtggccatggtggcagggatggaggttacacatgggctcagcaacagggacttccactcaccaaggctgacctggctatggccactgctgagtgcccaatttgccagcagtagagact

SEQ ID NO: 467850 - DNA, 571 bp, Homo sapiens
ggacctggctttatagctgtgaaacaatatgcttgggagaggtggacagctgcagggcatggcctctaagcagggtggagaggagactatttggaagcacagtggagggtgcggcgaggaggacacctactcctgtctcactgggagagtgagcaaaatatttatgccagagctagcaattcagagactaagaagacccaatgtgacattagatctagctctgcttcatgtagtgaaaaacaggaccaaggcactcagtcccccagcttccttcacagcagcatccttctctggggactcctttggatggagggagcttccttgttcaagtttatgtctcctctctgcggacagcctgcagccaggactggtggatgaaggtgtacagagacctgaggggccaccatccatgttctcaaggtgtgcactgcagaggattcacggaaacatgggtgggaagggcaccactggagctgggcaatgcatagcccatttccctgtgaggctgtcctgtggagctgtttctggaaactgagcaagtcctgcttgctctttctcccctgaacatgtt

SEQ ID NO: 467851 - DNA, 544 bp, Homo sapiens
ttccctgtgtgtgccagatagatgctaggtgctttccatacgcaaaataagatgctgtcatcaccccaggaacagctggtggactccccattgggatctctgatgatgacggggggagagcagcttcgttgcgggagagagcagcttcgttgggtaggagagcagccacgcagggtggaaagcacaatcacagcaaagtcagaacacagacagcatgagaaattcaaggtcgcaaatggagctgtacaaaggacatgcctgggatacctgaaaagaggaggctctgagaaatccagtgacaatgagaccatgttgcatctaacagctgagtctgactccaggcccatcactagttccaagcttatcatcatcatcatcatcatcatcatcatcatcatcatcatcaccatcatcttttttgagcctatgaggtgtcaggactaagacttatagagtatctcattgaatcgtaaaaaataacattctgaggtgaatattaatattatttattcttgctaggtgaggaaatcaaggctcagagagc

SEQ ID NO: 467852 - DNA, 914 bp, Homo sapiens
gataatgggagtaatattgactctttcacaggccatttggtgtccaagacacacagagccacggaatctcacaggtgtctgagaattcctcctcctgggactctcagaggacccagaactgcagcctatcctcgctttgctgtccctgtccctgtccatgtatctggtcacggtgctgaggaacctgctcagcatcctggctgtctgctctgactcccccctccacacccccaggtacttcttcctctccaacctgtgctgggctgacatcggtttcacctccgccacggttcccaagatgattgtggacatgcagtcgcatagcagagtcacgtctcatgcgggctgtctgacgcagatgtctttcttggtcctttttgcatgtatagaaggcatgctcctgactgtgatggcctatgactgctttgtagccatctgtcgccctctgcactacccagtcatcgtgaatcctcacctctgtgtcttcgttttggtgtcctttttccttagcctgttggattcccagctgcacagttggattgtgttacaattcaccatcgtctagaatttggaaatctctaattttgtctgtgacccctctcaacttctcaaacttgcctgttctgacagcgtcatcaatagcatattcatatatttcgatagtactatgtttggttttcttcccatttcagggatcctatggtcttactataaaatcatcccctccattctaaggatttcatcgtcagatgggaagtataaagccttctccacctgtggctctcacctagccgttgtttgctgattttatggaacaggcattggcatgtacctgacttcagctgtgtcacaaccccccaggaatggtgtggtggcatcagtgatgtatgctgtggtcacccccatgctgaacc

SEQ ID NO: 467853 - DNA, 2139 bp, Homo sapiens
ctagaaaaggtgcaacggattttcatgtagcttgtaccagatcacgaagtcaaaaagggtgactgcagcaaagggtgcagcgggaggcggctccagggacgtctttggcttccatcatgggggagcagttggagctatggcggcagcagctgtcactgggcctagcctggggtgtggacctggggactccccagaaggccccgatgtggaggctcacggagcgtcggcggaaggcgcacaggatgctaaagctttacaacggcctctcagaaggggaagcggtgggactccctgcagggcccgaccccctggaccccactgatctgaacggggcacactttgacccggaagtttacctagacaagctgcctagagagtcccctctggcccagctgatggacagtgagacggacatggtgcagcagatccgggctctagacagcgacatgcaaaccctggtctatgagaactacgataagttcatcccagccacagaaatgacaaacagcataaaactgtatgaggaattgcaggagacccggaatttctcaaataaacttgtaaaagaggaacaaaaagtgaagctgcagaccttctcgtccccaacagactcaggagcccagctggcttcacccagtggattctgcacaggagctgcaggtggagctgcctgccagttcctctctgtgcacccacactcctcagcccttgggtggtcgatgggactgggcgccgtggagcagggggcggtgctcgtcggggaggctcgggccgcacaggagcccatggaggggggaggctcaggaatggcaggctgcaggtcccaagccctgccccacatggaggcagctaaggcccagcgagaagccgagcacagcagctgctggcccactgagggagccagctccgaccttggccagcccagaaaggggctcccaccatgcagccatgggctgaagggctcctccagtgccaccaaagtgggagcccaggcagaggaggcactgagagtgagcgagggctgtgagggctgccagcacactgtcacctctcataaggagtgattaatctgagcttctccagaaagtccattcctggtaggcactgggaataagaaatctcagagtataaaatagcatcaagtggtagcacttttgtgaatggctcccaaattagatcccttacctttttttttttcatgaagcacagttgcacaaaacacgcttaacctgagatgaagcacatattagagaaaggttctctctatagaattatgtattactcgaatgagcattaaaaagaggagatgggacatgctctctctagctattattacctccactatagagttgacatacacaagctcattattgcattatgttttattcaacaaaataactttaatgttgaagcttaaattgaatttgttaaaacatctttgtctccagcataatgtgcctcaagtgtcttcttggtgcctgaattttctccagaattatagtgctgaagctatggaaatggtgaaattatatgcaatctgcaaaacaatgtggctataatgtggtaattggccttccgcataattaaaggaacatttcctcatcagagctgttccatcagagacccaaaggctatcgttgtacaaatcacccacttaggaaaacctttattcccagtagcctataaaaatctggttatgcaaacagatttgcttattcagtaacattaatggcttctcatagttaaaaagtcatcaatgtgattgacctataccctgtttcctctgtgaccaagtgtcatttttattttgacagttaggagccttttgactctttcacagctggcatgaaggcacagggagggaaatctcaaaaaccaacaacctgcgtattcccagcctattaatcaatagaaaatcactcaactggattagggtcttgtacctggcagaaaggctcttatggacattggaattggatttttacacttgatatgacacctccttgagtcagatcagattcgtgtttgatagactcttgccgaaaaattgctccaggcatccccagtctcccctgtctctcctgcttttgaggtgggccaggagctgctggtgctcagcctgtcctggactcttggtgt

SEQ ID NO: 467854 - DNA, 2068 bp, Homo sapiens
agctgcaggactcctggttcctggaacggaagcttccagttcgctgcctggaaaagagcccaggcgatgaggagccctgctggcactgttcactgctgttcgtcgccgcagtgccacttggagcagccggcgctcctgggggcccagagcccggacagctgagcctcggcgagcacccgtgctgtgtctgtttccgtctttgaaatctcagcctcagtctgtcctctcttgggtgctttgatatcagccgtggcagccctgagagccaggtggagtcgttctttcatctgtccctcttggctgccagccctggggcccgtcggacatgtttagagcagagccgcctggggagagcggccccatccgtcagagctgccaccgccgcagccccgagtgctctgccaagagctctttctttctggtggagctcagtgagtatgtgttgtgtgctatggaagcggcagctctgtcaggagcggggcaggtgacggccaggccctcgccctgcctcagcctgcaggtcgtcgtagggtgcagcatgggactgcagcatgggactgcagcatgggaccgcagagggagcctggccccagccattgctgccccctgcttcctgtgcctggccatcgcctattctgtgccgtgctgtgaagatggcaggaagtgcctggaatggtgccagccagaagggctgcagactggtggcacttgctgggaatgtgccattcggcattagcggtgggtatggttcttttcacttgtcaatttgaaatgatttcagactttcagtaaagttgcaagagtaagacaaagaattctcgtacccctgaccccagttcccccaatactagcatttgcttcattgttcccgtttttccctgaaccatgcatcccccctgggctccttcttggctcttcctcctcggccagactcaactccagtgggcctgaagacgcaggcctgacccacttctcccaggctgttctctccctggcttcagacaccaccgcccctgtgatgctgcccaggttcttgtccctgctcttccccctctgtgagcttgcctcactcccagccctgccttttctgtcttgcccttcttatagcaggaaaagtcatctccacccacccatacaggatttcttcctctaccttgctttctatggggggtctctcgacgaatcttgtctgtcatagcccagatgtttcctaagccccaccccgacccccatagcttccccctgtcagaggctccgcgtctctcagctcagcctctgaattgccccagacatgcgtcgtctgtcagcccctgctgctcgccagtccagagagatcctttccactgtgcatcgatcatgtccctcctgtcctgtccatggctgaagggaggcctcaaccactgggccctgtctgtggctgcagccccacctcaggccgtgggctcacacttccctctctcaggacagcaccaagcctgttcttcctgagaacttcacaattgctatcccttcttcctggagctttctctgcggatctgtgcgtggccgacttctccccatccaggtcccagcttctgtgtcccctcctcagagaggccttttctaatatccagcccccaaacccctgcacccgccccagatcattcgcaaaatgtcacctgtttcttatcttccaggcacttgtgatctgaaatgttctgatttgtgtcttgtttttcttttctttgctcctttcactgccattcatcttccatgagcagaacccttcactgttgtgttctcgactcctaaggcttagaactgtgcctggcataaggtctgcccctagtggggttttctgtttttctcccctggctgtgggtctttcctcctcctcctcttctctttcttctacttatttccttgtttcttctcttttctttttcttctgtctttatttccccttttctaggttgttggctgtaatatggcactaaggtttttgcaatatttgtttcatttcttgagtatgtttttatgttccttacttaaaacaaaatggctgagtcaagtgttttaaacgttttct

SEQ ID NO: 467855 - DNA, 889 bp, Homo sapiens
cttaagaaaaggagcagacagccacagccatgcggggacgatgctggaagacatgtagccatcctgacacattggagcccatggcaggatccttgggctgggggaaatggaaagatagtgtttgtgctgattttctgttcactaatcgggcaatacgattggatgggaagttgggagaatcagtaataacaggggcccctggaatgacacaagccaatcccagacctagagcatccctgcagtgcctgggccccgtttctcctcttgtagcacccagtgactgtgggggccactacacagatgaatatggcaggatcttcaactacgctgggccgaaaactgaatgcgtctggatcatcgagttgaaccccggggagatagtcacggtggccattccagacctcaaaggattcgcatgtggcaaagaatacgtggaagtgctggatggacctccagggtctgagtccttggacaggatttgtaaagccttcagtacattctattactcttcttccaacatcatcaccatcaagtactccagagaacccagtcatccacccaccttctttgaaatatattactttgttgacgcttggtcaacacattaataggaagatcgggggaagaggcacctgctgatgctcccctgctctgcctgagcctggttctgcatatgttggacagaggctatacctgggactgcagaaataagattgagtcatagttctcctggatcagcattgggtgagggagagggaatgtgaccctgtgacccttccagaaaaaggtacgggttctgtctcagcatttctgtacacccacatctttagtgttagaagatcatatgtgaaaactttatctttcctgtcttcttgatatagaagtgggt

SEQ ID NO: 467856 - DNA, 1296 bp, Homo sapiens
atcattcaatgtcttaaactcagacctcacaatagcccccagcttattgccggagtatgatcagagaatggaagaatgactgtcagaggattgaaaaacagagggctagtgacacaatggtgcaagaaaggaagaatgaaaagccagttagaatatttaataccaactcttcctttcaggatcaagccccaacgtgttgccaagaggatctgagttctgcttcaccgttgcggatatggagcaaattctacagatcagacccacggattgcccttgggaaatactcccccttggaaaaagagatcctacgtctaggtggcattcacaccatagcagcaagaaggcttttggcttacaagcaagaggaagaatgcagaatgctcaaggaactacagttgctgtctccggactacaaacaagcaatggagtataaaaagaaacattcctctccttgtgctatttgtgtacccctagaaaaaatatggacagcaaaggtgattgcgcccctggaggcatttaaaatgccacaacgagagcaggtgaacgtcagtaagcacatagagaggatgaggcttgctcgggctctgggaaatcatcagcctttaccctacattgaaaggtttacacgctcctcatttctgtctggggtgggcctgggtccaatggcaaaaaataaggccagacgaaaggaagacaactatgacacccataattgtgatgatgccaaccaagataagaaagaggaggcagagggaaaaaacacaaaaagacgagaaataaaaatgaatgtagttttcaagtcaaaagaaccaaaaaaatgtttaacataccatggaaatgatcgcaaatcattcctccccgcaaagaaaccggaacggtccatcgcaggcctaacaaaccgaaatcttttctgcatatcagaattccctggtgacttaatgctaatgaatcaggattttatatcacggagagaccacttcagtgatctggtcaagacctacagcctggaagaagagagtatctggaaagagcgcatgcgtaaagcaactccttatcattattaaagttttatttgttgcccagggtaaccaggtgtactagtccttattattcccgtcagctgtgccccaggctccttgccaccccatcttatattgggattttggcttcccctgcccaatctccaggagggcctcaagcaacagcccagccttctcctaacctactcccattggggtgtgtgtctgttatctatttctatgaaacaaatcacccccaaatttagtggcttaaaac

SEQ ID NO: 467857 - DNA, 1009 bp, Homo sapiens
tcagagcacaactggccaccacgaggatgccagtgtcatctgctcagagggctggccggagctgaggctgatgggcggctcaggccggtgcttggggcgcgtggagattctccaccagggtgcctggggcaccgtgtgcgacgacctgtgggacctgaatgaagccaaggttgtgtgccggcagttggggtgtgggcaggctgtttctggccctggcgaggcccactttggcccaggctcaggagacatcttcctggacaacctccagtgcactcgggtagagcactacctgggccagtgtacccacttgggctggtcagagcacaactgtggccaccacgaggatgccagtgtcatctgctcagatgcggaagacctacctccacccacacctccagattcttctacagcttctcaggatcacataaaagccatgaccctgcaggcagtcatgaccctgcaggcagtcattccaaagccaggtccaatttgcaccctgcaagcacactgcctgccaagtgtgagacttctgatgctgagaggcccctacagaaaccccagaaattcttttaggccaccagaaagccagatagtaagtccctggatgtggtttggggtttgcttgtatcggaaagatggaccagagttgcggctggtgggtggctctggccagtgctcaggacatggggaggtcctacacaagggctcctggggcactgtgtgtgatgacctgtgggatctgaatgaagctgaggttgtgtgccagcagctcgggtgtggtaaggccattgctgctcctggaaaggcccactttggcccaggttctggagacatccttctagacaacattcagtgttcaggaagtgagaaccaccttggccagtggcccagctccggctggtcagaccacaaccgtggccaccatgaggatgccaatgttgtctgctcaggtggcctctccttccatgatagattccttctgatctttcacccaaagacatcctagtga

SEQ ID NO: 467858 - DNA, 481 bp, Homo sapiens
gatcctgagagtcagcttcatctgctttgggcgcagggtctaccacaatggcacatgggggactgtgtgcgacaacctctggggcgtcaacgctgcccacatggtgtgccagcagctgggttgtgggaagggtgttggccaccccagggaatggccacttggttgcaggggtggggggtggcggcgtgggacacatcctcctggacgatgggcagtgtcaaggcatggagaccacactaggccagcgtggctatctgggtctgtccatccacaactgtggccaccatgaggatgctgggctcatctgcacagatactgacttccagctttctcctgaggctgccagagccatgactctcagtgggggacctggaaaccaatgtgaggaagtttgggtctcactggcatcctctaaacaaatgcccaaggtccactctcaacatgagctcctggggcaaaggatacataatgacatataata

SEQ ID NO: 467859 - DNA, 508 bp, Homo sapiens
tggtaaaactgcaacacttcaaagcagcccctgggtgcctgcgtctattctgtggcctgctgaagagctctggtgaggtttgtgccctcttaaaatgactcttgcacacgaatccaccaccaccaagaaggctgtggtgaagctcatggcacggaagagcttgattttgggaaaagagctgccgttgtcaccacaaatacagcacgttgactctaaacccagggctgctgttacttatttcctgcttcatggttatctgggaactttcaaggcatttgctggctggttagtttctattaatcaatgtaagcatcgtcgcatcctaagcctggattttgctgtcctggtagataaagaggatgaagcccagattcctgtgtgtgccctgcaaagccctgaaggtctggccctgctgccctccagcctcagctttgctgcgcccccgcactgggagctgcagacctgggaaaatgttgctttctcccagccctctccactctgctgactt

SEQ ID NO: 467860 - DNA, 469 bp, Homo sapiens
gctcctcaaatgccaccaaagtgggagcccaggcaggggaggtgccgagagcaagcgagggctctgaggactgccagcacgctgtcacctctcagtaatagcacagccccatccttgctgtacattgtggacattatcttgactcctcacaataactctccaagaagcattccaaagaggatataccagaatctggaactggcatatgaaaatatcacctctagggaacaattcataaaaccaccaattactccgtggactccttttggctctgtccttgctttagatgataggaatacatgccaagacccccggtggatgcctgaaatcacagacagcaccgaatcttatatatacaccacattcttcctctacattcatactcatgatagcttaatttataaattaggcaaagtaagaaactggcaacaataataagaataatttattttcagaccatggttgactg

SEQ ID NO: 467861 - DNA, 534 bp, Homo sapiens
cattaccagggtttttcctccagcaataatggccaagccctgcacttttcactcaggcctcctgctgcctctcccagctgccttcagccagcaatgggctgatctgtggaatgtaaagtggcctgaattgcctgctcagccccagatgcagggagaggggaataaagctgagtggagctggactgccaagcctaccacttggatactccaatgtgacatgaacttaatagttacaaatggccatgatgggagtatttataccacaggaattggtgtatcaggaccagatgggaccaatgacttgaaagaaatcactctgccagatatcagaaaatctgatcaaaatacatttttggaaaagctttcggtttatggaaaaattgagcagaaaataaagtgttcccatatgctcctccctccccaacatttgccttattactaacatcttgtattagtatggtatatttgtaacaattgacgacccaatcttaatacattattagtaactaaagtccatagtttatattaggaccc

SEQ ID NO: 467862 - DNA, 518 bp, Homo sapiens
ctgctcaaaatggctttccacaggcgattacccatggtcaagctttgctttctctctgcttctactctcctgcattaccagggtttttcctccagcaataatggccaagccctgcacttttcactcaggcctcctgctgcctctcccagctgccttcagccagtgtctgccgaagcccccttgcaatgggctgatctgtggaatgtaaagtggcctgaattgcctgctcagccccagatgcagggagaggggaataaagctgagtggagctggactgccaagcctaccacttggatactccaatgtgacatgaacttaatagttacaaatggccatgatgggagtatttataccacaggaattggtgtatcaggaccagatgggaccaatgacttgaaagaaatcactctgccagatatcagaaaatctgatcaaaatgtgagcaaatgaaagcaacttaatcattttctctgacttagtttttctgtttgtaaaataggttgttaagaagtctaagc

SEQ ID NO: 467863 - DNA, 810 bp, Homo sapiens
aattccaagcttcagactgaagccctagtaaggaaaacgggatctgagggatccagaggcagatgacaatggaagtcaaggggcacagcacaggcaccccctgttaacatgggtgaaagcctcattggcacccatgggcagcaccctgccaaggtcactgggactcagggatgtaaggacccaaaaaacaaatggagatgcctcttctttctctccctcacataccctgagtattcactgggaagagaaagtaactagggacactttcttcccctctttcgagatgggtaaccaatcttcttcagtctgtacttctctgaaatgcctcctgaatcactgtgattcttttggaaaaaaaaaatgccttctttctgctttttcctcctctgtcctctctttggggatgggtaattgtgtccctgtacctaacataggacattccccttggatgtgtcccccaaactgggaagagttaatttccccaacccttaaaatgcttggcttaaaattgagcttgggtgaagggaactcagaagcctgaaatgccagcaaaagggtaaagatttcttaccagtcagacttctggtctccctctccctgtgcaaaccagttgaatgaatgagaaaatcactgtttatatcctctgtaagattttgatgcatggaaaaaaaggatttgtgaggctaatcttaagctgcagccaatctggtgtactttgtgtgtctttctgcatggttctgtcataaggaggaatacctgaggatagagcatggcctagtaccccatgagcccactgttcaagccagcccc

SEQ ID NO: 467864 - DNA, 708 bp, Homo sapiens
gctttacactttcaatgtccctcacacggggcaggcacaagaaaatagcatcatggctaatacgacacctgccctcttcccgatgagccacacagcaaaggagataagcacaagttgtattttgccactctctgccctggtgtgtccggctgtacccactgacccctggactcaccagcaggaacacatcccttcccaggacaagcagggctgtggggctaacacagccatgacacctttaagggaacagcttcactatgcagcccaggccgctgagtccctctctgttctgccaccgaacttagacgtttctgtagggcctgacttcatagcaatctataaggcactgactccagctatagttaaactggaagaatcaatccagcagcagcacgcagctggggagggatatatttcctacaacatccccagtgggccacaaccctcctctggctgccatggcatgtggcagagagcattctgtcaacagcacagacagccagggtacactctggctgtgacttccatgcagggatttggaaattagtcattggagctgcagtaacagtggcatggaaaaatacagatacaccttggaatgattgcagatccagttccagacagctgcaatacagcaaatattgcaataaagaaagtcacacattttttttggtttcctagtgcatattaaagttacgtttacactat

SEQ ID NO: 467865 - DNA, 672 bp, Homo sapiens
gtaggtaaggtgggccgtgacaatgagtgatgaatcttctaaagcgtcagcagccccttgcctcagactccctgaggccacactgaaatgtgcacccagcatcaccagagcttctgagttttcaagagatgccagtaatctggcttttaagtactctcaattcttagacaaaaagcaaattcaagcaattttcttatttgagttcaaaatgggttgtaaagcagcagagacaacttggaacaacaacaatgcatttggctcaggaactgctaatgaacgtacagtgcagtggtggttcaagaagttttgccaaggagacaagagccttgaagatgaggagcacagtagcttgccattggaagttgacaatgaccaattgagagcaatcatcgaagctgatcatccttacaactacacaagaagttgctgaagaagtcaacgttgacccttctatggtcatttggcatttgaaacaaattgcaaagatgaaaaggttccataagtgagtgcctcatgagctgagcaaaaatttaaaaaaaaaaatcattgttttgaagcgtcgtcttctcttattctacacaataacgaaccgtttctcaattgaattgttacgtgtgacaaaaagtggattttaaatgacaactggcaatgaccagctcaacgatcggactg

SEQ ID NO: 467866 - DNA, 514 bp, Homo sapiens
ctggggacaggatgaacccaccagcatgttcaaattttcagtgttcatcttcctcatttagtggagaaaaacaaaacacagaacctgttgatgatgatgccatggcaggtcaccccccaggtgcagaagaacagagtgtggagaccaacctgggaaatgagaggccggctggacttaaagctgagagcccagggctggagctccttaaaccccctggcttctgcaggccaggccaggaccaaatgccagaaaatcctcatcctaattctgctacccctggtcaattcacctcaaggaaccaaaaagtatttgtcatgcgggttctttctgggggtgaagaagcaggagaaatgggctggatgtttatggaacacttatggagtgtgaatttgaaaagtcaaaaattgtctctttccagttgaacacatcaagtcacatgaatacagatttcaaaatctctaggttctgctggaattttgtcatagcaaatattgactgaagttggtgggccatc

SEQ ID NO: 467867 - DNA, 2152 bp, Homo sapiens
ggccatcttaggtccgtcgcagcccaagatgtgaatgggcatttcgcatttgctgcctgagttaccagcactatggacacagcaatgtaattttaccgcgggtttggtaatgggctggagtacagcagaggaatcgatcaatttcataggcatctatcagaacatctatcagaacccagaagcatttactccttctcactatgcttctgaacatgcctttggatggactgagactgatatgcatcccatcctgggtaacctgaccctgcactcccagcatcttcctgagaattcgctctacagccacgagaaggaaggctatccattgtcacggctgcttcgacgatattctcttacaagaaaaactttttcactttatctgccaccccccgaccttttctttaaacaacagcagcagatgttggagatggggtcagagactgctggagaccagctttcctacaagagggtcccatctgcactggcagctgattagcttgagcccacccagattaagggtgggtctgcctttcccagccaactgactcaaatgttaatctcctttggcaataccctcacagacacacccaggatcaatactttgtatccttcaatccaatcaagctgacactcaaattcatatgtggaagccctaaacgccaatgtggtattaggtaattaggtttagatgaagtcatgaaagtgagccccaaggtgggattagtgcccttataagaagaggaagacaaaccagagcttcctctttctgccatgtgaggatatgttgagaaggaagctgtctgctggccaggaagagagccctcaccagaaacacaatctgcccataccttgattttggacttcccagcctccagaactgtaagaaataaatatctgttgtttaagctgggcagtctatggtattttgttttagcagcccaagctggcttaagacctccagggattgcatcagcccagacttgaaggtaaagcagcaaacctccagggagtcttccctctgagctacctggcaagtcatgtgcatgggccacaacagcactaatgcatttccatcagctctctgctgagtgcctgaacttgtgtagccttggccagccttgaggattccagagccttggcttagcaatttctttctcccttatgagaactggaaacaccagtctttacgtccctgatgctcaccccagagtttcttacactcatagcatttggtggagcttcacagagtaaaatttttctcctgtgcattctcttgggagctggccttttctcttactgctaatgtgatagtttccataaaatttcactatgtgccatctctctaaatttatggctaatttacttttcttctatctcattcaatgaaaagcagtcacaataaattacacattgcgttttttagctgggcagacattccaagttgacaacaatatgttaattacagaagcttgtcctgttcatctaaatgaagaccaataagacttaattgcctgaactggggagatggggggtgagtctaaaacctgtgtcattgccaagatatttgctgcctactaagcaagctgatcatgtttccctgaagcaatttacacagagcacagtggagcagagttaggacaattattctgaaattaatctacatgaaaacctacataaactagcttgacatttggattgtgatcaaaacacaatttgacttttcctctcttggtgtcttcaagttttatccagtgagggtgatcttcgctggcacctgcatcactcaggccttcctgcagtctcttgaaggcccaaacatagtctcaattcagtaaaaggaatgtcttccctccctccccagggtggaactatttttgggtgggaagcatgatgggttcttctgatctttactctcttcctgactgcttgccaggtggagggtcaaagggcatcagagaaagagaagcagaggcagaagacagttcctattgcaatggggcatcccaagttgggccctgctcccgtttctggcagactgttaaggctgatgctcttgcagggccttttcagaaatcccccgctggcccctctcccctgtgagggggagttcccttgatggggcaaatacatctccatccccaatggccccctc

SEQ ID NO: 467868 - DNA, 738 bp, Homo sapiens
actgttcttttggtagtgaataagttgcatgacatctgatgcaaacatatacgatgatgatgatgatggtgttgatgacgataatgatgatgatggtagtgatgatggtaattatgactttcaaagagctaaaaatgaagtgcttaaaggagaagctaccacctggatggtgaatgtgtgtccccagcactggccaccagcccctggccaggggcagaggcagaaccagagtagacgctggatgatgactccaagactttacggctactgtccatgcaacttgaatttccagagaggagaccgaggtcctgggagggaaaagcacacagaggtcaccgcagcgtcatgttctgttgcaactccgccccatctcccccaggccatcagtaaagtcggccaagtgccacagtcttgtagcggggtgtcttgtggaaagcaagctgcattcgacatttgggtgggtgagagagagaggcaggcagagagaggggtccaggaaggcaagctgtcgagtgaggaaacccaatcagggaagttgctgaggcaaggactgggagaagaacgcaaggctccagcaggaatctgcagaaatctgggagtggatgcaagctggctcctggatgcgggatggggctgggagccagtgagcgtcgcactgatggggaggagggagcctgaaggctggaagatttcgagacacctggttgctgttacatgggttacataaggctctgccca

SEQ ID NO: 467869 - DNA, 496 bp, Homo sapiens
agctgatcagctcccacagctcaccatctggctaacctctgctggcttcccatgacacaagcccaggcctcatcttcacatgaccccagggctccagggtcccccagtagactcaggcttctctgtcccttcattcggaatttgtcctctgaggaaatagaccttcagccaaatccagcagcagccatgggcaagaagcaacagggattctcccaaaagcagatttcaggagcaaccacagcttgggggcttttcagaaagggtcatcttggatgggcctgggaggggtcacccagtggaagtgctgactggaagaataaatgtgatgctttgaagcccagacagattcagctgccaaatcttgtctcactccctttcacattctccttatgcctctctcccttcccacctctgccttcccgagccagatgctcctcacctctcccctgctgccagctgcaggatgcagctaccaacaagtgactgtcctgctcat

SEQ ID NO: 467870 - DNA, 842 bp, Homo sapiens
cccgctgtcccccgcgcgcctgggtggtggagggcgatagtgcctgaatcaatcagatttgatcacttgatcatagaacagataagcggcttcaaatccgattgctctaacgacagactgcaaaaatggtagctccaagaagctcccacactgctggcactatcagagcatgatctttgcagtaacgttagcagcacccaagaaggcttttgttgaggcttcacactggaaaggtgggagccaggcagaggctgacatgaggaaacctccatgggccatgaccttgggacatttgcaggccccctgcttcaaacactcaagaaacctatttgggaagagagtcactgaagattttaagtacaagaataactgggtcagattggagtttttttcacaagcaatccccggtcacaggggagatggatgggtggaaaaagaactaaagaagacggcaagagaaggccatcaacttcaaaatgggagacaggtggaggagcagtttggggaagttcacatagcccctggtaaattggattctgcatcattaataatcacctggaggacagaggaagagagtccctctaattgacaatcactcagaaatgaatataaaacatctctgaaatgctaattgttaagtgtttattgaggcccatcatatgcctttgctgaatactaaagtaccaaaacatttccaaagaacttacagtctgattgtactccaaagaatagagagcattttcattttttactatattgaatttctttggtatattaccttttataatagcttctcttattgcaatgtatctgactagtgttttctctgcattttcatcttt

SEQ ID NO: 467871 - DNA, 1060 bp, Homo sapiens
tggatcctttccagaccacgggcactctctcagccatccgatgcgtacgtaagcctatctgtaacatggagcactcgcatcacctcaattgcaatttgacaaatttgacaaggactcttgctgaacttgattcctttcccctttcatctctcactcacctgactaacctggtaaacaaaagcccactccaacaggataatggaggaaacgcagatacagccaaaccagctccggatggtgagaagtgttctggttgtcgtttagggtggggtgtttgttctgtgggtcgagtgggcacagacaaatggaaaacattctttcctgctctataccaagttgttgctgaaatgggaactgtattacacctgtggggagcaatggcaacacaagttggcagccaccacaggcttgggagtaaaaaggtccctcgcagtttcccattgctggaagaacatgaagggggccagaaaagaggagatggcacagttaactggggtctggaagatgacaaagacatgtcacttacaggatggacaggaatgatgactgggcctccgagaataatttatgaaaaccaaatatccagccttaaagtagaatgtggacctaaatacccagaagcacccgctctgtaagatttgtaatgaaaattaatatggagttaatagttccaatggagtggtgggcccaagatccatatcagtgctagcaaaatggcagaattcttaaagcatcaaagttgtcctgcaagagctttggcgcccaacgatatctaaagaaaatatgaaaactcccttagcctcctgaaggacaatgttacagcaattaatcaaaaagaaaaaccacaggcccttcccttccccacaattcaatttaaggagtcttcattttccacagtaaattttctagatatgtcttgaagacctcaaagtactggaaaagaagctcccattcaaaggaaatttatcttaagatactaaatgatactaattttttgtccatttgaaatatgtaaattgtgctataataagttatcctgtcaagtgtaaccactgtccac

SEQ ID NO: 467872 - DNA, 1866 bp, Homo sapiens
ctggcagcaaacagccaccaccgccacaccctggctggccctgctccccctgcaggccggcggtacctcaagcttggccagctcctcgcccttgtggaggatgcggaaggagtagaggtggtcggggctggggtctgggaccacctcgcagcccaccaggctgaggggttgctgggccaccttgctccggttccggtcctggtaacctgcaggaggaagtgcagatgcaggaggggacagggctgcaggaggggacgcagatgcaggagggggcggggcttcgggagggcacacagatgcaggagggggcggggctgcgggaggggaagcggatgcggatgcaagaggggactgggctccaggaggggacgcagatgcaggaggggaccgggctgcaggaggggacgcagatgcaggaggggactgggctgcaggaggggactgggctgcaggaggggacgcagatgaaggagggggcggggctgcgggagggcatgcagataaaggagggggcggggctgcgggaggagacgtggatgtgggagggcacgcggatgcaggaggggatgcggacgcaggaggggacggagctgcaggaggggtcgcggatgcaggaggggactgggctgcaggagggagcggggctgcaggagagagcggggctgcaggaggggacggcgctgcagaaggagatgcagatgcaggaggggacgcagatgcaggaggggacgcaggtgcaggaggggacgcagatgcaggaggggacggggctgcaggaggagatgcaggagggggtgcaggtacaggaggggttggggctgcaggaggggacacagatgcaggagggggcgcagatgcaggaggcgacggggctgcagaaggagatgcagatgcaggaggggatgcagatgcaggaggagatgcagatgcaggaggggatgcaggtgcaggaggggacggggctgcaggagggagcggggctggaggggacggggctacaggaggagatgcagatgcaggagggggtgcacgtacaggactggtcggggctgcaggaggggacgcagatgcaggaggcgtcggggctgcaggaggggaggcagatccaggaggggacgcgggtgcaggaggggacgcgggtgcaggagggggcgcaggggcaggaggggacgcgggtgcaggaggggacacaggaggggtcggggctgcaggaggggacgcagatgcaggaggggacgcagatgcaggaggggacacagatgcagaagggggcgcagatgcaagaagcgacggggctgcagaaggagatgcagatgcaggaagggatgcagatgcctggagggatgcaggtgcaggaggggacggggctgcaggacgggatggggctgcaggagggagcggggctgcaggaggggatggggctacaggaggagatgcagatgcaggagggggtgcacgtacaggactggtcggggctgcaggaggggacgcagatgcaggaggcgtcggggctgcaggaggggacgcagatccaggaggggacgcgggggcaggaggggacgcgggggcaggaggggatgcgggggcaggagggcatgggtgtctaggtgtgtcctatgctggcactgcctctaggcttccttagagtcccccagattctcagcttcagaacccatcagacaccttccctgtcctaagggattggaagctgccctgagctttggctggctgaaccaggcaatagcgtgaaaatgcacagctaccttcctgcctggcccagtggggatcatgcatatcgccaagccacattaacacaaagtggaagaattagagaccaggactgagatgacacacacacccgtcaca

SEQ ID NO: 467873 - DNA, 1350 bp, Homo sapiens
tcttaggcttgcagtctattcacttggggcatggctcagtcacttttaatcttgattgctctcacctctgaagcatacaactccatttctagctcttctctgggggctcaaaatgaagaaccaaaaagccaagaaaactgtctatttttctgcttaggttctatgaagaatggacagtcatgcagaaatgtcattggacaaaaagcccctgctgatgacaaatcaacaaaggaattcattgacaagtttgtcaaggtcatcactgatgaacatctgatggaagaacaaggctataatgctgatgaaacatcaccattttggcattactgccccagaaagaaagctgaagaagataggaagatgtggaaaaatttggaacttcctagaaacatgttgaatggttttgaccaaaatgctaatagtgatatcaccaaagaagtccaggctgaagtggtctcagatgtagatgatgaactacataatcagaactggagtaatggccactcttgctatgctttagcaaaggtactagtgggattttgcccctgccctagagatctgtggaactttgaacttgaaagagatgatttagggtatctggcagaagaaatttctaagcagcaaagcattcaagaggaagcagaacataaacgtttggaaaatttgcagcctgatgatgcaatagaaaagaaaaaacccattttctggggagaaattcaagcctgctgcagaaattcgattaaagactatgcaagtgagaacaaaatggagtgaaatattaaaataaaaggaaaaaatactaagaaattataattctgtactctgaaattatgcttctaaaatgaagaataaataaaacttttgtcagacaaataaaaattgaggggcgttttagccagttgatatgccttgcaagaaatgttaaatgttctttggagagaagaaaaatgatacaggtcagaaacctggatttacgtaaagaaagagcattggaaaaacaattagtgaaggttaataaagcattttatttttcttattcttgattgatctaaaataaaatagtttgttcaaaatattaatagcaacgatgtatttaagtatgcttatgtacaagtgaagtgaatgacaacaatgatacaaggaatggagggaattattttgttaatataaggtactcatactaccaatgaagtggtatagtgttatttgaaagtggatttggattagttataaatgttacaaactctaggacaatcactaaagaaagtaaaaaaaaaaaaaagtataattggtataccagaaaatgaaatgatataaaatgtttgattcaaaccacaaaagtcagaaaaa

SEQ ID NO: 467874 - DNA, 2724 bp, Homo sapiens
agtagtgttcgtctcatcagggatgtggaataccaggaaagacctgacacctcccccgctttttctctctctctcctgctggccgtgtaagatgttcttgtttccccttgccttccccctgaagcatctccagccatgcctactgcatagcctgtggaaatgtgcgtcaattaaacctcttttctttataaatagtctcaggacaagagataagaggatactgaaagagaaaagagcaattgctaaagatactcttgaaagaaagggctgcaagggaatctctatatacagacgagagtcagatttagtaagagaagaagaaaagaaaatatgcaaagagaaggtgaaggctatggaagattttactgatgatgaaaatagagtatcagaaatgtgcagtattagggttcaggaatcagttaggggatcccctgtatcaagtgctgctgatccccagggggtgaatggtcttgtaccaaagatatgtttaacaggtaactttccatgtgaaacagaaagaggacaggtcctctattgacttgacagggcgggggaattcaaattcttttacagcagttacattggaagggagtgtgtgtgtgtgtgtgtgtgtgtgtgtttctctagagaccaaattgaaattgtgtaaggatgaaagacataaattaaagataggaagggggacggaaaagtataaaattcattatgggataagtaaaacaggacagaaaattaaataacttgttggatatttgctaatatataaatagcaaatctatgctaaagaattttagtgatacatgaacatattctcttttaaagagtggtaaataaatttgaagaataagcaaagcaacttaaggcaatgctacaatgaacctgtgtgcatcatgtgcccaaatggcataataactatgaacaatacagttcttttccgatttatttatgtgtaggaatacgtttccagaaatcaatgattgaaaagttataatttgacaaaatgatttatagttcatatgaaagagaaacaggctaaaatttttgaggaaaaataaaggtagagattactacactttcagatattaaaatatatatgtagaacaactaaaccagtgtgctttaataggccagttgagtgggttttctaaaaatagatcacagactatcccaaagatataaagtaatgggatgtggtataaggatagacatagagatcaatgaaatataactgacataaaatcaatgcaatggaatgatatttacccagaaataaacctgtatatttgtagttaattggtcttttggcaaaggtgccaaggtgactaaatgcagaaagaagagtcttttcagcaaataactctgggacaagtggataatcacaagaatgaaaatgtacccctttttaaatgccatatccaagaattaactcaaaataaatcagagatataaatgtaagagctaaacctataaagctcttagaataaaagataggagtaaattttcatgaccaattttcaatggttctttagatattacatcaaaatcataagcaacaaaagaaaaattagataaactggattgcatcaaaattaaaaacttttgtgcttcaaaggataccagcaagggagtgaaaagacaacacacagaattggagaaaatatttgcaaatcgtatatctgataaaggactagtatttagaaaacaaacaactagataatataagacaaatatcctattaaaaatgaggaaaggatctaaatatccaaagaagatagacaaatggtcagtaaatgcataaaaggtgctcaacattgttagttgttaggaaatgaaaaatcaaaaacaggagctaccacttcacattcattaggaaggctgcagttaaaaaaaaaaagagataatagcaaatattgatgagaatgtgaatacgttggaactctcattaattgttggttgaaatacactggggcagccactttggaaaatagcttggcagtccttaaaataattaaacatagagttaccatatgacccagcaattccactcctaagcatacatgcaagagaaatgaaagtatgtgtacacaaaaacttgtacctaatattcacagaagcattattcgtaacagttaaaaagtagaaacaacccaaatgtctatacactgatgaatgggtaacataagaatgtaatatagaattatttataataaagaagaataaagtagtgatgaatgctatatgctaacatgaataaactttgaaaatatttgtgtaattatgtagtgagcatattatttctctaatagtagctatgtttcctgactccacctcacagattgaacggtactgcccaaaacacaggaaatgttgttccctactgcattgttgaatggccacgctgactctgaactcttgttgcctcacacttcagtgaaagaaataatcactgctgaaggtaatctcctaactataaatccagtttgttttcagtttttaaaactgctttatatgtgattcaaaataatggatttttaaaagtcaaacttaagattctattcatgtttctcaggaaaatcctattacttgttttttaagttttgttttatacttagaaatgttaacttttgtccttaatttacagaaaggatattttaaaatattatattgtatatatggattgccaagtcatcattgtaattttttctttatatgtgttatatattc

SEQ ID NO: 467875 - DNA, 746 bp, Homo sapiens
ggcatttcctcctgcctccctgtgaagaggtgctttctgccatgattcccgtcggaaaagcgcagtattcgggtgggagtgacccgattttccaggtgccgtccgtcacccctttctttgactcagaaagggaactccctgaccccgtgcgcttcccaaggcaatgtgtacccagagtctggccatatccagaggtgccatctgggagccagagactaaagtcaaaaacctaaatactctacctgcagacccgccactgacttccatccctctggatccagcagggtctctgctgtgctcccgatccagcaaggtgaccattgctgctgccgatcgggctaaaggcttgccattagctataacactcaccacatggcccaagattccattctttggaatccgtgaggccaagaaccccaggtcagagaacatgaggcttgccaccatcttggaagtggcccgctgccattttcgaagtggcccaccactatcttgggagctctgggcgcaaggacccctgggcgaagttgtattgtgtactaccaagatgttctatattgattctcttacaaaattcaggaagattatcacctaggggtgttgtaaattagctgtcattaaaagcagtcccaaaattgataaacaaatattagtattaaaggagaggatacactacatattttggaaacattaaagagtaataagacaatacaacagacaaccttaaacatatacttcatcaactt

SEQ ID NO: 467876 - DNA, 981 bp, Homo sapiens
aaacggaccaatcagctctctgtaaaatggaccaatcagcaggatgtgggtggggccagataagagaataaaagcaggctgcccgagccagcagtggcaacctgcttgggtccccttccacactgtctgcagcttcaatcctgaagccaacgagaccacaaacccaccgggaggaatgagcaactccagacgcgctgccttaagagctgtaacactcactgggaaggtctgcagcttcactcctcagccagcaagaccacgaacccaccagagggaagaaactccaaacacatccgaatatcagaacgaacaaactccagacacgccgcctttaagaactgtaacacacaccacgagggtccacagcttcattcttgaagtcagtgagaccaagaacccaccgattctgcacacactaccttataatagggccttgtgtccagaggttgtggccaatatttgggcagacaaagaaaacgggacctacactgtgaattcagtaaccctcaggccaatcttgtgtggagctagcccttcagatctgtcccaaattgaggcagaaccctacagtattcagttctcaccgaaaagctctgtcccacaaattactgcacagatttaatcccaccttcaaaagtaaatctctccagcacagttagtcaatggcaaagtggttttttttttttttttttttttggtgggatgagggcgaaatttatactctttgtttctcttaatctgttctgtattttttgaattttattgaactttttttctgtgctagatgtaaattctcatctagtttgcaattaatccttcacgtttcttgattatgtattccattttctctgcaaatactgttttaataatatgcatcctgaacttacatgtctctgtgtgcctatacactcatgaaatcaacaacaatacttgcatgactttgggagctactgatagatccaagccttagtccataaattc

SEQ ID NO: 467877 - DNA, 836 bp, Homo sapiens
tgaaatatgccccttgctcaccatgctgtgggcaaagagaaggagaggaaagctgcagccctttgggagaccagacctgggagctccccaagccaaggctgtgtctccttctctgggtccctgcagttcctggcatttccaagcttctgggcatcactgcattccccgatgccagccaaggaagctgcttacagtgtgcctgctccagctgcagcctcacagagagccggcacccatgccggcacctggagctgcctgccatgcagcagcagccggcatgtctgactgtgtagtgaccagaccccatgcctttccccacctgacttgcagtctcccttggaggcatgggatccaggctggaggggtgccgaaagcaggctgccaaaaacgggctgaattctggaaattttatgtggcaaaaaacaggaagtcttctgtgaagaccaggaagtctttgctcaaatgggagggatccctgaggaatcgccacactgacttccacaatggttgaactagtttacagtaaactatcgcaagaacaaaaaaccaaacaccgcatattctcactcataggtgggaattgaacaatgagatcacgtggacacaggaaggggaacatcacactctggggactattgtggggtttggggaggggggagggatagcattgggagatatacctaatgctagatgatgagttagtgggtgcagcacaccagcatggcacatgtatacgtatgtaactaacctgcacaatgtgcacatgtaccctaaaacttaaagtataataaaaaaaaataaattaaaaaaaaagagtaaggtgaatgttatgtgtt

SEQ ID NO: 467878 - DNA, 641 bp, Homo sapiens
ctttcaacttttccccattctatatgatgttggctgtggggctgtcatatatggcatttattattttgaggacacagagagaaaaagatggaacaagaatatatgtgagagactacaaacaatggcaagcacagaccagcaaaagaaagaaagaaagggtaacagagaaagcaatagaggaagaatatgaagccataagatttcaattttgtagagttctaggaagtttcaaactttcctacatcttcctgtcttctgagccctccaagtctccaggaagttccaaactttcccacattttcctgtctttttctgagacctccaaactgttccaacctctgcctgttatccagttccaaagtcacttccacattttaaggtatctttacagcagcaacccaccacaagtcttggaaagagaaccgggattaactcagaatgggtacaatgaatatctttggggtgattaaaatattcaaaagtggattgtgattgtaccacccttaaatttatctaaatatcattaaatttttcatgcataatgggtaactttatggtgtacaaataatagttcaataaagttgtgacaaaaaaatgagcactgagctcagtgttgctcattttggaagaattattaataa

SEQ ID NO: 467879 - DNA, 621 bp, Homo sapiens
atatccccagcctccaggccaacatctatggctccaggccccaggcagaactcaaaatttcaggctctagaccaacctctacaggcccaggctccatgcctgccccagtaccggccattcccaggctctaggtcaatttctgtggccccagatgccagaggagccagggtccaggcttgccccagtagacactacagacagattggcccttgcagaccgagtctccaggacttccctcacagatccaggttccaggacagcccgtgtagatgcagataccaggtctacacctgtggactcaggatccaagcctgtcccagtggacccaagtggatccaggcctacacccacagacccaatcaacaggcccaccccagtggatccaatttccaggcccagctacctgctaaaccaggtatcaagtcagccaactggacaattccagcagaaatctctcctaaggatcatgccagacaggctacctagaatctctaaatggaatgactagtaaaatgctctttttaaaaaagccattctacaaagactggaataagactactacttcacatgcatgaacatcaattgactgaacccagagaaatggacatgcacaaactgcct

SEQ ID NO: 467880 - DNA, 641 bp, Homo sapiens
ttatgtcagcctgtcagccagtttgatgagagaacgtggataccttggaaaatatagtcgtggctgccttctgctgattgggaaggggctatcaacacaagaggaagacccaggtttaggggagccagagttaaagggccagagctcaagctgtctgaagagcgttgtcaatgcacatcagatgagggtactgaagaaaaaggacggctcaatgacaccagcgcctacactacagcagtttgcaaagaagcatgtgagacctcaaaggctgtcagatcgtcttcctttacatctgtcagacgtggcactgtttctcacgtggaaagggccggcttctcaaaatggaaggattcccaaatgtcaccttcttgtgtcttcctggaactggggctgcaagtgcctgactcctcagaaaaattatctgacagaaacagtacatccatatagtcatttaagttttacagtgatgttcacagatgctaatctcagacataaacctgtgaagtagttattcgtatttatttgctaaatggactaatgtgtctcagagactttggttactgccctgagcatcactttggttactgccctgagcatcacttttgtcgtgagtcttgtgtctcccatccagatctctgttc

SEQ ID NO: 467881 - DNA, 823 bp, Homo sapiens
cgccagacgcgccaccttaagagctgtgacactcatcatagtaaatggagaagtgtgagagtttgaatttccctttattgctccagtcagcaaagaccaaaaacccaaatccaagcctttatcagattatctccctacaaatccctgacataagaagtctgaatcaattgcactaccttctgggcttcccaaggcagctaacacatgtactgagctatgaagccacatatgacaagggccgcataatgaggcctctcatgccagtagacaagtgggtgtgtcatcagtttactgcaggggaaacaacaaatttttcatatgtgaaattctgtgacaaagacctggagctttttgaggaggcttttccaggaactaacttctctatactttcccaaaacaactgggtttctaatttagccaagtacaatttagatgagtctaaacattgtccatcttcctccatcagggtttaaacacaatataaaaaaactcatctcaagtctcactactgtactatatttgtgaatttgtgtaaatagtgttaaaatcaccagatttaagcaaagattcaggaaagcaagatgattaacatatgtcagaataaatcagctcagtttaaaaaaaaactatctttttaaccagaaaaaaaaaatgagatatttacaaccttaaaaagatttggagtattttatctactaaaaggaacaaactgaggtcagaaatgatcattttgaaattaaaaatagtttctatataaaaaaatatcattgagtgcttataggcaaatgtatgtctacctcacccctcaaattcatattttaaa

SEQ ID NO: 467882 - DNA, 669 bp, Homo sapiens
gcgggaactgcagagaaatcgggagagagaaatgccctgtagaggcgatggcttacagactttcaagaacagatatatctaaaagtttgtttcaaagttatctgcctttattaagtgctgtgatgtattttcttccattaccttcaaaccatctgtaaagagacctacgcttacagcctggagaggatattttggaggaatgaagctgcggaccctcgcggtgagtgttacagttcttaagttggtgtatctggagttgttcattccccctggtgggttcgtggtctcgctggcttcaggattgacgctgcagaccttcgcgctagacataaaggttctccaagtccccaccagtcaggaaaccagctggcttcacccagtggatcctgcactggggccacaggtggagctgcctgccagtcctgggctgtgcgcccacactcctcagcccttgggcccggggagaaatcgagcgcagtgccagtgggccagcactgctgggggacccagtacaccttccgcagccgctggcccaggtgctaagcccctcattgccccggctggcagggccggcctgccgctcggagtgcagggccgccaagcccacgcccacccggaactccagctggcctgcaagtgccacggttcccactagtgcctctccctcca

SEQ ID NO: 467883 - DNA, 709 bp, Homo sapiens
gtcttccgcgtgagttttcatctgtcacttgtaacaggagtgctggtgggaaccatggtgcagtgcgtgcgtgcgtgcgtgtgcgtgtgcgtgcgcgtgtgtgatgcgtgtgcacgcgcgtgtgtgatgcgtgtgcacgtgtctgtgcgtgtgtgggtgtgcgtgtgcatcagtttgaacagtggccgctgtgagcagttgagagacggctgctgggattggctggggcttggctacgtgttccaggagcaggtggcgtcctgtggacacatccaggatggagtcggttcactgcagtcagcagaagtagtttccctggcacccgttcctccagagaacacctgctcagatacaggtaaccctgcacctgtgtatggatcatcggacacctgctcagatccagatccagatccaacccaagcacctgtgcagggatcatcggcgagacttacagagctcccagggatagaaaggatttccatctgtgactccacagaggaggcatctgatgggcgtgggctgtcgtcagaatgcgcctggcctcacagaacctggcgggagcagtgcggggaatggccatctctgttctgagcacactggccttcctgaggacaagccggctgccctcccaggctgacctgtgagtggacgacattgcacacgccctcctcgctggggtggaaaaggaagctgtcagaatgagcagtgc

SEQ ID NO: 467884 - DNA, 1270 bp, Homo sapiens
gttttttcatcactgggctgagactaaatgatgctgtcaacatgccagattatttcaaattagctaaattaattaatctaactcagtctttggctatattaatcatctgccgagtaaagggaggtttaatagaggtagacctggtggaagtaggtctagtagaggtagtcctggtagaggtaggtctggtaaagataggcctggtagaggtaggtctagtagagttagatctggtggagataggactagtagaggtggatcaagtagatgtggatctagtagaggtggatctagtggaggtggatctaggggaggtggatctcgtgcgggtggatctagtggaggtggatctagcggaggtgtatctagtgggagtgtgcctcatggaggtggatcttgtggaggtggcctaccctaaccccacccatttggcccccaccaaggggatgtattccctggaaacgtccacgtgtggattgcgctgcccacctccattccctgtgctcctgggaatggcactgacatttgacctgcagggagcagagacatcccatgttttgcctgtggaatttgggggccctgacccagtccagctccagggctgaactggagtcaccagtcagtcagttaacaaagccacacggcggccacagggattgatctgcagataagaacgtgtcctacttagtgcccagagagtcatgaaggcagttttggattctctggagagagagacctccctctcatctgtggagatgggcagtggggagagcacaggagatcctacagaatggggcacctggacaggccagaaggacgctggagggcagctgccaccacagatgctgatacacttgcccttggatggctcttctgaacctaggcctagctctggagtggtttatgaaagcccctaagtccctctttttaattttagcttgcattgggtggtctgtcacttgcagcagaaaatccccggctcacagctcccgtgtgagtaaaggcacttgaatgctgtttccttggaggttggccctgagatggtttcatgccactgccactagggacactgggaccatagctcgcagaatcactgagagaagcagacacataccagttagcatggcagtgggtttgggaaaacagattgaatttttattcactgtggcccgtcccagccttgccttctccttgtcataattttgtccattatttttagtattttaacatcaaatgcccaagttagtgaagatgttttacttcaaaatgt

SEQ ID NO: 467885 - DNA, 949 bp, Homo sapiens
gcacactaagatatgcacgcattcccgctggggtactcacgctatcacacactgagatatgcacgcattcattctggggtactcacgctctcacacactgagatacgcacgcattcatgctggggacaggcagaaacccaagagacccatggacaatgggctccactgtaccacatcacaacctgtaggtacaataggaaacccaagaggcccatgaacaatggtctcccaacactgtaccacatcacaacctgtaggtacaataggaaacccaagaggcccatgaacaatggtctcccaacactgtaccacatcgtaacttatagctacaataagaaacccaagagacccatgaacaatggtctcacaacaccatatcacatcacaacttgtaggtacaataagaaacccaagagaccacgaacaatggtctcccaacaccgtagcacatcgcaacttgtagttcagaggaaaacacctaacaacaacctcaacaaacacaacaacaacagcaaaaggacgaagcgtgagccagaaattccatctgcgtgagtatgctgggaaaagcctggcgaggaatcctggttggtgaaaaacagattcggtgcttattgttctgctctgtaagtcaccaaagaaatgtgggcgtgtgctgctggaaagaaaatagacttccacaaaaagtatgaatcacttttgttaattgtcaaagaaaatatatattaagtgattacttagcttctggaattaaaacaaaatgaaaacaaacaagcatcctctgtctctcaatacttttaaaactgaagatggcaaaataaggcaaaccaaagccaccagtgcatcttggcatggtcagcagaggagggcaagttttctaaaaccttaaaaagtatcttggtgtcatgagccttagagttatttgaaatgcagttatgtgaaacccccctct

SEQ ID NO: 467886 - DNA, 985 bp, Homo sapiens
cccgggtggatgatggtccaacttaaacagatggccaggaaggaaggaaaggaggactcaggggtgagatatgttcagatgtatttcagcacctgccattgacacccctttggctaaagctcaaatccctgttcccaaaccagagcgcacagtcctgtttctgaaggactgtgggtcttctgtgaagcatattatttcttccacgttaaacaccagaacttgcatcctgcaggggtcctctgtgctcctgccacctcctgcctgtccctccggtccccactctgttcattatgagtctgtctctgtaatatccatgtctacacgcaatgttccccaacagaccttttcagtcccccagcccctcccgagggcagacacacctgggctttctgctctcctgtatggcccaagaccgtcccggaacgggtcacagcagcagaacgcgtgcataaacatttccaatgtcactgaagcgaaaccgtccacacagagcagcgaggccaggacagcaaccggcagcccacggacttcactggcacgaagcagagagcacgctgtgggcgaggaaggagctggtgagacccgcagacaggaagagctccctggagtcccggccgggccagcaaggccaaggccactgtccactgtgatgcagcgtcggcgtctgcttctccactggaagaagcaagtttgcagtcagagcgtgggattttattcaaggttgtgctggtcgctcatggccgagtctctacggtgggctccacctgcattggtgcaggactctctgggtcaccccagggttgtgggcagattggagagtgcaggactcatggctgcccctcctgctgtggccagacgtggacgcaggctctcggacagggttctcatcttccacaccccacccttatctcgagaacccattttcccaccttttccctgcattcccctgtgactttttcatgctgcatattctgtgttcatatga

SEQ ID NO: 467887 - DNA, 713 bp, Homo sapiens
ccaggtctagttaggttaattagtgaaatgtctggagcctttgacagtgcccagtgcatgatggtgcttgatagtatttatggaaaaatgccccataaagttcacattatggggcacattcctgtgcccaagagacagtctagagtgtgccagcacaatgcttacagaaatctgaaccccaatctgaattcaagattcaactttatatgcctttctcaacactccctaactctcttctcagaaaaacctgtgcagcccaagccattaaatcaaccatcgttgggaggtgctcctcacctttcacatcagttacacgtaaattggggcactaccacatccagccagtccccattttacgttcaccctagtccaggtcttcaaaggatcaaacttcagtttggtgaaccaatgtatgccagagaagagaaggatgctcagtgcaggtttccagggtctactcttctcctcaaatggcatttaagaaataacagtgccatcttagaaactggttgataagaatgaatttgtttagttctacttgatgacattccatccatgatttccagtgccatactaaacacactgcacctccagtattcccctagattggccttaatcattttatacctttttagactgtaaagtctgaataggttcaaatggtatattagtccattctgttttcacactattataaagaacttactgagacc

SEQ ID NO: 467888 - DNA, 866 bp, Homo sapiens
aaactgctccaagaaggataggtcaataatgagtcagtgtcaggactttgagcaacggactccaagcacaagagggcaagcgtttcctaggggcaatgtaggtgcgaaagtggaagcagagagactgcgaagagccctctcccttgggagcctatgccagaccagcctctactatttctgggtctgtttcagaaacgtctgttctaacccatcttgcgtcctgggaggcaaagaacagggctatattgttctcacttatttgtgggatctaaaaatcaaaacaattgaattcatggagttaaagaatagaagaaggttaccagaggctgggaagggtagtggggtggtaggggaaggtggaggtgaggaaggcgccatctacaaccagaaagttggctcttgtcttgcaccttcatcttggacttctaggctccaggaccatgagaaagaactttttgttgataagccatccagtctatggtagtttgttgtagcagaccgagtgggccaagacaaacttcccagtggaatgtcattaaaatggagtgtatttcccaaagctgttcatttgagtcagactgttctgtgtcaatctagggcagtgtgctttctgtcactgtgtgattgttttggttccctttctgaaagacacattgtgttttacaatgtgttgagtggtgttctaaccagcagccttaggatgtcctgatgtttttgttctttttcaatgaggatagctttgtgttaaaaaagacttcatacaataaacagaagtcctatggtaatgaggtcactgtctttcatactgtttgatttagtcagcctgtgtaggcaacgtgtacttttaaaagtcctaaaagtaaagg

SEQ ID NO: 467889 - DNA, 533 bp, Homo sapiens
gggaggcggcggttgcactaggacttccagtatgatactgaaaaggggcggtgagagaggacatccttgccttgttcctgatgttagcacgaaagctttgagtttcttaccattaaatatgataagtgggaagagattcttctccgtttactctaagaacctggtgaaactcctggaggtaaaactcacaaagggatggagacctctatgtctgggtcccctggagcttttaatgttcaggcttgttcatactgagtcaccaggaatttatcaattacaattaggtgggacactcactggtttctgctctgattgggtaatttataaagaagagaaacttagttctcgtagttctggaggctggaagttcaagatcaaggcacaagcaagttcagtgtctgatgagggctcagtcttggcttccacagcgttgtcttattgcagcatcctccggaggaaaggaacactgcgtcttcctatgcagaagaaatagcggtgaaaagggacaaactccctctaacaagccttttcat

SEQ ID NO: 467890 - DNA, 3144 bp, Homo sapiens
cgtggctgaaaactctccagacttcaatcatgggaccaatgaggaacgtatctgaagattcctccatcagaaatagccagcataacacgggaaatgggagccttttttggacacctagtgagggctcaagggcagagtggaatcggctgctggatggcaaggctccagggaaagatcattttcccactccatccctccttcaggctccccatccatccactgacagccacctccaccacttgataaaacccccatattcatccttcaagtctgtgacccaattcttccaggatgctgaacaagagcttgagatacagcaagctgtcacactggccctctgcccttgcagaagggcagagagtccaatgagctggttaacactcaagccatctgtggacggcagggctaaaagggcacactgtgccatctggctgtctttgctttgccttgtggtccctggggcttggggagccagtgcagaagtgctggcactctagttactgttattgctgtgaagtaatcagctatccttcatctctgacccaagaatatcaagtcttcttccaggcttcataaacttgtggtaagttaattagcctgattttagtataaaaatctcagaccctttttagttcttgacaatgtacatcctgcacaatggctagaaataaaaagactggtgataccaagtgttggaaaggatgtgaagcagtaagaactctccctgttttggggactataactaggcacattcactttggaaaactgttttacagtatccacgaaagccgaacgtcatacttaataactaaataaattgctctcatgggcttatgtccacagaaatgtatccgtatgtttaccaaaaaacaagaatggtcataggcatactcttcacaattgtcccaaatgcaaaataacccaaatattcattgacatagagtgggcagataaattgtcacatcttcacactatggagtattatacagaaattagagtgaacaaactgcaactacacacaacaaaggaaaattaaatacacatgtggattgaacatccattttagcaaagcattgtgctagttcaggcaaacaaagataaatcttgatcctgttaaggtagatgaactaataaagccagtgcttatgtgttagaccttataccttcttcctgttcaaagacattgatcaggaatttttccatttctctcatattttatacacaccaccattctttctgaatcatacccatcagtacacaacaatctggatgaatcttcccaacataacattgagtgaaaggaaccatatgccaaagactacctactatggtatattccaaaatagaaaagctaagagcgttaaaagttatgacagtggttttctctgatggtggttagtgataagcagggagactgacagagttttgtaaggtgctaataaagttttatttcttaataagtactggttatacatgtgtgtgttagttatgtgaaaatgcatcgagctatacacacataatttgtatattttcccatgcatatgctgtttttcaattaaaacactaaaaacgcataactctgaggcccgttggcatactgtgttatgtcaagatagtaattctgtctaatagttacctcattcacaactcagcttaatttagagtcccaatgggtttggaggacttggtttaaaaattccataaagaaaacaaccataatactaagatcactttaaaatgaaatgcttttatgtttaaatgtttttttgtgtgtacaatccacaatttctatttgaaatgttgaaatatgttatagaatgaatgatactgatgtaggttatattcattaagataaaaaataagacatttacttaagtcaaggttgcctagagcttaaaaaaaatccagacgtaactttagtaataatgactaaaatcatactgttattttcctctgaattcaataaataaaagtattacatcccctgagaactctgactgatagagttttctgacaatggctttttattttcaacatttcatgctttaattctgatatactttaaagaagatgtaacaggtaaaatatatagccagagttacccactaaagtcggattggtaattttaacttaactatttttacttttgttaagtcatcacaaataatttttttgtgttaaattataaacataggccacataaacaaaggccacatgcttagtacaaattttgtcctggcatctagaataggttttatgtcacctgggccagaccccttactgtagagctaggatgctgaaagccttacccatgtggtctcagctggtaagggtgaggactgagaagaaaattaggccaaattagtctccagattagcacttgcaaaaattggtcaagacagcttaatcatttcaactttctattttccccaaattattttctgaaaaattacctactttactaattgtccactttaaatctgtgatagttctaagaatgatatactgaaagctgtattcagtgagccagagttctatataacagccaaatgcttttttctggcctatctggaatattctataactcaactattgtggggagacttagaaatttcaattttattaacttttctatgaccaagaataaaaaaaaaaggctagatttgtatggcctaatttggtgagacaaatgaaagcaaaacactactaacttagctaataatttgggaaagcccagttctacaattgcaaatgtgtcttgctttgagatgcatagggcagtttctctcccttcccaaattatcaggatgctaaatgaacaattatttataaattacatgtatttattttttatcacttgtaggtagttctgacagaaaactggatctgcacagtaatgaaagcatttatcctacaaaacactttatgtcatattaaacagaaaaataattgttccgaataatcaagaaggtattattaaagtaggcttctgtccttttccaaaaatatgaaggttgttatatgaacactgtcatggacctatttccatgagtttacatatttctaggttataggaataataataacatgatctaggctacccatactataaactaagatttaaattataaagataataggttt

SEQ ID NO: 467891 - DNA, 506 bp, Homo sapiens
tctttagaacaataataagataatgattaatgtgacccatttcacagaggagacaactaaggtgcagagcagggcgcttacacattcaatcaaggaaatagcccaactaaccagagtccaacagacccaaggtttccaggatgcagcttcctttcagtacccagccaacaagtcccaggctgtcctgcaactaaggacgtctgtttttgtcagaaccctcaatcccactcccactccaagagtttccaaaagtctccaagaaatgcactggcttggaaggcttcctggaggaggattagcaatgtatgagcagcatttggagaaacagtatgaggtggagaaggggacctgcctcacaaacgctgtgggcccaagatctgtgcccacctgaaagcctgctgtgattgtgaagactgacaacaactcctcttgtctctggaaagcaagaggcttgggctttgtgaatgccgggatgcctgcagctctaacagggtttgaccccttga

SEQ ID NO: 467892 - DNA, 957 bp, Homo sapiens
taagtgccacagtacattagcgtggcagttcctgcagtgagttagacactgtaaagacccttcatgttacagaccaggaaacatgaaagttgagttacctgcccaagttcacagagctaatgaccctctggcaagaggtcgacgtagtgtccaacatgcacatagggcttggagacgcattttgagccactgtgctgaaccgcctccctgtctagacagtggcagaccaccacgttcaaactcaccccactgtgaaggctgccagagaccacagccaatgaaaggcaaggcagagactggaatcaccttgcgggacagtgaggccgacgtgattaaatgccaagatgatgacaagaccgtgaagtttgcccaacaggcagtggaagaaatggaggaaaaggtaccaagaaatgagaaaatgttcctttaccaagggcgaatagggatctgttgtggagaaggtcccggtcaaggcagacgggacattctggtaggagaggagaggagattaagctttaaagtcagagtgaccacagctgagcaactcactgggcgaaagcatttcacaccctccttagggaaaggaggagatgacgcgaccaaggtcacactgccagtaagacaagaacctggattcttccgctccaaaacatcagagaagctgaaggggacctggcaggagctgaaggagctgcagacctggctgctgcctgccccatcgacaaggttctccgcagaagagactttatgataaatgtaaaaatatcacagtaatctccaataggcagtacatgggctttaaaaaggtaggggagggagagaaggttttattttcaattataaagcatcttttgcaagtgaatgcattttaatactttccttgacttagccaataatctaggcccatagctctttattgggaatatggttccttcaaaatcatgcattagtgctaga

SEQ ID NO: 467893 - DNA, 575 bp, Homo sapiens
ctctcccactgatggctgcatcccatccgagcttggagggcatctgccatgggcacaactccatctcctgggcctgtgagaatgcctgggaaaaaccactttgtccactttgtctgtaattgttcgttattaaatgatgctggtgtatatacagtgatagagagtcctttgtcccacctggtgctgtgggcagcaagaagggacaggaagagtggcatctgccgtcagaggcagcaaaggctactctgtaggaaaaacagtgcagagacgcatggcagaacagaaccactgcctaatgtgactattgctgatgtagaatactggcaatggagctcacacaagttcatatcaagcgcacctcaaagacataggccagcatcctcccggaagctgaagctgggacctgaccagagaccaccctctggagagatgaaccttgagtacaccaaggatgccatggacagagatgacaaacagggctgaagtcaagtcagaagtcttgaggacacttccagtggcagcattcacgtgagcccaggtgcttccctctcaggccactctgtgcttctgcctga

SEQ ID NO: 467894 - DNA, 486 bp, Homo sapiens
ccggagacactaggtttacaggcatgagccactgcgacgagcctgagtatcaattccagacagtgttgctccaatctgctcatcacagactgtcttggctgcagctctatgctgttggtgtgcatgggctgcacttggaagctttggccaaaactatcattgcagtcatctttgacagcaccagcagaatcaaacttctctttggggtggctcaaaacttctcacctgcttttctgcttttgacaaaaaggcaacaattaaaacaaccaagcatcactcgtcctgaggacttggcccactgtcttcttgttctgagaatcaagaaagcaagatatggaagggataaacaccatgaacaggcgtcaatagcctgtgattataaaatgaagggcactataacttttaaaagttattctgtttttcatatgggtaatacatgcatgtgatatgaaattcaaaaggcactgaaaggaatgtagtgaaaat

SEQ ID NO: 467895 - DNA, 2015 bp, Homo sapiens
caggcacttatgggttctgaaaatgcccctgcaggaaggaggagtggatggagcctctgccctgccatgaagacgtgggccttctcagggaccccactgactcttagaggctccttcacgacccacgggatcgagacgtgcagaaaagaacgcgccggcctcgcccgcgaagggccgcgcggcggtgggcggggcgtcgcgaacccccctcgcgcccactggctgcgttgcgcggccgcagctgaagttgggccgagagccggcgacggccccgcgccggggtcgcagggtaccagtgtgcggagttcctgttgccaagctgaaggtggccctgggcaggcacaggtgtggtcatatcttcagccaacaggaccatcctccggagggccacctctggggacttcctacgggaagagagtgacagatttggtgcttctgtgtgtttctgccgcttcagtggggccgctgcgggagacagcgggtggatcctccagcagcctgtctgctgagcctgccttctcaagtctactgttaaaatcaggaccgggtcgtgtccgagcctacaggccctgtctccgctccccaggcctgcaggagttgagggctgcacctgctcgctggagagggagaggcagatttagtggacgcctggcatggactcggactggcctttggaagctccctgccctgacggggttgcctgtcaccactgcgaagtgaggcttggcaggacctgcacctgagaaaggctgtgtgtggtcttggggtccacacctgcagagctaacttactgccagacggcgacttactgtgggccaccctcagtgaaccggggtgtcctcagctggccctacagagcacttctgtgctggggatgagtaggaactctgggcgaggagggtcccagcgccgcccctcgatacagcctggctctgccctctgcccgtacttacaccaggtgggatccctgccctgcattgcctggggattggctgggcttgggcccgccctgctgtggaactggatgttttcagggagcccagcctttcctcatgtcaacacagttcacaatatagttttcaaagtacagtttaaaactcaaaagtaaacttttcagcaactcaaaggtttgctgagtgatctgaagcactctggccactttttggggccatgggatttggttcacctgaaacagccagtgagaggccgggtgtggtggctcacacccgtaatcccaacacttcaggaggcagacgcgggtgatcgctcacttgagatcaggagttcaagaccagcctgggcaacatggtgaaacctcgtctctactaaaaatacaaaaattagctaggcatggtggtgggcacctgtaatcccagctacttggaaggctgaggcaagagaatcgcttgaacctgggaggtggaggttgcagcgagacgagattacgccgctgcactccagcctgggtgacgagagactctgcctcaaaaaaataaaaaaatgaaacagccagtgaggaggaaggctccccgccttccccccgccggaacatagccatagctgctgctgggacaccctcttggtggggaagaaggctggttagcttcatcagagccagcagcagcagaccagggacgggcacctaggcagtggcctcagagtgaacaggagttcctcagaaacacacacagggacggcgtggcgcatgctctgccagctccatgcctccttcccattgtggggctgggagcacaaagaccccatgatctagggcaaacttgtccaactgttggcccatggaacagctttgaatgcagcccaacacaaatctataaattttcttaaacattttttttttacgattttttttttaaagcttatcagctatcattactgtattccatgtatggcccatgtatggcctcagtgtattccaatgtggcccagggaagccaaaagattggacacccctgacctagggcatccccatcctctgccttcccatgcatggctgt

SEQ ID NO: 467896 - DNA, 585 bp, Homo sapiens
tgttgaggaaacttaagatttgacattgtttgcattcttgagtatggacttatctggatctagctatcctttgttttcttgtcttttaattccctttgcaatgaaagtgcataacaaaagtaacctttgctcaactctatctgagaccccatcaatctggacatcactgcctgcatcactattggcattttggtcagaatcatttaaccagtctctgggaagttccaaactctctcatcttcctttcttcttccaagccctctccactcttccaatgtctatctgttccttaattccaaagctgcttccacattttcagaaagagaaagactattgggagtttggaaataatcctgaaatggagtgtgcttttgccagaagacacagtaaaaatcctattaacctacaagttatgtgtaaaatacaggaacttagggatccttgtgtccagagacaagcagtctatatgaaatgtcataattttgacaagggctgctgatcaagaggacaaggtcaatgatgtctaaagtcattagacactagtactgagattgacaaatatcatacctaccgctctccccttcc

SEQ ID NO: 467897 - DNA, 948 bp, Homo sapiens
aggcattgatagcacccatcagatggccaaaacattatttactggactaggccttttcaaaactatcaagcagatagtcagggcctgtgaagtgtgccaaagaaataatcccctgccttatcgccaagctccttcaggagaacaaagaacaggccactacccaggagaagactggcaactagattttacccacatgcccaaatctcagggatttcagtatctactagtttgggtagatactttcactggttgggcagaggccttcccttgtaggacagaaaagtcccaagaggtaataaaggcactaattcgtgaaataattcccagattcgtacttccccgaggcttacagagtgacaatggccccgctttcaaggctgcagtaacccagggagtatcccagaaattaggcatacaatatcacttatactgcacctggaggccacaatcctcaggaaaagttgagaaaataaaccaaacactcaagcaacatctaaaaatgctaacccaagaaacccaccttgcacagcctgctctgttgcctatagccttactaagaatccaaaactatccccataaagcaggacttagcccatacaaaatgctgtatggatggcccttcctaaccaatgaccttgttcttgaccgagagacagccaacttagttgcagacatcacctccttagccaaatatcaacaagttcttaaaacattcacagccttggagcctgttcctgtctggattggacctccattgaccgactattacaataaaagccacagtaaaatccagtagcctctggaaaccactgaagcagaaggtttttgaagttggagcctaattgatgtttcaagagtttttctcctttctaagcatttagtgccataaatttatttatcagaactactttagctgtgtcctgtaattttaaatatgctgaatcttaa

SEQ ID NO: 467898 - DNA, 2356 bp, Homo sapiens
tgctactacgacgtgatggtgacactgcaatgcccgagagcctctggtagcctgcaggagcttcacggccgatgtgtgcggcattgttcctgcttgtcggtcatcatgcctgagaagcccattgactttggcttaagtgaagccaccactcgctctcgaatcgcgcggacgctgggcctgcgcaggcctgttcacagcagctgcatcccgtcagtgttgaagccagtggagccctctttggggctgctgagagcggatattggagctgcctctctgtctctgtttggagatccttatgagctggatcccttcgacaggaggcgcctccctgccgcggtgccagagccagacttggaggaggagccagtgcctgacctgctgggcagcatcctgtcgggccagagcctcctgatgctgggcagcagtgatgtcatcatccaccgcgacggctccctcagcgccaagagggcggggcgaggcacacgggcagagagcgaggccagcagcagggtgccccgggagcccggggtgcacacgggcagctcccggcccccagcccccagctcccatggcagtttggccccactgggaccatcaagagggaaaggggtcgggtcgacctttgagagcttccggatcaatattcctggaaacatggcacattccagccagctctccagccctggcttctgtaacacgttccggcctgtggacgataaggagcagaggaaggagaacccctcacccctcttctccatcaagaagacgaagcagctgcggagcgaggtctacgacccatccgaccccaccggctccgactccagcgcccctggcagcagccccgagaggtctggccccggcctcctgccctctgagatcacacgaaccatctccatcaacagcccgaaggcccagacggtgcaggctgtgcgctgcgtcacctcctacacggtggagagcatctttggtacagagcccgaaccccctctcggaccgtcctccgccatgtccaagctccggggtgcagtggctgccgagggggcctctgacacggagcgagaggagcccacagagagccagggcctggctgcccggctgcggaggccatcccccccagagccctgggatgaggaggatggggcgtcttgcagcaccttctttggctctgaggagcggacggtgacctgtgtgactgtcgtggagccggaagccccacccagcccggacgtgctgcaggctgccacccacagagtcgtggagctcaggcccccttcccggttgccagccttgggggaagcacatgtctcgccggaggtggctacggccgacaaggcccccctgcaggctccccctgtcctggaggtggcagctgagtgtgagccggacgacctggacctggattatggcgactccgtggaggccggacacgtctttgatgatttctcaagcgacgccgttttcatccagctcgatgacatgagctcgccaccttctcccgaaagcacagactcttccccggagcgagacttcccactgaagcctgcgttgcccccagccagcctggccgtggccgccatccagagggaggtgtcattgatgcacgatgaagacccttcgcagcccccacccctgccagagggcacccaggagccacatttgctcaggccggacgcggctgagaaggctgaggcacccagttccccggatgtggcgcctgcggggaaggaagacagcccctctgcgagtgggagggtacaggaggcagcccggcctgaggaggtggtttcgcagacccccctgctgcggtccagagccctggtgaagcgggtcacctggaacctgcaggagtcggagagcagcgcccccgccgaggacagagcccccccacagaccctggccccagtgcccgctgccctgaccccagcctcagagccagccagtcaagccactgcagccagcaactcggaggagaagaccccggcccccaggctagctgcggagaaaaccaagaaggaggagtacatgaagaagctgcacatgcaggagcgtgctgtggaggaggtgaagctggccatcaagcccttctaccagaagagggaggtgaccaaggaggagtacaaggacatcctgcgcaaggccgtgcagaaggtgggctgtgtgcgagcctgtgtgtggggctcggggtcacgggcggtgggagaacgacccccagaggtgagcagttgcctggtgacgtctcagcccatgctccccccgcccaccgacaccgtgggaccctcagtggccttgtgagcggcatagcgaacaggacgggggtctcacataggtggggcggcctctgccgccgtctgtctgc

SEQ ID NO: 467899 - DNA, 949 bp, Homo sapiens
ctcagaaagtacaagataaagatgtcaggacctaaaagggctgctatttggtcactcctcatcatctatgtggtgaccatcctagaggacctggctgtcgtggggaccatcagagccagccaccacctgcacatatccacacacctcttcctggcccaactctcggtgctggagactctgtacacctcggtcaccgtcccaaagctctggctctgcctgcacctggccatcagcgcccagctcagcagcttcccagcctcctttgtgtccacggctctcaactccagcctgaggctccgcagccccgatgtcctcaaccacttctgtgatatcccacccccgctagggctctcttgctccagcaccactaccatagaaatgcggactcaggcagcccaggtgatccttgcggcttccctgcaggcaaccacgacactggtgaccacccaaggcagccatagccctctcccaccagggcagtcagcaagtcctgccctcgcccatatcacccagagttgccaagagcacagagtggccacaggcaagcatctccttgagcagtggaggggcagagatgccagacctgggcctcagcactgccaggacagctccttgccacagcagctaggagcctccagcccaggagaagctgggcctggagctcacaagaagccccctctcacggcctctcccctgaccctctcggatgaacagctgctatggaggccagccactctgcccagtcctgcaggcccagagggatggtctccttgccatgaggtcccagctcctcagagcagagcctgaggccagggctacagctgcaggagccaccccaccttccatggtacaatcaggtctcagggctgcagcttcaggagccaccgtgccttcaacgtgctgtgttcttcttggtggcagctctgccaatgctgtgttaaacagaagc

SEQ ID NO: 467900 - DNA, 1049 bp, Homo sapiens
ccaaatggctggcctcaattagcatggatgtgaacaaatcggcagacctccatgaggactgctatgaacattggacctggctctaatgtgagtgacagaacatcttagctgacttacatgagaaccacagggaataactgtacaggacccatgaggacagctgtgaacacctgggctgtgcacaatgaagacagctacgaaaagccaagaacacctggtgtggggtcaacgaaagccattgtgagcgtttgggcttgccacaatgaagatggctataaacacctggctgggcccaagatgaatggctgtcaacatctaaactcaccccgacaaagacggtttagaacagccgtgaatacctggtcatgcccacgtaatgacagcaatgaacaactgagctcagccaatgggaacggcctgagattggatgtgaacatctggcctactgctgcaaacacctgttctgggacaaatgaggatgcctatgaatacccgggctgggccctaggagaacagctcggattaactgtgctgggcccaaaacatatggctacgaacacctgggctgaccccagtgtggacagctataaagacctgggctgggctcaggaggacagctgtgccattttggctgcatccaatgaggacagctgtggatatctgcacctggccccattaaaacagctgtgaacacctagcctatccccattgaggacacaggttaacacctggcctgggaccatgggaactgctgagaacacctggattaagtccaatgaggaaagctttgaacacctgggctaggcccactgaggacagctgtggacacatgggctggccccagtgaggatggctgtcagtacctgggatggcctcttgagggtggttggccccaattagcatgggtataaacagatttgctggcctcgatgaggactgctatggacatctgagctcgctgtcatgcggatgacagagaactccttgactggcttagatgaggacgactgtgaaaacctgtgcaggcctggatgaagacagctgtgaac

SEQ ID NO: 467901 - DNA, 1544 bp, Homo sapiens
aggacagctagcagtgccaggaattgaaatgacaatggcagcacctgggattcccaatgagcaagtggctcaatttgcccagggaagacaggaggagccaactccaagcatcgagctcaaacagcagcccatgctcaataagattaaatcaggcaccaatggagatatcaaaatgaatctgaaggcttattctgtcattttctctaggatcccgagcaagaattacaagggtgagagtggatgcagaaaaagcccccaagatgcaagacggaatctgctctacacacccagagctctgggatctgagatgaaactgaccaggaaagatctgaccacccagtacaaagcctggctgggccaagtttctctgggcactctccctattgctgtctcagagccctcaggccaggactggacctatccccctgcagcccagccccaggctgaaacacctgcccctctgaagtagagctgcccatgattcacagtaagcacgaatctgatttatgcatcagattattaaactattgattacttcatcatcattctccagtttgtaaacatgtatttggtttctagttattgttcatgattacagatttgggcttatttaatagatgtgaaatttacttcactaattatttaatttctatttctttccttataaatgatgtgaagtaatttctcttttgtgtgacttatttgtgtatatgcgagtatatttgtctactggagactgggggttaattttagaaattttatgagctctatatatttcatgtactaagtctccatctgttgtaaggagatttgaaaaatgtcagaaactctgaagaacatttggtagcactgcccagatgacacttggacttcctgcagtttcctaaaatattttattttgctactattttgtctttattttaattgtgcaaatgtttaaattttactcgaacatctttgtccattttttcttcaaaatatcttcaataatgtaacctggtttctccatttggttacattaactatttctttgtgtaagatttaatttttattgtaattctttgaaataatttttgccatattgaaacaaagttattccagtagcacgtacaaaataattatgtcctttatgatgttactatactcatttgccatgttttcatatgtacttaaaattattaattcatactctattttatttccgtggtctgtatttctccttctaatccagtgttacactggttcagttactgttgttttttaacacagtctattttgtgagataattattattctttcattagccctctaatattcttatctatctttcccagcacactgcagaatcaattattctgaattctataaaatgccaatgatatcattgttattttaactgaagttatattaaacctacaaattaaaccagaaataatggcaacttccatttgatctccctacccaggagtagaacatatttctctgttttcaagcctttttttccccattaaaattttgcagacttctttgatacatattatata

SEQ ID NO: 467902 - DNA, 1340 bp, Homo sapiens
gcactggcttttgtggaatggaggatgtttcagctgctagttttggtgcctgttcagacaggtggcagaagctctgagctcacaaatggcatctgttgggcacagaagggtcctagtgccctggtctgtggcctcagcccagcacatttgctgagatccagagaggcagcttctgtctgtcccctctccctacccgtggacaggaaaccacagatggcccagcaatttgatacgttgcagtgtttccaaagctcccagaagaagagacagctgctggggaaaggggagaagagggtcatcagagcaatccaaaggagaatggggcttgacaaagaggtaggagggaagaagttggagaagacaaaggaggcacagaagctcaaccaggcagagagaaaaggcccagagtgtggggcactttgtcctccagcagcctggctggggccagctgatgtgctggctgcagagtccaagagcaccaagacaggacaagttgtggtgacggtagcgattgttgacagctatcctggctgggaacgtgggcctctgcaggtgacagtgtgccccgggacagctgatcagctaggccatggggcataccactggctgaacgtcgactctggggaaaatcagctgtttactggagttaatgaaacaggaaatatttcagcatttagatatatgagtttcggcagggaaagatttgatgacttaatgatgagccctagagcactaggcgatggcagcccagacatatgtcagcctgtatggtgttctgcggaggctgtcattcccatgaggagacagctgtacctcgtgtgcaggctcaacattgccagggagcagtgtctggcccacctggggcactggaagaggcttcctgggagacagctgacggatgacaaagaagaggcgagtgtattccaggaggagagactgccgaggcagtgccatggagttgagcaggaactacgattaacaggggatgggagggaggcactgaggctcagaacgcagcagcagcagccttgggtgccactgtggggaacaccgaagactgttgatgttggcatgctcttcttcagaatcttagggtaaacagcagatttttaccactgaaagacaaatattaatgtaatttatttattaaaatatttgtgttttccatgctagaatcacagatgcatgttagaattaaagcccaaatgaataaatttaccttttacttcttcttacctgtgagtctattatttgtaagaatatagggaatagagaaacttccaaatgttagtaaaacaatcaagtaatcaaagagatgaaaagaaatgacaagtctaggc

SEQ ID NO: 467903 - DNA, 646 bp, Homo sapiens
gctcggatgccataatgggtgatggagtcagccaacattgctccttcagtgtgcatgcccttgttcatttgcttattcacgacagatggtccctggtgtgtgtaaatgtgaatgtggatgaatgtgagagacaggatgaggctataaatactcatatttatcacttttacaatggcacagcaaagtggagattgattaagactacagaagtatacaccaggtaccacccaggaagaggaggggctgggctcctccctgctgcaaaagaacttccaaaggctccaccccagggcgcagatgtctttgatctctcatgcctccctaaaatgtatgaagccaagctgcaccccaaccaccttgggcacatgttctcaagccgtccagagggctgtgtcatgggccatgttgaacagacacttcaccaaagaagatatacagatggcaaacaagcacatgaaaagacatgcaacatcattcatcactgtgatattagtagaaaaagtgagtaatggaatgccagtcagatggctttgctgactgacttctttgacctcacacagcttaagatctctgtctcagaccttcctaagtgaaaaaagaaatcaaaatgtggtttgcctcacagataattttgaagattggcaag

SEQ ID NO: 467904 - DNA, 677 bp, Homo sapiens
agggtccctctggtccaggctgccatgctctccccctgtattgcaaccttccttctgccagacacctatcccaatgcaacagggagagccgataaaatccataagaaaggacatcaggagacaattcttctgactgccaaccaaagagaatcaacactacattctgccctgaatccaaagcacggcttttggaaaataaagatttatgatctggatagaggcagcgatgaatcacttggcgatacgtgttttctggcacaacttgtcaaaacctctgcacagctgtcctccaattaccgagcttctgcccctgtcgccagtgaaaataaatgggctgataattacagcctcagacgttcttggagcctgcatttccctgcacttcgccagcctgtgcgtctaatggggtcacattatgaagtgtgggcattgttccaggacttcagcactccctctgtcttcttccaggatgacttcacgtcccaccattgactttcacaagccatgaaggacataagtccaggtcacagatggctggtcatcctagaaatgaccaagtgaaagctgagagtatagagcatggatgcagaggcttagccatgcctggggaagtgcagtgtgaggaggtttggagggttacattgctccggaccacactttgctctctgtggattggc

SEQ ID NO: 467905 - DNA, 612 bp, Homo sapiens
gcatttcaaagtagctagaagcgaggattctgaatgttctcaccacagagaaataatagtgacatacctgggaaccgcaccagttcccagaaccataattctaaattctgccagaccatcctgcagtctctaaattccaatggacgttttgtaagaggtgtctgggcgcaatactctccggcccgaagcaaggggacgtttgcgaggagggagaaatttaaacccccttcgctccgcgccacctgggagcactttggcgccgcagactcaggagccgacgccatctccaggacggcctcggtggcctcggcaggaggcaccttcggggagcggtcccgcactcctccttcctcagtccccggtcctctgcaccgctccctctctgctgccagaggacctgtccgcgagctccccgcgctgccctggggacggaaaagtttgtttctccaacgcgcaactttcccgctccaggcggcggggaccccgagccggagttttggccaaaaaatcccagagtcctatacctcctgcgcgcccagacctcgggggcgaagggcggctcccccggcgcgccccgatccccgccgcaaagaggacttggtggactagagg

SEQ ID NO: 467906 - DNA, 554 bp, Homo sapiens
gcttacactgtagcctcaataggagacaagattcttcccctaatgctagacttcgatcttgattgtttcatgaaattaaatactaaatctggctacaaagtgatttgtctgctactcgggatggtacagagtgctgaaagaaatccagctcttgagtctcttagatcccatcctgtaggaagtggtgggaaagccagcggaccatgggcaagtaaactactggctacttggcaggacgtcagactgtggtctctccattccccaggactcctcagaaccgtctggtactgccagtgctgggtgaacaggccaaggagagagaaaggagaaagagctgtattgggaagagaagctggctgtgcctctaaactgagatggaaagaagcattttacttctcagagtgcacttgggagcagacgaaagttgaaaaaagaaagaaggaaagatacattgattgctaggaagaaaaaaaaaagagggatggaaggaaggaaggaagggagggagggagggagagaaagaaggaagaagatgggagggagggaaggagggg

SEQ ID NO: 467907 - DNA, 516 bp, Homo sapiens
tcaaagccttgcactctccagcagggcagaggttgctggtggatgctgcctgaagaggctcccacctgctgtcagcactgggagtctctgtggccccctggcagtgaggactcgtgtgctaaccacttagcctctggtggtcatggcgaggcccagcatctgcaggtgtgctccacaggcactcaaggccccagtgtctgggatggatgcagctgcaggattcaccttggaaatccattgagagtagctttatgtttgaaaacaaaagggcagattgaaaagcagataagaagtactccaaagagagatagtgctaaaatgaattttattattattataaggcccaaacaactgggacatacagaacccttctctctgagttccactaaccatggcacgaaggcttctgtggctgcccttccttgatcaagtgccttcttcttatcagacgtgctattttattgaatgctcacagcagtgctgggtggtatgtattcctaaggcctgagaggtgag

SEQ ID NO: 467908 - DNA, 1391 bp, Homo sapiens
ttaagaagtctaactgggacacagggtggagccaagatggccgaataggaacagctctggtctacagctcccagcacgagcgacgcagaagacgggtgatttctgcatttccatctgaggtaccaggttcatctcactagggagtgccagacagagggtgcaggacagtgggtgcagcgcactgtgtgcgaaccgaagcagggtgatgcatcacctcactcgtgaagcacaaggggtcagggagtttcctttcctagtaaaagaaaggggtgacagacggcacctggaaaatcgggtcactcccaccttaatactgcgcttttccaaagggctaaaaaaattgcacaccaggagtttatatcccgcacctggctcagctcgtcctatgcccagggagtctcactgattcctagcacagtactatgagatcaaactgcagggcagcagcgaggctgggtgagggacgcctgccattgcccagacttgattaggtaaacaaagcagccgggaggctcgaactgggtggagccgaccacagcccaaggaggcctgcctgcctctgtaggctctacctctgggagcagggtacagacaaacaaaaagacagcagtaacctctgcagacctaaatgtcccggtctgacagctttgaaaagagtagtggttttcccagcaagcagctggagatctgagaacaggcagactgcctcctcaattgggtccctgacccccgagcagcctaacaggggggcaccccccggtaggagtggactgacacctcacatggccgggtactcctctgagacaaaacttccagaggaaccatcaagcagcagcatttgcggttcaccaaaaatatgggactatgtgaaaagaccaaatctacatctgattggtgtacctgaaagtgacggggagaatggaaccaagttggaaaacactctgcaggatattatccaggagaacttccccaatctagcaaggaaggccaacattcagattcaggaaatacagagaaggccacaaagatactccttgagaagagcaactccaagacacataattgtcagattcaccaaagttgaaatgaatgaaaaaatgttaagggcagccagaaagaaaagtcgggttatccacaaagggaagtccatcagactaatagctgatctctcagcagaaactctgcaagccagaagagaggggggccaatattcaacattcttaaagtaaataattttcaacccagaatttcatatccagccaaactaagcttcataaatgaaggagaaataaaatactttacagacaagcaaatgctgagagattttgtcaccaccaggcctgccctaaaagagctcctgaaggaagcactaaacatggaaaggaacaacc

SEQ ID NO: 467909 - DNA, 1600 bp, Homo sapiens
actgtataattatgtgttcataaacctcatgtctccccttgctgattgtttagaaaacaaagaataaaaattaaaagcagggagccaagatagctgaataggaacagctccattctgcagcacccagagtgagcgacgcagaagacgggtgatttctgcatttccaaggttcatctcactgaggaggtaccaggttcatctcactggggagtgccagagagtgggtgcaggacagtgggtgcagtgcacaatgcgtgagccgaagcagggcgaggcttcgcctcacccgggaaatgcaaggtgtcagggaattccctttcctagtcaaaaaaaggggtgacagatggcacctggaaaatcaggtcactcccaccctaatactgcgcttttccaatggccttaacaaatggcacaccagattatatcctgcacctggcttggagggtcctacgcccacagagcctcattcattgctagcacagcagtctgagataaaactgcaaggcggcagcgagactgggggaggggtgcccgccattgcccaggcttcagtaggtaaataaagccgccaggaagctcaaactgggtgaagccccccacagctcaaggaggcctgcctgcctctgtaggccccaccactggtggcagggcacagacaaacaaaagacagcagtaacctctgcagacttaaatgtccttctctcacagctttgaagagagcagtggttcttccagcacgcagcttcagatctgagaacaggcagactgcctcctcaagtgggtccctgacccctgaatagcctaactgggaggcaccccccagtaggcgcggactgacacctcacacggccaggtactcctctgagacaaaacttccagaggaacaatcaggcagcagcataggtggttcaccaatattggctgttctgcagccaccgctgctgatatccaggcaaacagggtctggactggacctccagtaaactccaacagacctgcagctgagggtcctgtctgttagaaggaaaactaacaaacagaaaggacatccacaccaaaaaccaacctgtacgttaccatcatcacagaccaaaggtagataaaaccacaaagatggggaaaaaacagagcagaaaaaccggaaactctaaaaatcagagtgcctctcctcctccaaaggaacgcagctcctcaccagcaatggaacaaagctggagggagaataactttgaccagttgagagaagaaggcttcagaagatcaaactactccaagctaaaggaggaagttcgaaccaatggcgaagaaaactacgtgacaaagaaaggtgcacaagcctcagtaactgatgcgatcaacgggaagaaaggaatttcatatccagccaaactaagcttcataagtgaaggagaaataaaatactttacagacaagcaaatgctgagagattttgtcaccaccaggcctgccctaaaagagctcctgaaggaagcactcaacatggaatggaaaaaccggtaccagccactggaaaaacatgccaaattgtaaagaccattgaggctaggaagaaactgcatcaactgacaagcaaaataat

SEQ ID NO: 467910 - DNA, 554 bp, Homo sapiens
agggcaggaacaggccattttcacttcttttgtggtagaatgtcattagttaaggcaggaaccggccatctggatgtcacaaggccaggaactattctacatccacatctatatcctctttactggatgttctcttcatcagttacctttccagagacctggctcttccatgggaagaggtttctacttatttttttcaagtgggggatgttgatccttttatattccttgggtttggcatcttttgagctcccaataccaccttctgaccattacttctctgacgctatgtgcaattcccttgtctttttgagattcatgccatttacatttaccaccctataccactctttgttgtctataatttaccaacctctcagtcattccttatccattaaggccttcagcatgaggttcattatctttcctttgattccagagtttatgtccttgcccacatagctaaaatgaaatttacacttaaatgattatttagcaaacactaaggcttgatacaatgattgagaacctgtgatttctcattaatctttatc

SEQ ID NO: 467911 - DNA, 804 bp, Homo sapiens
ctccttaagagctggtaccgtacactaggaactaagaaagacaccagagtgttgttgggccatggggaagtccagggtgtcccaaggaggtccaggatggccaggagatgaggacagggaacttaggagtcttggcagcaccacggtggttggcaagaacaagcaccttacaaaaggcagcaaaaagggagccaagaagaaagtgatggatccattttctaagaaagattggtataatgtgaaagcatctgctatgttcaatataagaaatattggaaagacgctagttgccaggacccaaggaaccaaaattgcatccgatggcctcgagggtcgtgtgtttgaaatacggaagacctcttatgctcagcaccaacagatccgccaaatccagaagatgatggaaatcatgacccaagaggtgcagacaaatgacttgaaagaagtggtcaataaattgattctagacagcattggaaaagacatagaaaaggcttgccaatctatttaccttctccacgatgtctttgttagaaaagtaaaaatgctgaagaagctcaagtttgaattgggaaaactcatggagcttcatggtgaaggcagtagttctggaaaagccactggggacaagacaggtgctaaagtcgaatgagctgatggatatgaatgaccagtccaagaatctgtttaaagttcagacttataatagtggcaaataaaaagtcctatttgtgatgaaaaaaaataatgataatctccagttccatccatgttgctgcaaatgacatgatttcattcttttta

SEQ ID NO: 467912 - DNA, 745 bp, Homo sapiens
cacctcggcagccagctggctgctctctgcccagacctgggaggtgtagggtgtctgtggggtggttccacacctccatgctgcggtgtggagaggagtcagccctggtatgcttgctgtaggagcaggagggaggggacaagggaacggccatatcgacgatggcttctgtcttcctaaggacgcagtccaggcctgcttcatccctccaaccctgctccaagcctctgggataaccagcagtgtgaggctggttgacgacagtggctcagcacagcctttgatgtcaccctttttatgcctccctgtggccctacactgctggcccacctcttcccaggtgatgagaagttggattcagggcctatctctgcagtgctgctggctggctgtgcctcagcaggtctgcactgtgctcagaagcttcatcagtgtgtttttccctaagaggctggggctggtgggcaccctgggacacgactgtgagtggaggaggccagtgctctggggcagaagcagcccaggcacactgcagggctggcgcatcctgtgctccagctgctgagcctccccccaccgcaccctccccctgccaccccaccagagggcacagggacaggcacctgccagcctctctttgctccaacccctggggcacaggattgccaaggtaattatcatcagatgtagatcttaacctaatattctcctatagaggaacttggagtagacatgaaaattctcc

SEQ ID NO: 467913 - DNA, 2127 bp, Homo sapiens
aggagccagggcaggcctcaaccccatgtccagggcatctcaggccagctgtgaccagccgtggcaggaggtcctacagaagcccaggcctcctagactctgtgaactgtcctatgacggcagatgggtgctctctgatgaacaagtggtctgtgatggacgggtgctctgtgatagatgggtggtgtgtgattaatgggtgctttgtggtgaatgggtggtctgtggtggatgggtggtgtgtgatggacgggtggtttgcggtgaatgagtggtctatgatggatggatggtctatgatggatgggtggtctgtggtggatgggtggtgtgtgatagatggctggtttttggtggaagggtgctctgtgatagatggatattctgtggtgaatgggtggactgtggtggatgggtggcctgtgatggatgggtggcctgtgatggatgggggctctgtggtgggcgagtggcctgtgatggatgggtgctctgtggtgaatgggtggcctgtgatggatggctggcctgtggtggatgggtgctctgtggtgaatgggggctctgtggtgaatgggggctctgtggtgaatgggtggcctgtgatggatgggggctctgtggcaaatgggtggcctgtgttgaatggctggcctgtgatggatggctggcctgtgatggatggatgttctgtggtgaatgggtggcctgtgatggatggctggcctgtgatggatgggtgctctgtggtgaacgattggcctgtgatggctggccagcctgtggtggatgggtgctctgtggtgaatgggtggcctgtgatggatgggtgttctgtggtgaacgagtggcctgtgatggatggctggcctgtggtggatgggtgctctgtggtgaatgggggctctgtggtgaatgggtggcctgtgatgaatgattggcctatgatggatgggggctctgtggtgaatgggtggcctatgatggatgggggctctgtggcaaatgggtggcctgtgttgaatggctggcctgtgatggatggatggcctatgatggatggatgttctgtggtgaatggctggcctgtgatggctggctggcctgtgatggatgggtgctctgtggtgaacgattggcctatgatggatgggggcactgtggtggatgggtgctctgtggtgaatggctggcctgtgatgaatggctggcctgtggtggatgggtgctctgtggtgaatgggtggcctgtgatgaatggctggcctgtggtggacgggtgctctgtggtgaatgggtggcctgtgatgaatggctggcctgtgatggatgggtgctctgtggtgaacgactggcctgtgatggctggccggcctgtggtggatgggtgctctgtggtgaatgactggcctgtgatgaatggctggcctgtggtggatgggtgctctgtggtgaatgggtggcctatgatgaacggctggcctgtggtggatgggtgctctgtggtgaatgggcggcctgtgatggatgggggcactgtaatggatgggtgctctgtggggaatggctggcctgtgatgaacggctggcctgtggtggatggttgctctgtggtgaatgggtggcctgtgatggatggttggccagtgacagatggctgctctgtggtgaatgggtggcctgtggtgaatggctgggcttgtgatggatgggtgctctgtggtgattgggtggcctgtgatggacgggtgttctgtggtggatggctgctctgtggtgaatgggggctctatggtgaaaaggtgacctatggggaatgggtggcctgtggggagtggttggcctgtggtggatgggtggcctgtgatggatgggtggcctgtgatgaatgggtggcctgtagtggacaggagaaaggtattaacacgcactacacctggtagacaatgcgaatgtcagtggcctgggtggcctcttcccagtgcccaccatttggaggcccatctgcccactcctcattctccctagctggtccctcctccatgtaccacagtgaggctagcagtcagggctggtccccagagagctacagacccctccttcggtcctgcttaaaggctctgccct

SEQ ID NO: 467914 - DNA, 705 bp, Homo sapiens
agtctcagccacatctagttagaagtggcagtttctcctgcgcactctctctctcctgcagtcttatgaagaaggtgcttggtttccttaggcctcctcagacatgtggaactgtcacacgtcataggtccgtcacacacactcagcagcccttccaccgaggcagccctgaccttctgttgagccttgccccttgggccgtcctaggcctccaagagctggccatatgggtaggcccagattctcatgggggtcctcctacgcatgaagctgtacaggaaagggtcccgggtttcagggttggagaactcagcagggcgtcccacggatgtttcgacacttcccgttccccttctgggccctgcgcctgccctgagctgcaaagtcgcccagaacagccacctctccctgcctcactgactgcagctctgcccagcaacatctccttcctgactcatgaggcagctcactccctaaaaacctcccctaaaccccctccgtagaaataagttatctcacttaatgtgaatactcgtatgtttcactgcagaaatattaatgaatttggctgtcgtgagttgctacttcaagcacactaaggatgttccataattatacacctttgtaaaatctgaaaaagtttgaatcacaaaatacattgacccccaagggtcagaacagtggacctgaatacttaaaagaagc

SEQ ID NO: 467915 - DNA, 2543 bp, Homo sapiens
gtggttgctcacacctgtaatcccagcactttgggaggtcaagtgactgggaaagagagatgtcagctgggttgtcggatttcctggtttatttcaacactatcttctggctcccacggcaacaacagcagcaaaacagcagcaacagcaacaacagtagtgtcaacagcagcagcgacagcagcaacaacagcagcagcgacagcagcaacaacagcagcaatagcagcaacaacagcagcaatagcagcgacaacagcaatagcagcagcaacaacaacagcagcagcaacagcagcaacaacagcagcaacaacaacagcaacagcagcaacagcagcagcaacaacaatagcaacaacagtagtggcaataacagcagcaaaacagcaacagcagcagcagcagcaacagcaacaatcaatgacctttccgagggctcattctgcactgggcacaagggtgtcacagttcagagctggcggcttcatttaaggagcaaatgtgctccccctgctggctgagggcagccaatacatcggtgtgctgcaaaaatcacaaacctggtttttgggctccctccaaaccacaggaggctggactcagaatgtgtaacagagacaacattccccattttcatcatttttctaaaacctttaaatttggtgacagaagttgttggtacccttcttccaactctgccttttatgggagtgaattaacttgagtgggagagatgggtagggggctttagaagcatctcagtatatcctggtttattccataattatgcatgacctcatggagcagcccctgcccgggtaccctgtcttccaaagtaaatccaagtgtgagtcattgcgtcattcccatatactgactagaagagaccaagttagatttcaaacaagctcaggacacctagtattcaaaaacttatgagccaggagccacttcttcttccatcattaaacttattgaatctgttctcaagtctctatatctggatatctggatgccatgctcctgtataaaggaaggagaaggatgtctccatggcttaaataagttgaacatttaataagcctgagccttaagtattgctgggggtgatgcaacaggaatcagcaatcaatagttgctctttttagagtgactagctgcatcccataggaaaacttgtttagtctccttccttctctgtcttatgactcccccaaatcctcactctggcaccaatcaggagatgcatgggaaaagatagacctgtttttgctctggggctttctcttcttttttctaataaagttatgagaaaactggaggataggcagtgggacagccaccctatgatgagcactgatattaagaagggttcttgtcatttggttcccaactgcaagtcattacaaggaaaggaacgttagtgatagaaaggcacaagcttcagctcaaatccttaactttgggattttgtcataaaactcttatgctgagaatggtcttttagagtcctttgctcactactcatgcacaagtgtctgagtttcccaagggaaaaataagcaaaaccttcatgctgcctttggattaatttttttgtagcttagaagttggtacaatatcaagtgattaagtgaacgatgacattcttttctcgccttagatcagttttgcttttcccatgacaacctgaaaatagatatctatattatctccattttatagatgaggaaacataagcttagagaagtaaaagaattcattcaagttcacatagacagtcagtggcagagtcaggatttagacccacatatttctgatttcaaaactcaagttctttatcccagaactggcatttggcatgtattgctatacatcctgtgtaacttgctactttgaatttagctctttgtattttctgcagatcttggcatatacaaaaagctcaataaatgcctcttaattagttgattagtggtgagggttttttcttaatttgattcctatgattttattatttatttccaactagtagcattttagccttcttgagtataagtcattaaagacctgggatggcctttgttgacaagtatcattttaagttctggattccaaataaggaattaatagatagatgtcagagaaggagctgaactagagctcctgagtcttgatctaattagggagcttgatgacgattttgtttatagactatgaatcattcatttcatttcccaggacattcagctaagcttcttcattactactaccacaaccatcatcatcagcatcaccaccagtatatagcaccatttaatgaattgtcaatcgtttcccaactaattaaaaataagacctttttcatatatcaaattcccttaaagacttggtgtgcttgtcttctgtgcatgtgtggagtggggtcagcagcatgggcttgggagattgtcagctcagatctcagtcccagctctgctgctactggcctggagtccctgggcacgtcacataaaggcaatgaaggggacaataaaatc

SEQ ID NO: 467916 - DNA, 547 bp, Homo sapiens
cagtggttgacatgctttaagactgcctccttagtgcacagaggacaatggcacaacaccatggccaaccaagcccaggccaagctcccatctccctccacacttttcctgctcacagccccggggagtcaggtccacagggctctgccctgtggagaagcctcctctgctcaagatgtggccttggagatgtgctccgaccatgcccagagccacacagacccaagtgcagccaggaccacccacactggcctgcccctgccctctgatggctccttctggcccaaggaccatcccctcctcattgaaaccctgactcggggatgctctggggaaaggggaggtttttttcgtgggcgtcctactgggaactctgcacccacggccaggcctcctgccgcgtgcgagtcttctgacaaccccctgcgcaagcggggcccctccggccgccccgggacgtgcgtgttcctcccgctcgcggcccaccccactcgcggggcgtcctcccgccagcgggacctgccgtaggaggggaagggaagggaag

SEQ ID NO: 467917 - DNA, 1262 bp, Homo sapiens
caaccacaggaactcaggaatgggaagcccggtaaatactaggatatgggactacgccgcccttcctgtgcggcagtccagctgcaagatcccccaaagtgctcttccatcttctgtagttcaggtccttctgaggatgacctgctcgtggcacaaatgcttcagccctccagagattttgcctctgtccacagttcctggggccctgtgcaaacaaagcagccaaaccttagagatggcacagggagtctgagccaggggatgaggaggggagagcaaccaggaaccagagaggatgatgatccagaaggaatcctttggaaaaatgggattgtgctcctgccaggtactgaaaagcacattgatttcaagccaaacacacctgcaggcctgatgcggccccagggcggttggtttgcttcctgtgttctatgccatctaaatgtggagctctttattgaacaagatagagtaaaatccaagtcaataccctctgacggcctcatctcaaactaatggctatggcttaaattaatggcttgatttaaagttgactcagctcagagtcctgtcagcaataagccacaggaattctgaaaatgatgcacattttaaagataacattttaattattttatcttatattttataattacaagggatgtaattcacatatgtattagtcatttaaagtaaacatattataacactctttaaaaactgtatgtaatagaatttaagtatcttgcaatttgatagtcatcatcacctatttaaaaatatatttgaggccagagggagactctgtctttaaaaaatatatatatatatgtatatgtatatatatatgtatatgtatatatatatatgtatatgtatatatatatgtatatgtgtgtatatatatgtatatgtatatatatatgtatatgtgtgtatatatatatatatatatatatatatgaacttaactctttaatagctggaaaattaacactgttccttttcctccttacattgtatttccatttcccacttccgtctttgaattttatcctaatatattttttaatggctgaaagtcttttattgatatatttatcaaacttccctgtggcaaaaatatgtatatggcaaaaataagtatataaataaaaatagatttttcaaagtagttcatgcgattacaaggctcttacaagtgttaagaatatttattgttgggtggagccaagatggctgaataggaacagctccagtct

SEQ ID NO: 467918 - DNA, 972 bp, Homo sapiens
aagccattttggactacttagagcaggggtctgcaacctatgggctgatactggtctgtggcctgttaggaactgggatgctacagcacgagagaccctgccggtcctccccgccgggctccctcgcagctcgcagctcgcagctcggggaaagggcgggctgcgccctcaggacctttctcagcagccacagcagcgcatcccagcacctcctccaggagccccgccatctcctgccacccggactttccccacagcgcagcatcccctagtcccttcagggctggaacagtggtacccgcagacggtgcaatagggaagtcccttttgcctttccatggaagctgtagggcgcttagagctgctgggggaggaaaagaaagaagaagaagaaatacagtaagtgtgatatgggtacaaagaaacgaacatgcagcttccgtgtgcctagacaggagccctgggacatgtgcactgggcctgcgtcatcgcctgccttcagcgggctccagaccttccagaggcccccctcaccacccgcggccctcctgaggctcccctcacccccacccacctccgaggccctcccgaggctcccgggctcgcgctcctctgagttgcctgcggctgactccagcgcctgtgacccggacccagcgcgcgactcacagaccccggctctgggcacccctggtgagtgccttctgccccagagctccacacagcaccagcctgcacgctcccccagcttcagttcatttgctgctgtcctgacaggtcagtcgcttgagcatccatgctgccaggtgacaaacccagtcacgcagaggtgtacatcctttagccagggtgacacgatgtggagctgaatccaagtccgggagtctggtgaccgtatctgggctctgactgcgcagctgtctcacagtgaaacaaattggggactggccttgtcctgagtggccttaggac

SEQ ID NO: 467919 - DNA, 1190 bp, Homo sapiens
agagcaggcactcacagaacacaggttggttgggggccttgatgtacccaagctagctgagatggccttgcagaccctggctgagcgggcaggtgctcggagacaggatcctgacagttgtggctcctcagatgccttcatctgtccaaatggtctgacgatggctgtgccccagggccaggagtgtgtccctgtgcagtgtggtgcttcaggctgcctgtgctgcaccctcctggagctccaggatggctccttccccttggatcccttggacacagatatctttgtgtctctggtctttgggatctggccccaggctctcccacaggaggacagactgtggctgctggcctggtttgtggaccctaacgatgaagtctctatgatgcagttagtgctgctgcccaccctgcacactctctgccccaccctggtgaatttccctgctgactatggggtgcccaattgggggaagggggcaaatcatccccctacgtggatcctttctgagctagaaattcccagtgtgagctgctgtgttgaatttaagaatgatgtccaaatgtcatcagtatccattgcttggctctgctcccagggcctgaggacaaagcaggactctgtggtcacaggcaacaggccctgctcactgccttgctccaccagcggccccacctatggctttggtggatttggtgcccactcagtgcctgtcctactctgccagctgcaggtctcactgactgtgcccgagcccatcctgagggtatgaaggatggcagcagctgtctttcccaaccagggtcaaaaaatgccacgctttctccaagtccaggccacgctagtttgagagtaaagggaagtggcagtttctgagcgtgatggcatcttctttcaactgcagtgctgagaaattgctggccttcctttctcaggaggcttggtgacttacgtgtgaaatcctagcatggctcagatattctcaaagctcagaatctgctgaggctctgctacctttagggctcatgggctcccgaatagcccttggtgtccgtcaatgctgcctgccggtggccccaggtgctcagggtggctgagttgtagcttgtcccagccctgttctgtgttggttgaatgtggcattggctctgccttgtgtttctgctttgccttctgctggacaggcctgt

SEQ ID NO: 467920 - DNA, 756 bp, Homo sapiens
tctgttcctattcggccatcttagctcagagcaaaacttttaatgaccacagttacagaatatgtttcaatatcaaatggcccttgacacagtgttgattcatgccatcatcattgtcatcctcctcctcctcctcctacttatcatcatcactctcaccgtgatccttatcaccatcaccatcatcctcatcatcactatcattatcctcaccatcattactatcatcatcaccctcatcatcctcaccatcatcactattaccaatatcaccatcaccattatcaccattatcctcatcatcatcctcaccatcatcatctttatcatgctcctcctcatcatctccatcatcatcatcatcatcatcatcatcatcatcatcatcatcggaatccaagaggaaagcagaagaaattctggggacctgcagcagacagacccagttaaaaaggcaactcaaaggctctagcaagatctcaatttggctctgggctatattaattcagagcatttcctcactgtggcattggctgatgcatttttattttctggattttaattaaaatcctgtaatattctgatctaggcagcataaaaactcacattcaaatatatgtgtgtctgtgtgtgtgtgtgacagcggtgtatacacacacatatacatatgctttgaataattacaatacagtttttctcatatatactaattctttttaagccaaaggaaataatttatatttttcaaaactttgc

SEQ ID NO: 467921 - DNA, 818 bp, Homo sapiens
acatgatattgctataaatgacaggactgtgggtctgagcctgctggaaagcagctgactttaggaagccgagggttcctggctgtgccaggaacctgtcctgagtcttttgcctctgaatcacctctgctgtgatgctccatccaggaatgaaatgatcccaaagcggcctcgccgcctcgtcagaactcgacttgctcggtggggatgagagtggaatggagagccgtgtccacttctcttgccctcaagatgcaacacctactgaacctgcagcttccccattacttggacacccagccccctaatgtggtctctctctgcctctccagccccacctgtccccggcacccaggctgtgtcctggggctctgcgctctggccaccctcacagtgactgtccagctttccctgggcatcgacgtggtaccagggcctcggctggggactggggttcacaggagtgaccagaaggtgccagccatgcaagaatctcagggggtaggggtggggagtggtggtgcagaaaagctcctgcaggcatgtgagcctgctgcttcctgcattggaaagggccagtttcactggagcaaaggggaggagaaactggaagtgcgattgccctgggcttccgttcgccccagtaactgcaccccaaaggcagaggccatcatcaattcaagtcctccacatccctgaactatcctgagtcctgagtcttgtcgttttggaagtctggtccttctatttctattttttgaatctctcatagcctttcaattaaaaatgcttttgctttcataagccatggttgtttt

SEQ ID NO: 467922 - DNA, 866 bp, Homo sapiens
atttcggccatttctcctcttggcaagcaggagctgattcatatgtctctattgaactggcgtggcctgtcctctgctgggatggcccagggtgctgactgtgaagaggagacagtgctctggagattgtatcaggcaaaatgcatcagtggaaggatcctgagccagctgctcaacagtgagggccctacacattcactggcctcttcaatggtggagaactcatccccgcgtctctttctacagaaaacactgaacacatctgccacgtgcacattctggctgcaggaaggatccagggctctaggactgagcctcatccaactgtgtccccagaatttcttctgctttcctcttggattcctgaaaacaatagagatggtctatgtgaaggcccacctggggcaagcccaggttccagatgatgaggaggagcatgataaagatgatgatggtgaggatgatgatgaggataatggtgataatggtgatggtgatattggtaatagtgatgatggtgaggatgatgagggtgatgatgatagtaatgatggtgaggataatgatagtgatgatgaggatgatggtgatggtgataaggatcacggtgagagtgatgatgataagtaggaggaggaggaggaggatgacaatgatgatggcatgaatcaacactgtctaggactttataaagagctttcaaccaaggcaatcattcaaataaaatatagtaaaaccattagaacattaggatttagtaaactgccttcagcaaaatggcaggttataaaacatcaaagagtatttttaagcataagcagcaagtatttagaaaataaaatattaaaggacatcccattagtgtg

SEQ ID NO: 467923 - DNA, 615 bp, Homo sapiens
tccttccaacaccgtgcagccggcttcattactccatcatgattgcttggggcaaatggacccatacggtccgtcttctaatatttgaggttctccagaagtggggctctgggttgtccttgccagaccccactccccaccatggtggctacgaaagggcatttcactcttcaccctgtcctcctccgcaatccccgctttcctggaagcccccaccatctggcctgaatctgcactatcaactgcatgtactgctgatgggctactcgtgcctctggagaagtcttcacagacacactaagcagggcctggctctgcccagagtctgctggctccctggctctgaggagacatgccaagccctgcgttggcaggcattgggagttgctctcactcctgtgcagcatggagatgccaggcagagggaatgcattatgcaagcccagttctgagacaccacgcattgtgctttccagcccagccatgcaatgctgaccatgtgcagttattgcagcaaggctggtgtcctggggacagggcatcctctctgtatagccaatgtctcagggcctccttggtgctgctgtatcttgctagtggtctatcaattttgtc

SEQ ID NO: 467924 - DNA, 469 bp, Homo sapiens
tcgccacactgacttccacaatggttgaactagtttacagtcccaccaacagcataaaagtctcagagaagtttgatagtctgaagccttcttctctcaactcatcaaagtcattctccgtccagcttcatttcattgctgtcaagaccctcacctgcaggtctgttggagtttgctggaggtccactctgaccctgtttgcctggttatcagcagcggaggctgcagaagagcgaatattgctgaacagcaaatgttgctgcctgattgttcctctggaagcttcatctcagaggggtacccagctgtgtgaggtgtcagtctgcccctactggggggtgcctcccagtaaggctactcggtggtcagggaccctcttgagaaggcatcctgtctgttctcagatctcaaactccgtgctgggagaaccactactcttttcaaaggtgtcagacagtgacatttaagt

SEQ ID NO: 467925 - DNA, 681 bp, Homo sapiens
cagcagttctctctggccctcagtttctgcttcagtttatccaatggcttacttttttcacaaatacttattgaatgccaacagcataacaatgatccaggaggtgtatcttctcacttttgggcttaaacataccggtggtgtgggaaaaaaatgcagcaaatgtgttatcaatggaagcatttgctgtaagagtttttttttttccttagtttcacttgttctagatctaatcaaacacttttcaataagtcaacagaactctcctcctaaaaccctgtctggttttttcaccttatctttagctcctctcccacgcatgctccatggtttcctgacttggtgcctctgcagtgctgctgctgcctccaccacgcccagttcttcaaagcctcctctgggcacaaagctgagctcccatcctctgctcgtcctctgccctccccattcagtggagctggcgcccttcacttcacttcagcagatcaacgtgggaggaggaataacatgggattgatagcaaatcggcattcattcattcattggctctcgaatatttggtatgcattacaatatgggggatggggggaaggggagggaatcgatgtttctaacaggacccagagggtcctgatgcaggcagtccttggaccacccttagtgaaattgaactagatttgc

SEQ ID NO: 467926 - DNA, 704 bp, Homo sapiens
ttggcaattatgaacaaagctgctataaatatccatgtgcacgttcctgtggacactgattttcaattcctttgggcaaataccaaggagtgtgatcgattgctgaatcatatgctaagagtatatttagtttgtaagaaactgccaaagtctcttccaaagtggctgtaccattcagcaatgaatgagagttcctgccactccccatccttgccagcatttggtgttgccagtgttttggatttcagccattctaacagaaataattggtgtcccttcatcccctgccacttccctgctgttccttccaagatgaagcatgaagccttggtgatgggtagtaccagtagagagatgcccccaataagacaactagtgctgtgtttgcctctggacctaaggtatgctgctttcctgacagccagatgcaatggggtgcacagtgttctggtaaaggaggaaggcttcttggtcaagagcccacctggacactggcctgaggtgcacaatgatcacaattgtcattgccggaaaaaaacaacttcataatgggtttctggaacggttaccgccagatttttattaaagaaatcaaagccaaaagtttccctttaaaacatgcatggtgaagggaaaattttaaaaacagctgcctactgagctatcacttcaatataaagcaaatggtgcttcaggcacaaaac

SEQ ID NO: 467927 - DNA, 581 bp, Homo sapiens
gtgaccacagtaacccaggatcctccacttactaactgtggctttggacgaatttttccactcctttaagtcatggttctcttcatttccaagatgttaagcacaacgctttcggatgtcatagagtgcaatgcccaatggactcatcaaacagagaagggtaaaatctgttgccagaaaagcaagtgtgcctcgcaggtggctgcagcccagacatctcttttctggctcacagagaactgtgaaatgaacttctgttatttagaagctacccagtttacaatattttgttatagcaacacaacaggaaaacacagtggcactgtggccctcccaggcaggacactggcacgtggtgcagatcctcatccttctattccaaagtccagggagcctgtgccacccttgggcaacccccctcgtttgacccagcaccctctcagcaacacccagataactttttctcccacgagggagcctgcctcaaggggtgtaaaaccactttttcaacttctatttggggccagaaaactgaaaaactaataacaaccaccccctccccgccccagaccaaaagcctt

SEQ ID NO: 467928 - DNA, 599 bp, Homo sapiens
tgaagtgtaagcattgtttagtctctttaaggacggggaaactgaggcacagagaagtaaatatgtacatactggacaagcagagaagcagccagggaccaaaagccttaaactttctagacaagaggaaggcaaaattccctttgcatcctctgcagtctcctagagagaagacagcaatgagcagcttggtaaatggtcctaccccagctgtgaattacctaaggcaagcactgttgcatggaggattaagtttccaacacatgaatattagtggccacattcaaaccatagcaggctccaaagccagagcctccttccctactgattcttgtacagttcttgctattaaaagcctccctggggtctctggagataagcaaaatctggtgcccaggaacaactttctctgtgacccaaaaccaactagtgcaccctttgaagccaccacttctcaatggtgtgaagtccctgagcctcagatacaggaacatggcatggggctaggagtcacacctgctgaggtctcacctgggtccttcacctactgatggactgggtccctctgaacttccaccagggagaattaaatgtgtgtt

SEQ ID NO: 467929 - DNA, 511 bp, Homo sapiens
tgcacacgataccatgtatgctatacacaagtgcatgatataccacctagacacacacttgccactcataccacactgggcacaccatgcacacatcacaggcacacacactgcctacacgaattccacattatacttccagataccacagaaaacagcatccaaatcacacaaacacacaaacttatatttggaaatatacccaaatatattcaatagaaattggataaataacttgccaaatgctgaacaaacgaaagaggaaaatattactgatcaacccactgaaagaaaggaagataaaatcagaaatactggaaatgtgataaatgtaaaagataaaataagactattactgaatgtattggttatcagaatacatccaaaaataagtggactaaacttccctatccaaaggctaagtacctagagtgcttcaaacagcaaaacctgatccatctaaagtaaaatgaagcatagaggttgatactttgacacttaggagttaggc

SEQ ID NO: 467930 - DNA, 1157 bp, Homo sapiens
tcccttctccactgtggtgcccaggagtacacctgagcctgcagcttcctatgtttccaaacatgttgccctccgttggtgctgtagtccagcacggatgccttctggacatcctggtctgcacgtacctagccgagaaggggctctctggcagctgtgggctgacagaggcactggtggcctttggggagggcagcagtttaggaagaaagaactgcagagacccctggggctccctcaggcaggagcctcactggtcagaccctcggatctcttcatgtctagtggccatgctgaagcaggaaggcaacttcttcctcttaggagtgaaagagtggtgtgattaccagcaagatcattattcttatctccatttctcaggacctctaacctggtctttggaccctgcttctcggaaccatggcccttacaaggtggagaatgtgaaagtcagagatctggagtacaactgcgcccatttggctgcagaaagcaaaatggatctctgtattttctacccgatgcatcttcatcaacatgatccattctctgatatgcatagcactctacgagttgccaattttcacatccatttttcttatttgatattcacctatttagttagaaagtaaaagtagatgtaatttccccccatgttatagagggggaaattaaagagaaggcaggcaaaatgcttttgtcaaacaaagaaagtggtaggttttctgatatctagcctaaactatttcagatataccaggatgtaacaaagagaacatacttgtctgttagtctattacatgctaagatatcactatttaggtttaaatatattatacagagatcatggggagaaattggcctctgcaactttgaagatgccaatatagcttcaaacagctcttgaggtatgtgagagctggcaaatgaaactgactggtagtgagaatcacataaaaagtcaatcatgcaacttaataaatgtcacttacagaaaacccatggtaccatcttactggtgaaataatggatgctttccctctaagatcaggaacaataccaggatgtctgtacttgtcacttctatttgacattgtacgggagattctagcagggtggcaattagacaagaaaaagaaacaaaagggagccaaatc

SEQ ID NO: 467931 - DNA, 1004 bp, Homo sapiens
ctccttaaatatccctccctagacaattactgggaacccttgccctctgtatggtcctggctgtcaaagggccactgcagtttcatggtgtggaggctgaaaacaatggttccacattccttgacattcctcccctggagaggaagattcatgagggctctgaggaagaacttcccttctggtcactcattgaatgctgccgagaatgcaggggtggctgggaggccccctgcagaaaccagcaccagaaggaacgccatccaggtgtgctgctggggtctgggccctcacctgcactccctgagagctccatgccctggagaaaggcctctgtgagggagggaaaggcactgaacctggacataggctgtgtggcctcagagtggagaaggtgttctgtggtcctcccggggagcctgactgatgagacggccatcaccctgccctggacgccttgcctgagggtgtctgtgttactgttgggggtcaccacgctagagagcaacaaggaggcctctgtgggtgccaggaccaccaggtactgatccccaagggaacaagggccacatcccaggccctgagagcccagagtagctctggcattcatcagctccttttgggctagctgctttgcattagagaaactttgcattagagaaactacagggtcattcagctcactcttcacctctctcctggtgccacactctctttgcttctcttcttattttcttcccctcctcactctttgtctccctcgtgtttctgttttttccttccctcctccctcatccgtctctctggttctctctgtcacctcttgcttccatcctctccctctttctggtgcctggtgattgagtcaggaaggtgtggaatctgttttcctgcccccagaactgtgacttcaaaccaagggaggaactgtttgggagaaagactgaggagggtttagcagttatcaaaggcccatcagtgtcggggcggtagacttcctgtttata

SEQ ID NO: 467932 - DNA, 1184 bp, Homo sapiens
ccggggagaagactttccctagtctctgcatattttttaataccacggatgacccccgctgccatgcactggctgctcagggcccaggccaagtgtcagccaacattgccacattgcgtggccctgcgtgtgctggaccccttgagagtccaagtcatgtcaccctccactcgggggcagctcacagcccagcagaagtcaaagaagtgtctgatgcccttttggctcaagggtgaaatggatgaggaaccacagacaaggagaccagggcttgtagagcctctgagacttcccttctcagatctccactgtgactggccatacagtttatcattgaaaccaggacattctgacagagaagagggctctgtccttcattttcctggaacaacaggcaaatactgggacagtatggtcactttgttcctccaggactttgaaagggatctgaatagcatcttggagaccactgattgtccagggcaatgaccccctcaagtcccctcttgggaattttggagtttgagtccccacatttccaggaagccatgctttggtttctgcccctgtggcttcctgagaagtcagcagggggctccatgagccttgccccactggaccaggctccctgagaaggttctgtgttggggttcaagatgagccacactcatcgctgggtttgtgtacactagagcagtacacttttttgaccacaacctatgataaacgttgtattttacatcatgatcatcatcatcatcatcatcaggtgttcaccaacccccacacacacactcaagacttattcttccccacagtagatgtgacacttgccaaaatttctcattttattctcttccttcttttctatttgaaaacacattcttctttcttttctattttgttttttaaaattgctgcttctactagtttatgttaatttcacagcctgactttgtccagcatttcccatacatggattctcacttaaaccccagaaatatccctgtgccatccaaggcaaaccatggacctgagcctggcagcccctgtgctggcacatctggaaggccccagatgtggccgcatctggggccttccagactgaccaaggccggagaacaaggccggagactgcaaaccacaagagaaggttatttagtgcattggccccaaacagccca

SEQ ID NO: 467933 - DNA, 3650 bp, Homo sapiens
cccagctcacccagtgagtggccgggatgaatctgggctgtctggtcagagcctgtgagagccacactgcctgcctttgtcaggtggcagctcctcctgctgtgttctggggaaagtgctggggaaagtcaattaacggcactggacctggcctgcgagccagcatcctcacttgcaaataaggctgagtggagccttttgatgcaaagattaagtgtatgtgaaggtgccttgtaaactgtgaagtggcatgcacttggcacactgaggtgtcaggatgcttaccgtctcggctgctaatttttcatctgcaggcaggcagttttgcaaacaaggctctgaacttgaagctcagagggtgagcgaggcctcgtgcccccagggcctctgcttgctccatgttggtgccccaacgtccagggatgcaaagcacagaggacccttagaggccacacctggaagtgctcattcaatggaccgagggatgaaagtgaggagagcgttaggggagctgtgcacagaaagcacagctgaagggctcacgtattccacaccctcttttcaaggctcattaataaggagcccagggcaaaatcatacatgtggcaaactccacaaccaccaaggccggcagagcagtgagagctgcattaatggggaatttcagtgaaatgccgcccagctcctaaattcataccagatgagttccagaagattaaagttattacaataaagccccagggaatcaatcacgctctgccttgtaaccttcttggttttctgcatcattcacacaaaccactttctgcagggcactggggtgttccctagctgggctggacccacaggccccaataaagcacttcaggttagaaagcctagcaaaaggacaggcttggttcaggtaagtggctggggtctggcaagtggcttgtttagtgaccagtgacaatgcggtgtgggagcccagtggggaagggtgggctccctaacccccagcctgcctgaggcatgcccctgggggtggtcactgttggaaccttgataaaaaaacagcctgaaagttggaaagtgtcttggtaaagagtagaacacggcacagttctctttgatactgtttttatgttttcattttttatcctttttttttcccaaagtgcctcccagccatccaggttcaatctcaagtccttgtatgctcaaccaggctcctggtgagccagtgatcctgcgccattctcccccagaacccctggtggccacctgcactgtccctgaactcctgtccccgagtgtgaacacagtcctcattctgcattacacccctgggagcaggcatcagctctctctgcctccacttctatgagagttccagatgatagaggtgcagaataattcactaaagagtctgcaacctctaaggcccagacctgccctgtggtctctgccccagccatctgctatctccctcccaaatccaagctctacaaaagttccaagtttgtccacgttttggtgttcaagcccccaaactctctgccccatcctgaatgctccttcctgcttcgcaatattgagtaggaccatccattcccttcagagaagtcccacactcagcttcagaaatgtagcttggtccagtgaccaagcaagatattcacaaagctgactgacacaggtgcatttcacacttcttatttctttattcttatttatgataatatttaacttaggatcaatgctcagcgtttgtgagagctatctggagtttcctttttctgtgcaactttttttggttttgatgtcagaattctattagctttccaaagaagaatctacagactctcccctcccccaacattcttgctcttggtcagtttaaacagaattcagcatttgaaaaaccccatcctgaaaacactgaagccagtgcttttgagggctgtagttcttttacaactgtttgatttgccatttaggcattcctatctcttcttgagtccatttcgatcatttgcatgttcctagaaaacggcttttcattcaggttttcagagtcattgatatgtttaagtaattctgttttcttctttttcgtactctggttatttgtactttctcatactctgtttctttgccccctgcctccttccctccccctttctctctccttgctttctttttcttttacttgtttttgttttccttgactgggcgaattaatattttgttgcactccattttgtttcattctattccattctcctccgccaccaaagacatacctttcatgtcatggtcaattgtatgaggcttttctgttgtcactgtgattctatttttaatattctttttagtgaccttaatcaaaagaattattatgtaaaatacctagttcatttgtttttattggttcatatttttactgaaaatattaatggctatatatttttctatgaacacagctttaatagtattccaaagattatgaaaaggaatattgattttaaggaaattccatgagggactttcagtttttctctcactgaagtattgtttagggaagagcttttaaaagttcagaattgttctgtgttattattgcaattagtaaattttgttttgcatttttagttttcctttattgatgttaaagaaggtggtttttgttatttttctttttcttttgagtttgaggttttctttgtgaacaatagaaaaggatacacattttctgtacacaaggcatggggacatatataaaatgtcatacatgtttatatgaatatatgtgtgtgttatatatatgatcaatctattaatggaattatttggattctctgtttcactcttccttaatttcttgacatacaggattgagtgagagagctacactgaagtcttccaatgattttgtgctttgtcaaatttatccttttatttgttccagtttttgctacatttattaatgctatgatgctatatagtaaataaaggttcttgacagctatatctttaaatcaatcaagcaataaatattataaaatattttatattttatgttgaacatttatgtcaaatacaatattttttatattgaacacaatttcaatattttttggtcatgaatgtaactgtgtataatattgatactcagctttctatttgtttacattgaattggaatatttttgctcttcattctgctttcagtctttctaagttcctttattttaatttcatattttgtagaatacaagtaacctggaattaggttattttgttttggtcctgactgatgtcccttctcctttgggttaggcttatacactcatatttattgcataagatatacactgtaagacctagctttggtgtttctacttgaaagcttccttggtttttaatgtttctgtcttttgaactagagtctgtgttctgcctcctaaaaaacatcaccagtaattaagaagcaagaatgtcgtttttacaccaaaatgttgattttaagcttcacatggtgaaattagatacgatgttgtataacatttggcaccttggtgagaagtcagattagaaaattgcccgtggctctgaactttctgtgatttgacttcagtgtatttttcccaatagagtcacctgttgcct

SEQ ID NO: 467934 - DNA, 4705 bp, Homo sapiens
tttgttctcttcttgcctaaatactgtgttcctcccgggggagttctcaggccagaccagtagatggtctcctgcccgcctcctgttttttgacgctggtgcaattctgccctccattgttttctcctctgtgaatgtggtcggggcaatgcccaccttacagctgttcacagtcgctgcagtacatggcacctgtggcacagcccggcacagtgtctcgggcaggactgtggacacgggaatacctgagcagacagttaagggcacaggctgttggaagcgggagtgcggtgcctggctggcctttgcagcaggttttgggaacactggggctacctggacttcagggaccataatgagggaatgcctttttgctggctttgtgtatttggccctttcccacgagtgccttctggtctctggcctgtcagctatcagccctgagcacccagtggttgagcaccccttgtcttatacatactgtgcactctactggatgcagtatggacatcatgacgactgcagatggaggctgacctggcatctcacagtgtcctggggacgtctggtgggggagctatgtctggccctcgggacctgtcttgggctctacgtgctggcagagaggctggtcctgctctgaggaagccaacccttgctgggagctgctgtttaagccaagatgcaggaagcctttctccatgcaggcctcacgttcaaggtgtgccacttggagcttgggggtctttgaaggtagcttcagtctgggatgtggctggagccatttcctgcagggcagttttggagctgcacatgctctgagaaatcccagtcctggaagccgctgaaggggaggaagggaagggtgggagggcaattaatttcaatagggttttggggcacgggtggtgtttggttacatggaaaagttctttagtggtgatttctgagacttttgtgcacccatcacccaagcagtgtacactgtccccaatgtgtagtcttttatccctaaccacccctccacccgttcccctagtccccaaagtccattgtgtaattcttatgcctttgcaccctcatagcttagctcccacttatgtatagattgtgaagatatttttcccaatatgggttgtctgtttactctgctgattgtttcttttgctgtgcagaagatttttagtttaattaagtcccatcaatttatctttgttttgttgcatttgcttttgggttcttggtcataaagtctctgcctaagccaatgtctagaagtgtttttctgatgttattttctagaatttttatgttttcaggacttagatttaagtctttgatccattgtatttcaccttcctacccccaagtggggaatcagctcgaggagtcaaaagagatgtttctttttccactcgggtcactgtccagtgtccccaaagcatagatggatccgagcgagagctctttccctccttgctgccctcctgccctctgcctggtttagcctcatggcttccttcctgcattattttaatgaccacctgcctgtgtacccctcgtccccaggctccctcctccagggcaccttcccttagcagtgagagagatctttccaaggcatagctggggtccccactttctaggaagaaaatgcaatgtctctcaaataacattcataggattttcatggttcttgagggagaaacgggaatccacatatctcacctgcctttatataccagagaagaggcagcagactgccaattccctgcagaggccctgggatggaaggctccatccctgtcctagccacttgttcttcccctgcatctgtggcctccgggctagtgtgctcagggatctgactgctgccttggcaccctcagccccatcatccttcccatgaagtgccctttctcaatgagtagcctcatccaccactgtcacccaaaccccaggcccatcctttgctgtatcttccctacttatccagctggttgaagctgcctctgagtgcagttaatctgctcttggtgccctcttgtctcctggcccaccctcacctgtggatacctggcgctgcctctccaaggccatccctcccaccagtgtttgccttacccctgtcccctgcctctcaagtcagaggtaatccctgctgctgctagggtgatctgtctagtgataaaatccgacctgctggtacagcctgcaagcctcacttggtcctcccctcccctccacctcagctcccagcatccttgtgcacctgtggccaaccatgcccagctctttctcatgtgcattggcctttgaacatgagctgtctttgcctggagcatcttttccctcctgacactggcaagctgctgctgggcctgcccttctcagcatgattttacctctcccaggaagctctccagggacccttaggctgggtctcatgtgctggctcttgcttcctcagcactctgttcatgctggagaaataaagtggcataaagtagagtcctgctccttaaggttcgagtgtagacctctgactgctcctgcaacaatcacttctatcaccagcatcagcaggttttcccttgccactgcatctttccaacagcacatcagcttgcagtgaaagcttggtctttaaaaataggaatatgaagcttgtttcctgcctcaggaccttgttcctgaccctactccttcctggatggcccccgtgcaggtcttctcagggtcatcttgactccgcatccctcctgcaaccaccatcccacttctctgctcctctctaaaggaacatctgcagaagtggcatgtctaataccaaaatgttggttcctaccccagaactgccccatccccacagccctgttctacctagacagggtccgcatctcacggagggcactgccatcttcctgtttggccttcccacccaggagctcctactgctgcctaccctacttcccatagtgcttggggttatgatctccatgtgcttctactccaaaccacctgtagtttcctgtcccttccagaagaaaatccaatcccaacaccgtggcctgtaaggccctgaccacctcctgccatgccttcacttgccctgttccagctacactgactgtgagattcctataacatgaagctgttttttctcactccaggacctttgcattgactccactccttcctggacagccttccaggctcttctcagggtgtctccctcacatcgctcaagtacgttccctcagagaggccttcccacacctccggacctggtgtccctggccatgtcctctcctgctccctgaacacagcaagcttccttccattcatattatttatcaggacctgaaatggtcaatttattcacttatttattgtctgtttctccttctggaaatataaacttccgggcagggacctcatgtgacttatttatcacctaaacccagggcctggctggtactggaggagctgatgggccctgggggttcctcccagcttcatgacatggcccaccgctggccttctgcatcaaggctgggaatactgtagccagaaggaaaatctctctgttaacatggaattaataaaagaatgcttatacatggttgcaggtaatatatatataagataaaaatgacattctgccgagagatagagagaacccataaactgtttttcctgcatccttacattgtcttcatatgaaaagaaaattttaactgctggcttacacactagttttagatgtaagccaccatttatgagaccttttggtaagtgctgaagtaaagtgatgagcaggaaaccaggccagcatgtcccggcaccaagaatgggagtggccacagggcagccttccctggagaacttgctctgatgccccgtgaagtcctgtgagctctggggccagaacctggcctggtacccctgcgccccagggctctgccccagtccatgattctttctgggattgtcatggacttaactcattaccaaacacgcatagccccttgaggagttttggcacacaaggcatttgggatgtcttggggaagaaaatgaaatactttaatgtaatcaaaaacacaggaagcagatgcccctgaaatataatatgttctaggagctgctcccctgctgtgtggcctttcatgctctgcaatattccaatgccttttttttttccccacagaatcactcacatgtcactttggtgagaggatgaggcattcagattgggagaacttgttgctttgtcagcattattttcagacaagaagttttacttcttgtttttatattttgagagaacaatgtcttacaacattcaggaattagtactttgcattttcaggttcactttggtgcagcccttagggtgcttgtgggtctggcccaaccttccctggaatgagtcttcggttgagggggcctgacgtcagcgccctgcagggttcatctgtgtcacctaaaagtgtccggctgcttggcctggctatttctgctgaatgcacaaaaatacattttgccttttctccttccaagttgcagtttcttttctgcaaatgaagcagaagaaaagtgctgcattgacatgatgaactgaaagcacactcacttcagggacatgtttcttcagttgggaaattcctcttttatttgtgactagttgttttctttcctt

SEQ ID NO: 467935 - DNA, 526 bp, Homo sapiens
tcctccaaccccttgtgcttcccggccatagaggagctgaaggatacacaacgactaaatgttatgcggtgtccaggatgggattccagtacagaaaaaggatatgtgggaaaggccgtgtcctggtggaggatgaggtgggtgaccccagatgtcagaggacaggaggcagagcagatccaccaaacctgctgagagggaccacccattctgccctgctgtctcctgcagccagggccagatggcagaggctgtgctttcttcctctgttttgggtggccatggttgcgggtctgtgggctgctgctgatgctccagcctatggccacagtgaacacccaggtcccagccaactgcctcccagaggactgctggatggaggcggctgcacattctctcctgctcctgcaaagcaacccaactcccatgccccatatcctgaaacaaagaccatgtgctctacagtgtggacaagcatgtcagttcagcatgaaaggagaggtggtccaatgacgtagtcacatga

SEQ ID NO: 467936 - DNA, 763 bp, Homo sapiens
aatatttgctgttctgcaatatttgctgttctgcagcttctgctggtgatacccaggcaaacagatgggaaatgactttgatgagttgacagaagtaggcttcagaaggtcggtaataacaaacttctccgagctaaaggaggatgttagaacccattgcaaagaagctaaaaaccttgaaaaaagattaggtgaatggctaactagaataaacaacgtagagaagaccttaaatgacctgacggagctaaaatccatggaacaagaacttcgtgatgcacgcacaggcttcaatagccaattcgatcaagtggaagaaagggtatcagtgactgaagatcaaattaatgagataaaattcaccaagtttgaaatgaaggaaaaggtgttaagggcagccaaagagaaaggtgaagttacccacaaagggaagcccatcagactaaaagcagatctctcagcagaaaccctacaagccagaagagaatgggggccaatattcaacattcttaaagaaaagaattttcaacacagaatttcatatccagccaaactaagcctcgtaagtgaaggagaaataaaatcctttacagagaaccaaatgctcagagattttgtcaccaccaggcctgccttacaagagctcctgaaggaagcactcaacatggaaagaaacaatcagtaccagccactgcaaaaacaagccaaattgtaaaggctatcgatgctatgaagaaactgcatcaattaacaggcaaaataa

SEQ ID NO: 467937 - DNA, 775 bp, Homo sapiens
agttcacagtgtcctggacatcttcttacccatcgatcctgctggggcagggaggacagttccttgcaacagtcactacatagatgccacactgctgtggaaatgaggtttgcctgggcacagccccagcgagtgggggtcctggcaccacatgctaagccttccccatgcccagtctttcactctgcactgaagctgcctgggtctgccttccctcagcacctacaggaaatccccatagcccccatgctgggcaccaagagtgggcagcatatagcaacagtccatcagctgtcaatcaggttctcaaatacatctgggcacctactggaaaggatctgaatcatccttttatccagcatctccatgttgtagacgctccctgctggtggtccctgacattgtctgctcctggcacccagccacaaacatgctcacggtgcaaagatccaggatcatctgaggcagataattctccatccaataacttgtcagaaggtcaatggcaggctaacgctgcatctcaatgcctacatcacgtaccccaacttcctctacatcgcacaacagcacaagaaaaagggcagttacactctaccttggagagcaaggtagaacttaacagtgatttttccctaaggccatggattttcactgtgctcattcatggaagaatagaaagggggaaattcggcttggtcggtccccataacttggagtattagatggttgtagagagctcggtttgatatataacagctgtgacattgctgtt

SEQ ID NO: 467938 - DNA, 638 bp, Homo sapiens
gttggtcaaagcattctcacatccatctgtgtctgtgcttctgctgtgagtagcaggtggtgatgtgggtccatctgaagctgctgctgattgaggaaaggaaaaggaaactccccatctggtcttctctggcattgccgatgcaggtggcacaagcacaccagttgccactggttatggagtctcaaggagaatggttccagctttcactcattcagtgtgaagttggctctgtgtttgtcatagatggctgttattattttgaggaacaccctaactttccacgcctaagtaacaaaggtccagaggcttctccctttgaccttttctgcctggcaagatgggaaattggctgtccacaacaaatggacaggagtgtgacctttgtaacttcacttcagcttctggttggctgctttctgcaaccaatcagactgattgccggccaccacttcatttacatgaggctgctccttcatggtcctcagactcaggagaacaggcttctgtttgggttctttttgtctattaatattggtatttataagtagttgacttcttcacttctatgtttggaaaatatgaggcaaaaagaaaatccaaagagctaacaatccttggtttctaaggttcctact

SEQ ID NO: 467939 - DNA, 606 bp, Homo sapiens
cgccggcctgccttcccatggcagaaccatgcgtgcacattttaaagtgctgtctgcagaggcagtgtcaaaattcaatccttgaaccacgagagaattcaaagcttgtcctgtggcaaaaactgaaatatatttacaggttcaaaatggcattttccacccaaatactatcagtgctatgctcactaaaagaaaatagaataaacaacagtaacaaaagatggatgggtaaaaattatgtgtgtgtctcacggggaacatcagaacacaggggctgtgaagagaacaggggcaaagtcctcagaggaatggaaaatattgagaggatgccctctgaaaagaaagtaattgatggagtgaccatgattttagtgatattaaccacctgcacaagagattgtgctggaggaaggttaccaaatgccatgatgagaatagatactagcatccacagtatctctctaaggaaagtaaaatgcttataaaataatgaatgtgtacttaacaagtcatggtttaaaaatgcttttagagttcttagcttattcaatcctcacaacattctgagaggatacagtttgaagtgaaccaagagaaatgggtgca

SEQ ID NO: 467940 - DNA, 654 bp, Homo sapiens
tgcttttctaaacaaaggagagctcagaaacaaattcaacttggaaacagatttcattcagacagtgattgttaatgtgctcatttgatttaggggctaatgctttcctttgtggcataactggaagaaccattacaggaaaaagtattcagcgatacttgttaaagcatggtaaggccgactgcactcaggatcctcgcaacaggtatccggacaatgggattttgcagtggcgaaaagaaattgacctcaactcccagtacagcaccagcaggtggggactgacagccaaggagcagggtgaagatgtaacctggtggatggttgaggatgaggaacctgatcagatattgagtggcaggttctggctaaatgggctgagcagtgttcttgctgacactgaattttgtaaggaaatgcacagatgggtccaggagaaggatgtgccagtgtgcagtgccctgagcattgctttcctttgtgtaaaaggaaaaggggctaatgcttccctttgtggcataactgtggctttgctttgtggcatcctggctgaacctgggttcagccaggataagagaagcccctctatttccaggaaacagggcagctgctgtgagtgtggcattgacaagcagattccactgtgatattttt

SEQ ID NO: 467941 - DNA, 596 bp, Homo sapiens
ttctgcagacttaatctttcctgcctgctggctctggagagtctaggtaatctggatgagagagattccttcagcacagcatgccagctcctctaaggaacagtcagactgcttccttggaaagcaacaacatcaacatcaacaaaaaagacccccacacaaaagccccatccaaaggtcatcagcctcaaagatcaaaggtagataaatccatgaagatgaggaaaaaccaacgcaaaaatgctgaaaattccaaaagccggaatgcctcttctcctccaaatgattgcaactcctctccagcaaggacacaaaactggatggagaacaagattgacaaattgacagaagtaggcttcagaaggtggctaaaggagcatgttctaacccaatgcaaggaagctaagaacctcgataaagggttacagaaagtgctaactagaataaccagtttagagaggaacataaatgacctgatggggctgaaaaacacggcataagaacttcctgaagcatacacaagtatcaatagctgaattgatcaagtggaagaaaggatataagagattgaagaccaccttgctgacataagacac

SEQ ID NO: 467942 - DNA, 548 bp, Homo sapiens
agaacggatccagggaactgtacatggcagagcagggtgccttgagaaaggaccttcccgtcaggggacacacaggcaaggaaacagacaagttcctagacattattaagaaaatcattgaggagaaaggatatctgcctaaacagaatttgaataccagtgaaagtgctccattcttgggaaaaaaatgccacaaaaaaaacccatttattggtggaattgacaagagttgccaatggaactgttgtggaattaaggaaaggccagggagagctccaaggcttatgccccgggcaactaatatgatggagttgacatttcaggagatgctgagactgtggaggaacaagtgtggggagaagggcaagctcagttttggacgtgctgggtttgaagtgcttgtcacatatccggggaaggatgtgaaaaagatggctggacagaggggtctggaagcgggggcagaggtctggtaaacatttatatgtcatttcatcacaaatcattcgcattttaaaaattccttggttaattacttagtgtttatt

SEQ ID NO: 467943 - DNA, 681 bp, Homo sapiens
tgcagtccatattgccagaagcaggggtatgtctaggggcaggagccagggtcagaggcagcaaagcttctggaaagaactcacaatggctttaaaggataaaggcaaaagagtaggggtttgccaggtagagaaacagaacagcatctcaaggagaataaacagaccagtcaaggcacagaaatatgaagtaactaatgtgttaggaacagatcctctggacaatggggagacaagccaggattttaagcgattacacgttcagacttgcctgtggaaaggtctctctgcagctgtgcaggagatgaatgagaaggcaagatgtccattgcacaaaaccaaagaggaagcttctgcaatcattgggtggaacagggtgaaggagtacatgtgttggggctactgggaatgccacagagcttccatggctgcagagataccggtgcatgggagcctggcagttccacagaggcagtacagtatggcccagcaaaaccagcccagctcccactctgccagttactatctgggtcaaatcaactcatgttcctggaccagtttcctcatctatgaagtggtcataatcatactacttcatgatacagtgaagattaaataagacaacttatataaagctctagggcttggtacataaatgtgacatattttaaatcccttcct

SEQ ID NO: 467944 - DNA, 700 bp, Homo sapiens
ttctgatgcatttgctttcctggggtcaagtaggaactaatagtttaaaatattcctcctcaattaatcctgagaggacatggccttggaatgcacagagtcttccagacttcaaaaggcaactccagtgcccaggggacacctagaccaaggttcgggctgtctgagaacctcatttaaagttctctctctaatcgtcagctcagccactagagctgacaggcataagcataaaagagtgaggaaggggctgcacgaggaaagagagatgaaggacttgacttgtgcccaagcccataaaaaggctgaaggaaaagaatgggttacactacaaagatataactggccgcctgagtcctgcactgggggagcctgcaaagtcctctatgaggtgtctgcattgaagcctggctggggccctgacttattttgggggattggaggggttcgtgccctgacttggggaaagctcacctctccagagagacgtgctgtagaaacacagtggaagacatttctagggttagtgagccaaggaaaaaaaaacaataataacagcatagtgataattgtagtactaattgtaggtaacaagtgcttactatgtgcttgatgatctgataagccctttacttacatgatcttatgtaatcttcatgataatattatgacatagtaggtattaatattatgtttattg

SEQ ID NO: 467945 - DNA, 821 bp, Homo sapiens
ttctgctgctggccaggctgcctctggaaccagcagttccaggagccgttttccctgagtgcagagcacgccactgagtctaggaacatctttccccagacacctcatctatttcaaactgagctctctgggccagaaatcacagtcacggtgtccttcttggaaaacggcttatgactcaatggctgccaaactcagctcttgggctggaagtgttctcacagaaagccctggggccgtggggaggatgggaaggactgaagccctgggcactgtggagcagagaaaagccatttccacaatactctaaattcttcacccacgaaatctgtggtaacgcttgtttacctgacgctcacctcctgctgcgcagcccggctcctaacagattggtactggttcgtggcctgggggctggggaccccaactgtagtggacagctgaatctgagcccaccctctgacaggagcacaggcctgtctgactctatcaccatatgtgacatggtgactgaactgaagagtgatcccttaacatatctgggcatgaatatcataagaagacaaagaaaatgggtgtttttatttgtttgattgtttgtttgtttgttttttccttattttttgtcattgcagattatatacaaaaaaaatacttagccatatgacctcataaaaaagatagcattgtcagaatatgtctgatagcaaatatctctgtagtattttagggggcaaagagaaatgcttcctgtttatgcatgaatcttgaaaaaattaatcaacctgataccaaagggtaatttcaaataataattatat

SEQ ID NO: 467946 - DNA, 594 bp, Homo sapiens
agccttcagctgctgggggccatgtgcaacgggccaactaagctgttaacacacagccatctgcagatggaggagctaagagagcactgcaacactctctctggggctttggggtcacaggcacccccacctgggtgcggccgtgggccctgcatggagcttgtttccactggtgcctggagcagctggctggatcttgcactcactcgctttacatgcttcctcctgcaagtggttaagtgcggtgggctgagtaaatggggcaccctagtaacactttatgagaatggaacaagaaacataatggacgcctacctgagggtggagggcggaaggagggtgaggatcgaaaaactacctattgggaactgtgctcattaccagcatgaccaaataatctgtacaccaaacccacgtgacacataatttacccatatgacaaactgcgcagtgtactgtagtacattgattttttaatgttaatcaaccttgtgttcctgggataattcccatttggtcatggtgtataatcctttcatgctcttgtatttagtttgctagtatttggttgaggatttctgcatctatattcat

SEQ ID NO: 467947 - DNA, 1346 bp, Homo sapiens
cttcgtaacaacctcgagccacactggtgaaaatgttgatggcctcataaatgtaaatgcgctctcttggtgactcttgcgtgcgcttgctctctctctctctctctctctctctctctctctctctctctctctctctctctctctctccaggacagtccaacagcccaacagcattctgagcaaaggctctgtagttaataaataaatgtgtaaatgccctctcttgtgactctctcacgtgttctctctctctctctctcttctctctctctttctctcctctctctctctcctctctcctcttctcttctcttcctctctctcttctcttcctctgctctctctctctcctctctctctcctctctctcctctctctctctcctctctcctctcttctcttctctcctcttcctctctttctcttcctctccctctctctctcctctctctctctctctcctctctctctcctctctctctctcctctctctctctcctctctctctctcctctctctctctcctctcttctcttcctctccctctctctctctctctctctgtctctctcctctctcttctcttcctctctctctctctctctctctgtctatctctctctctctctctctctctctctccaggacagtccaacagcccaacagcattctgagcaaacactgagggcacagttggagctttggtagctgcaacttgtggaggaaaaagttaatcatcacccctgctgggcctcctgctttacaatctcagccctgacagggcaggatgaggaacctgagacttggaagtggggtgtcttgactgtctggacctcccctttgcactccagtctaaagactaggatgaaatctcatcacagcccactggggattgctggccctgtgaagggtagtaggtgccaaaggagctccaaacctggctcacaggcactggcaggagccagagcgtggacagagagactggatcctgaatgtgctggatcaagagaactggacctgaagttggataagagagagtttattggaacgaaaaaacagccgcccaacttcttaggattaacagttatcatttcatcatgtttcttaaatgccagggaagttgcactagcggtgcactgccttgcacaagtatcccatcccagttcaccacaggcgagagctttcaaaattgctctaccactgtgtgccccgctatcagcaccacacctaccaccagatgggattcttgttgccaaccaaccagtgagtgacccagcttccaaatccctttttaaggtctcatttctaggaccactcacagtaccaacaatcttacggtgaat

SEQ ID NO: 467948 - DNA, 788 bp, Homo sapiens
gaaagaccctgggttgtgtgggatagcggaagagttgctggccttgtttgcacagcaccgggcttcacagaaatgctcttcggggtttcccagaagctgtgctttaatccctatgacagtggaagaggcttatattcagccacagctgtgagcgtggtgggagagttgctgcagggacacaaagaagaccaggtcctgagcgaggagctccgccccagggaggacagcctatctgccagagcatcctgtgagaggatggcccataagctccttgtggaccagaggcgcaggggaagagtgaccagaaggctgagctccagacatggtgacacagacctaagggcaccaatcacagagcggcaggtcgaatgcagggagtgtgtccaaatgaagcagtggcttggaagggaggggccagaccccccctgtcctggcccatacctgcaggattcagttactgccttgggaggaagaggagtggggaccaccagaggccaagacagcaacttggaagggaaagaacactgtctaggaatcgaagatgagaccatctgcatctctcccacctccagctgaggaccttgggtgcaagcctctgactcccccaacctccagctttggaagaataccccttgtcagcctatcccacagggatgctttagagcatcagtcggaggaagggcaggccagctcccaggccctatgatggccacactgcaaatctaagccttactatgggatgcagtaccagcgggatcagatgaacaccccagatatctttatcagcc

SEQ ID NO: 467949 - DNA, 924 bp, Homo sapiens
tgagctcttgtttagagaatggggaatcagaccccacctctccccagcatggcccagtccggaacacgccatgtcctggagacagcccgtggtgaatgttgtctgggggaatccaggtttacaggagccgctgtctccatatgtgaaggggcctactttgtggctcagctgctggccatctgcttccagtgtcaaccagggtccctggcagacagagtaagggagaaagcccactggctgggctgcttccagaagttcctggcctacctgctgctgtcggtggcctgcttcctccacccggtcctggtctggcacgtgaccatcccaggctccatgctcatcatcaccggcctggcctacttccttctgagcaagcggaagaagaggaaagctgcccccgaggtgctggcctccccagagcagtacacagacccctctagcagcgctgtgagcaccaccggctctggggacacagagcaaacctacactttccatggggccctcaaggaggggcccagctcccttttcatccacatgaagagtatcctgaaggggactaagaagcccagtgccctccagccccccaacaccctgatggagctgagcctggagccagccgactccctggccaagaagaagcaggtgcactttgaagacaacttggtccgcatagtcccctccctcgccgaaggtctggatgatggggacagtgagccagaggagaccacctctgacacgacacccatcattccccctccccaggccccactcttcctgtcatctcttacagccaccggcctgttctgagcgcttgctccagcctggaggacgctcagtgaggggtctacctagctcaatggccctccctggagtttcagggtcttctctggtcagcttttcaaggggtaaccagacacccccaca

SEQ ID NO: 467950 - DNA, 922 bp, Homo sapiens
tagcatggtgccagcacagagatacggagagaatttctctgattcctatatttactcagatattcttctcatccccaaacatcttaataggaaaggtaaaaacatccctgtgacatcattctcctcccaactgatgaggagctggggatggccccagtggaggaagatggcagcgcttcacagatgcagtgcccaagtctctctggccacggaatcccccagaggtaaatatcctccacattactgctggcatttccttctctactccacgaactacttcactgggacatattccaggccacttcctgctgcttggcgcctgctgtcccttgagatgagctcgcagcaaagatctgagtgggagccaggggatgagtcagactggagccacaacccgcaggaaccagaagccaaactggatactgggaacacaataaataaatacctgttggtaataggagggcagctcctatccaatggtaggaccatcccagtacaaaggtccagtcctcttgggtcatcacaggacaacactgaggccatcctagatccagaactttctgtggatgggcctctgttgcaactgcattgcaaccccttcttcttctgcccagtcctgctttcctccctcccccatgtgtacggaacccaagactacgcccctgtcaaactttctgcacacaatctcagtggctctatttcccagcaaacccaacctaagatggtagtggctgcagttgctggaggggcactggaaaggcatcatttctttaataaacactgggcccattgccacagctaaagagtaatatagtaaggaagaagagaaaatgaaaactggccaggcaatgggaagtcttagcttttcaatatattgttttcttcaataagtgctcaggtagccctactccaggccctggag

SEQ ID NO: 467951 - DNA, 933 bp, Homo sapiens
ccacttgtgggtgtaatcaggcaccccctaatgattaatgacatgacccaagaggatatgctccagagcaccctcctgggtggggaaacagggatcaagcggcatttgccagggaaggactggggagtggagctgctgggccgtgtggagtcgtgtgtccctcagtggaggagggacaaaccatgttccagagtggctgcgccgttggacctcctctccagcatgttacttggtgctgcccctgctgagactgtggtggacaccgaggctcagagagagcgtgggccctgctgcggctccaggcccttaagccccctggacttacctgggtggcagcagcagtcctgcaccctgcaacgctgtagaaatgggcacagtgtctttcggttcctgctcctcttcctttgcctccacctggggtccctgctcctctccctgtgcctccccctggggtccctgctcctctccctgtgcctccgcctggggtccctgctcctctccctgtgcctccgcctggggtccctgctcctctccctgtgcctccgcctggggtccctgctcctcttcctgtgcctccacctgctgttccgacctggttacccagtgagggaaatggggaaagaaacctctcctaccagagcagggattcctggtggcaagaacgtcctaaagctttgcaaagctctggtgtttgacgttgaggaagtggattcatggaaactgctggaaccctttgaggacttggattgagtttattcatccagggaacaggattgtgttcagcatgctcatttctataaatccttccatctcggccaaagatggtctcatcatcttagagcaatgacagccctttctcgtggaatgggcacgtttgctctgttcactgcagcccctggaaacagccacatgatgcacatggatgctcactgg

SEQ ID NO: 467952 - DNA, 497 bp, Homo sapiens
cctcggggctgtgggtgtggatgcgctggcaggtgtggcggtttgggttctgcaaaccctccctacggcggctctcgggtcctggagcgagacgccgggtgcacgacgccagaatcactgaggtgccggctccccgcggtgaaggctccaaggaacgcgcctgggcccggccggcgcggctggagcagcagttctccggcagccctgcccttcctcgagttgggcctttgaggggccttggggcctcccggggcggcggccttgagccattagtgttggctgaagtcttaatgacaggcgagagggacgcctttgcggtctttgaagctacgctcagttctgactggcagagggaggccgtgggctgtgggagaaaacacatcatcatcgtggggggctaggagctctgtcatatggtggttgtaagcaacagaaatgggctctggctggctgaggccacagaggagcaccgcgtcagaggggccggcccccagatg

SEQ ID NO: 467953 - DNA, 1499 bp, Homo sapiens
ggactcgaatggaatggaacggaacagacttgaatggaatagaatgggatttaatggaatggactctaaaagaatggaatggaatggatttgaatggactggaatggaacggaatgtactcgaatggaatggaatggaatggactcgaatggaatggaacggaacagacttgaatggaatagaatgggatttaatggaatggactctaaaagaatggaatggaatggaatggaatggatttgaatggactggaatggaacggaatgtactcgaatggaatggaatggaatggactcgaatggaatggattcgaatatacgcaaatggaatggaatggaaaggaatgaactcgaatggaatggtatggaatggactggacacgaatggaatggaacggaatggaatgattgaatgtaatagaatggaatggattcgaatggaatggaaagcaatggaatggactcgaatggattgaaatggaatggactcaaatgcaatggaatggatttgaatggactcgaatgggatgggatagaataaattctaatggaatggaatggaatggactcgaatggaatggaatggaattaagctgaatggaatggaatggaattaagacgaatgaaatggaatggaatggaaagaaatagactcgaaagaaatggaaaggaaaggaatcgaccagaatggagtggaatggaatggaatggtcacgaattgaatggaattgaaaggacccgaaaggaaaggaattgaatggaatggcaaggcgtttaatggaatggaatggaatggaatggaatggaatggaatggagtggaatggaatgcaatggaatggtatggagtggaatggaatggtatggaatggaatggactctaatggaatagaatggaatggaatagaatggaatcaaaattaatggaatggaatggactcgaatggaatggaatggacatgaatgtaatggaatggacccgaatggaatggaatggaatgaaatggaatggaatggacttgaatggaatgcagtcgaattgaatgtacccgaatggaatggaatggattagaatggaatggaatggaatggacaccaatggaatggaacggaatggactcgaatgaaatggaatggactcaaatggaatggaatggaatggaatccacttgagtggaatggaatggaatggacttgaatggaatggaaatgactcgagtggaatggaatggaatggactcgaatggaatggacgggacacgaatggatataatggatggaatagacacgaatgaattagaatggaatggactcgaatggaatggaatgcaatggaatggactcgaatggattggaatggaatggaatggaatggactcgaaaggaatgggatggaataaactctaatggaatggaatggaatgaactcgaatgtaatggaatggaattgacttgaatggaattgactcgagtggaatggaatggacttgaatggaatgga

SEQ ID NO: 467954 - DNA, 1430 bp, Homo sapiens
ggattggcagccagtttgggcagctcggttggaggggttgttctccatgcccacctgctgattcggactcttagcgacccctccacagcactgtcctgagggtgaaatgagatcggggacaaagtgccaccaactggaaaaggttaactcagaaccatctggcacccaccagaacttcctacgccgggacgggctcacgggcctggcgggcccaggacaaggggtgggggtaggagaagggagggctgggggcaaagcagcctctccccggcctcgccccgggcccaccaagcctggtgacccaccccgccaccgtctccatggtgacgataaacaggcctcctccttcgccttgccagcgcccccacgtacccagtctctggtggaaactagggagatggaaccctggggtgaggagcaggccctggggtggaaggtggggggccggagggcctggcagggcacgggcggcctgggcccagcgcagcaggcactggggggacagggggggagcccccgagcttagcctggcagggccggaccagcctgggctccctacacttgcttttccagccatagcaccaggcaccaagagcaccagacctctcctgcctgtagagtgttaacactggttcccacccttgatagctcagcaccttcacatcttcctctaatattgcctgtgaaaccttccctaactatcctgttttagaatggaattctgccacactcctcttccttcccgcctaattctaccctttcccccaatgataacatcttctctaactatggtttaatatcaaagccaggacgctgatgttgatacagtcctcagagcttgtttgtacttcatcagtgtcacatgcactcacttgtgtgtgttgtatgtatgcgtgtgaatagttcaatgcaattttatcacatgtgtaggttcgtgtaaccagcaccacaatcaagatacagaataattatcaccacagaagtccttcatgctaaccctttacctatgtccgccccctcctcctctgcccctaaaccctggcaactgctaatctgattttcatctgtctattttgtcatttcaaaaatgttatataaatggaatcacacagtatatggccttttgaactggctctttttcactgagcgtaatttgcttgagatccatccaagttgttgaatatatcaattgtcggttcctttttattgctgagtagtattacatggtatgggggtatcaaagtttctttaaccattcacccattgaagagcatttgtgttttttccagtttttggcaattgtgaataatgctgctgtggacatttgtggccaggtgttggtgtgaacagttttcatttctctgtgataaatgtgagtgtggtttctgggttttatggccagtatatatttagttttataagagactacc

SEQ ID NO: 467955 - DNA, 690 bp, Homo sapiens
cgcttggctgacgatcggcagggcaggaggctgagcctgtcctgtgcaccatcggcctaacccctgctgaaagctgggctgtccagcacgtggcccagctgccctgagtgttgtcatcatgatgagtagatatcctcatcaccgggacctgggctgtctgacagtgaactgattccatgtccaagcccctgactgtctccccattggacctggccagcagctcgtggctgagtaaaaacctcctccccaccagttgccaggccgccggccgccagtctgatcgtgggaggcaccagaagcaagtctacctcgaggaccagtccgtacttgaggcccatggagcctggagcagagggccctgtctgggggctcctagtgtggccccagagtgcctaggggccacagagtccagcagcgtgtggagcccatatgcacactcagctttcctagtgacaggtgaagccagctggactttctgggtccagcagggtctgcgggacagacccccacagccggtgcccccacgtgatgaacactgggaaggaagcagaacggacccgagaaaggaaggtgaaaaaggaaacacgtggtcagtgagtaatcagtaagtcattggtgcccacttgggatttccaagttcgggggagattgttcatgctgagatttcatcatgggacaacagttatcagc

SEQ ID NO: 467956 - DNA, 929 bp, Homo sapiens
gtcagacacaaaagattcatagttacacttatggcttttatagtctcagccatagtcatcctggcaactgctcgcgttgctctcgcatctattactgagtcagtacaaacagctgcctttgtagataatctggccaaaaatgtgtctaatgaagtcttacagcaaggtatagatcaaaaaattcttgcacgtctgcaagcccacaaggcagctttagaatacgtgggggagcgacaagatgcactggcattccgacagcaattaaactgtgactgggagcataaacatatctatttactaatgtggggtcgagggtatgcttgtgtttttgcaggagatgaacaaaccatgtgggtgccgtcaagatgtgtgcaaccatggaaagggagactggagggacccatggattccaactacaggcctggttcccccagtatgagcaatgagccagttgaatctgaatgcgaaaacagaacgaggaccaaccagagtcacgctgacaccaacccccggcagccaggcttcacacctgcagttgatcccaaggcgcctgccccaagagaggcccacgacaaagctgtgtggccctgtgtctcagaagccatacgctatgagttaaggcagttattgagggccacccaggtcaaggggtggggacttggactccacctctcgatggaggtgtatccaggtcataccgtggaaagagcatacgtgaccacctttggaaatgcaatcaagagctcctagatcaatgtgcagcctaaatcacagtctattcaaaaccatgtagcccatcctgctgacaagttcttacttatgtcctccccaaatgcctctttccctaactcccatcttcagtccaatgtggctgttgaggaggggtggaattattcccacctgcaaaggcagatttcaacttttggggt

SEQ ID NO: 467957 - DNA, 1812 bp, Homo sapiens
agcagtcctcgtgaggccacctgctctccgctaccaagcctggggccctccctggagatgacagggcaaccctccagtgtacgtccctcctgagggcttctgcttaattcacttttgtgtaatttgagcttcatctgcctcagtttgcgctcttggcttcatcacgcggtgtcagctatgctgcaagtagagttgggagttcgcttcagcatccacagccccttggtgtggtcccctccaccaaaccagccccagagcatgggggagaggctcagctgccccactgccctcaaggagggctggcgaggtaccctggacagggctatgggagaggcacgactgtcagtcatgcccttcacagaccagcctgatccttcctgctgtcgggaagaaggtccttctgtcctggtattcgtcacccaggaattctccccggagcaccgcccccaagtgctgtcctcggtgctgaccaacagcgcacgtctttgtggccggcagccaaggaccctcagacagagagaggttccaactttcgcagaaagctggattaggctgcagagttgcaggatcctgagccttaacgacagcagatgtctgacactgcctggctgtcctcagcctcagaagcgggtgctgagagccctatgtggactcgttccttgcagagctgctgctggggcgcattccgcacttcagaggcggaagctctccagggtggagagacatcagtcttgcccatagccctaaataagtgttgctttgatgttgctgtctttcactttccatgtaatagaaacatccccatttcttctgtgaaatgagagacattggatctccttaaggaggcaaagtgtaccttaccctcaggtacagagaggacaggactccccaccacctcttgtgacagggtccttccaggtctgataggacttcctggctcctggctcaggaattcctgacttaggtcgaggactgaaacccaggagcccctgctcccttcccactctggaatggtgcccctggctcggtcctgcttacatcatctgtaaatgtccaaccaggatttggaccatgttcctagcatagatcttctcacgaagctgcttgggtgaagtggaaaaaatgggggatgctggagtctcatactcagtctcttcccactcctcaggggctcacagagctcacactgaaaaccttaaccctagaaagagccttgtaaacagcagcctttgaataggtccgggtggggtgaactgaaaagtgcatcctgggaacatttgaagatcctgccttcctctaccttccagctcctcctgcctccactaatttgacagaaatacactctagacaatagtttcaggtacaagccattagcccagatgagacaaataatgcctcagttcagaaaatttgcccatgatcacattctagaggcaaaaagaacatttagcttttgtacttgatgcaagagacttccagataaaatggctacatttgcatgcacctctaagttatttccaaatttccattgaaataagccaagaacagaacacagaaatagaaaaagcgtgcatcgatgccagaaattggaggggtgtgacattgacaaatcagaaacttggatattcaagatattcttccagaaaaggatgggacaacaccaaatagaaagaaatcctgacccaactactggcagagccccatgaccatcgcttattgtgaagatccaagaactagaggcaagacggctggggcatctctggattttaccctccctctgagaagggactggagccttgggtcactgagaag

SEQ ID NO: 467958 - DNA, 1315 bp, Homo sapiens
tcgcctgcattggacctcctgggtgcttcaccacagactccggtgaagtccacggatgccaccccagacagctgttaggatccttactattgcggtgttggggaaccttgcagggctgtccccttctctacatccagagattggcatgccggcatcctggcctgtgcctgtgcgcgcgtgcgcatgtgcctgtgtgcacgtgcacgggcctgggggtattgctgttcttccagcttcctcctacctgagcagcgtggaggtcggcaatgggcttggcctggcgcagtggggacggctccaggtccgagcggtcccggctgtggaagagactctcgggctgggtgggccagggagcagccagccagcagagcagcagtgtcggacggaagatggaggcggcgagcattggcctgagtttgccatgtcctccgataattacatcctccagttgccagtgcctgtgggttccatttctatggagatatactgcgggcaagtttgccgctaaatgagctgtggaattaacagaggcacgagactgcgcccctaacaacatgcctctcagagctgagcctgagtttaaaaaccctgaccgttagtttgcttacagtttgggtcactttttttttcttggtgaactggggtttggagatttttagtttgtttctcacacattttttgtgtggcttttcttctttttgtttatctttatataaaggagatcttctgagcagatagtataaatttgaacattcttgcagatacatatgcacagatgcctagagaagtatttgtgtgtgtctctcattttacatgaactctattctctgttcttacaagccagcacaacgttacaggcacttttctgtttctgaatgtaagtatttatcgttctagttaatgactgcacagcgtcccattctgtgggtaaagatttttatagaaggataaactagaatcacctcagcccactactttttcccctcatggagaagcctcaagtttctttgggatcctgaagacagagcccctgaactgggcttttatctgagcagatgtcctcctgagagtgcagactgactgggtcacagccgtccatgggaatattgagaatcatagaaatacggagaggccaggtgcagtggctcagacccataatcccagcgttgcgggaggctgaggcaggaggactgaggccaggagtttgagacaagcaagggcaacaaaatgagacctcatttctatcaaaaaatgtttaaaaattagcttggcatcggccgggcgtggtggctcacacctataatcccaacacttt

SEQ ID NO: 467959 - DNA, 527 bp, Homo sapiens
cacccccaaaacagggagttgaagtccatgctccagtcggcaggagggtacatgtaaatatgtcgttccaaaacgtggcacagtcgtgcaaagcaggagggaagaaacggtgccagggatcagctttatttcttggaggcaatgaagtgaagagccgagctgtggtgaaatactcttctgcccctcctcgaacagcatttgcacgccttgaagagaaaacagacttgaaactcccacctgccaactggttacgagagagtgccaaactagggccagcaggaactaccattcttggcaacagcaagaaaagcaagccattttcaagatttaaaaacccagcatgttgggtgacctacaccttgactttgacaccagaactgatggtgttcaaagttgagagagtagcctgaggtcttatagagaaaaatgtattaatgtacatactgtaggacatttaatgtgtagggttctcttttcttcttcccccttctcagcaactcaatctaaaatatttccatgtaacttgt

SEQ ID NO: 467960 - DNA, 851 bp, Homo sapiens
aaccagttccccttctccgtgcatgacaatcggcacagcttggagaactctggatgctaccttgactccttgtgaacaaacagaatgtacaattttgagtacacagtaattatcaggttcgcacgtaaggtgctgagagtgaatgaggaagcctgtgggccaggacctaaaggtgctgggtccttcagggagcccttagggttgggaaagaattcagcctcctcagacttttcagagaaagaatcatcattggtcccactgagtgctggggggcagctcagtgctggggagcagggaagctcggagaagtttgttattactgatcgtctgaagccttcttctctcaacttgtcaaagtcattctccatccagctttgttccattgctgccgaggagctgcgaccctcagctgcaggtctgttggagtttgctggaggttcactccggatgctgtttgcctgggtatcaccagcggaggctgcagaacagcaaatattgcagaacggcaaatgttgttgcctgatccttcctctggaagcttcatctcagaggggcacccaactgtatgagatgttggtcggcccctactggagctttgttctccaccaggtgcattttcttttcttctcccagggagtcctcacaaaatcctcacttgtggagccttctgcctcttctctcctttctctgcccaaacaccaacagtctctaacaggagtgacacataattccacttatgggaagtgaaattcaaaaaattacccaaaagacatacagaaccaaatctgcaattatgtggagggacacagagataaatgagtgggaagggtatatttaccacccatggaaac

SEQ ID NO: 467961 - DNA, 984 bp, Homo sapiens
cacacgggttaatcccactaacgctcacacgtgtgtccactctgagccaagattcacaggtccaggaatcaagggatgaaagtggaagtggcaccactcaccatcacctctagtgatccactagcagaatttttgcttcctgttactgtgacactatgttctgcaagcctagaggtcttagctccagagggaggaatgctgtcaccaggagacgcaacaatgattccattgaactggaagttaacactgccacctggccactctgggctcctcctgcctctaagtcaacaggttaagaagagagttccagtgttggttggggtgattgacctggactatcaagatgaaatcgactactactcctcgatgaagtactaccatgccctgggattaaggtcaatggctctacgaccataccacactgaatccatcccatctcgtctgatcttggaagctaaggccaatgggaaactacagcctaatccaggcaggaacaaatgacccagactttcaggaatgaaggatcacagtaccaggtgaaaaatcatgatcagccaaggtacttgctgaaggcaaagggagtacagaatgcgtagaagaaggtagtcatcaataacagctatgaccacgtgaccagttgtagaaatgaagactgtaattgtcatgagtatttactccttattttgttaaaaatatgtttgtgcatgtatacacctgtactaaggaaatatcttcattttatttcttttctttttcctttatcatgtaacataaaatttattgacttcatatcagcatttaagcgttgtttgtcttagcatttaggttaaggattagtgtgcttcttgttgtacgaaggatagctgtattatgttaggcataattacgaccttattattgtctttatgtggagattaagtatgatttcaggacatgtgtatgggtgcccagttgacaatgggtagacttgtgatggttaatatt

SEQ ID NO: 467962 - DNA, 602 bp, Homo sapiens
cggcgtttccatgagggtattcgagtcacaagcagctgagctcccagccagcgtcaacttccaactttgcgtctgcactcagtgacatcatgttggtagcttgaaattggccatggtagaaatatttacaccacagaaatatgcagacagtataaatcagagcctttgtttcccagagaaatttccatcagaagactctagtcagagagagttcttcaaacaagttaggacaggcattttgacccacaggtggcctgaggacatctgggacacattggtggcctggggacacctgtgggtcctagagaccctttcaggagatggacatcttgaaatgcagaggggcctgcagacccccagtgtgagcactgagaaaactgatcaagcttgtgtgtcccatgcagattctcactgggactggaacccagtggcacaaagtggtgacaattcaggaaccagagagaggctggtggacccgatgcttggcagtgacccaaagatgaagttccccagcaggtgaagattgactttgactgacttctgtacctggaccatgtgagaacagccaatagtcacgggctttagaagggaggtgttccttc

SEQ ID NO: 467963 - DNA, 641 bp, Homo sapiens
gcgttccgatctttggaattaataagcagtgaaactttccacttggctggggaagcctcacaatcatggtggaaggcaaggaggagcaagtcccttcttatgtggatggcagcaggcaaagacagaatgaggaagatgcaaaagcagaaacccctgataaaaccttcaaatctcatgagacttattcactacacgagaacagtatgggggaaactgccccagtgattcaattatctctcaccaggtccctcccacaatacataggaattatgggagtacagctcaagatttgggtggggacacagccaaaccctcacaattatggcatcatggtggtgtcggtggtggtggcagtggtggtggcggtactgttggttgttggggtgatttatgatcaaccgaatgacttgggactggtttatggttcaaagactggtcagcatgatatactggtgctagccaaaattgggttattgctgcatttcagctccagcatagccccaaaagacggcgatgaaggaaaatgtcctaactccatagaacttccagccacacactcacctgttcctgttccattgacagagaagtggaagtgggttgagatatgaatatatatggaccgttggcagtgagaaatgaac

SEQ ID NO: 467964 - DNA, 438 bp, Homo sapiens
tagtaccatatgcctgcttttttagaaggctttgcagagggggaggtggaaatagggcagaccacacctgtctttgtggccccatccatgactctgctctgtaaaatcatcaccttgttaaacaagttctgtctgttgggattaagctggaagaatagccttttcccatctgagtcagaagtcctcagcatgcctctgattctaccatctttggtcacatgttcatctctaaaccaatcagtgtggctgtggatagagtgggaccaccctgattggctcagaaaaacaatgacccctttctggagctggagggtggtggtagaatctcggccccacccggaaccgcgtggttgctacaagatttgggccagaaaggcagcttgacacagatgtcggggagctcagctttgtcatccacaacacaagttactagatttc

SEQ ID NO: 467965 - DNA, 657 bp, Homo sapiens
cacagctctcttcttaggaactggatccagacacgcttccacggtgctggatagaaacataccatgctgaactccattcattcaaatactggacgagcaggagagcatgaagccaagcagaaagttttcctaagtgcaggatgttgtgcctttgcacggggtcacaagcccatgaagctaggcctgatgataggagatgtgttaaaagttcagaggagccagagagggttcgcagacctcgtgggtgtgaacgtagggagtgttgtatggagtcagaccaaccaaacaaagggagttggcatttgcggtcactcagattttatgcagccaggttactgctggctctggatggttgacacacagtgtgatgtttcactgcatttgtatcaagataatggcgcaaccatccccccaaaatccagcattattcataatcgcatctttcatcatcaatttggggaaagtctttggtacacataaattcctatgggagaagggagctgtgctctttcagcttggaactaaagtgggaccttaatgtttcattctccataccactgtattgtatgacaataagcatattctaaattattacatctggtgatgttggtaacatcctgtgtccttttgatgccactgttgctgtgtcttatttaa

SEQ ID NO: 467966 - DNA, 456 bp, Homo sapiens
agctgctcagagtcaactgtttgccttatttatgtctgcaataagtgacagaaatagtgaatccaaatcaggggacagtgaatggcaggtgcaggctcagagctgttccgcagacctggggaacaagcagcccgtggggcaggaacaagccaagttcccacagggcaagtccttgacaatagaagggagaggatggaatagatgggagacttcaagtttggatatacttgaggatatgcatttgtgttgttgttgttgtgttgttgagacaggatcctttgcaggcaggtgtggtcatgggacggagttctgctcaaagtgggcagaagtgatgtgcaccacttccagtccacaaccaggtcctggaggccaagggaatctttcttctccaaactcaaaatctcttcttggtctggggaaagatgtggatgcagaactctaagcctttgctggttg

SEQ ID NO: 467967 - DNA, 744 bp, Homo sapiens
catctgcagtgtctgctgctgccctcatagaagaaaacgtggcggcctgctgggtgagatcgccctcttccacggagagctctggcacggcccaggtgtgtgcgctccggtgccaccagctctcctggatgttcgtggctttgtgcatgtgtgcacaccctccccgggacccactctgtgctgccctcagtgctgggctggtgctgtgttcttgtgatttgtcatactgaagccggcagctcctgtgcctctctgagaactccatgattggaaaggaatcctttccaatcctccatgactgcagcgtggaggccgatatctgcatccttcacttccacaagccgataaagtccttccagcccctgatgaagacgactagttgggctgcatttctggctgctgggagggttgctccctcccagatgcaggtgtcctggctctggaaggggctggcccttcaccaccttctgtcccatgatgctcagcggttcttgttgggtgtcagccatcgcccatttaaccgatctgttccctggagggtggggcgaggacaagactccctggtaccagtggggaaactgagcctcagggccatgagggactgggtgcgggggtctctggagtggcagggctggcacctgggggagtgctggtgctgtcaggagcctgtgatggagcaggggccggcattagcatttgacctggggctgcgcagtagttagtgttatcaggcgctgactcgtg

SEQ ID NO: 467968 - DNA, 676 bp, Homo sapiens
agtcccaccgcacctaggggcgcccctcgatgacagcacaggcctgctcccggcctgagcacctgcaaggccgcgaggaaccctggaacatccggttgctggcgcacaactctctgggaccggaagcaggtgaggcagagtgggcggagccgctcaaagcccgcgtccacgttctgctcccatgccctgctcccatgccctggctgcaggcgcctgcggagtctattgccctctatccctcctgctgcagccaagcaaagagaggggcagagagcagctacagtcaccatagccactttctaaggcactccagaacttttcccatctcaggcagaaaaataaaacccagcaagaattctttcccctacttcctgttttacactagaccacaattcttaaacttggaagccaagcatttggtccttcggatattttggtctttttggtttcactctcctttggggtagaggtgccagagaaaatacagggcgctcagtctcaggaaaacaataaacgtttaagtatcgtccatgcattacttgggacatactgaaactgttgtttatctgttattttcaaatttaactaggcatcctctggttttatttgctaaatctggcaatcctactttgggaaaacagaggccacttcttgtaccctcagtcagggtagtgtc

SEQ ID NO: 467969 - DNA, 1154 bp, Homo sapiens
tcctcacagcttaggtcccacatatcaagatgacaagtaccactctgagatatggactcctgctcctgctgaagcacccagagctcacaggtaggaccacagatgatgaacaaagtgaatttcagaacaatgctgagaagatggtgccagtgttctccatcctgtttctcttagagaagcttcattctttaaatttctgtgtcatcagctgtaatctgtctaaatttgatgacatgattaaaaaggacatctttgcacaatggaggaggatgactgagatgaatcaatctcagactgctgagctagcagcaagcaaggctccatgggcattggacctgctgcaccaagcacgggagggaatctccaggtcagccagttgtgaagaccatgggaaaagtgcagtatttgggcaggagtgtaccattcctccaggtctggtggagtttgctggatgtcttctccagactctgtttgcctgggtatcaccagtgaagcttgcagaacagcaaagattgctgcctgttccttcctctggaagcttcctcccagaggagctcccactagatgccagccagatggagctctcctgtgtcatatgtctgttgacccctgctaggaggtgtctcccagttaggaggcacagggatcagggacccactggaggaggcagtctgttctttcaaggtgccctgctcagagaggaggaatctagagaggctgtctggctacagcagctttgccaagctgtggtgggttctgcccagttcaaacttcctggtggctttgtttacactaaggacaatcttgagcacatgtttcatcatgcaaacttcagagtcacattgatagaaagaatgctggaaaagcatcacaagcaagggcagcaacctcttcaaggccctccatgctgtgatgatgtcataccacttttcctgtctagatgacatttcctcaaaagcataccaccaacatcagggaaacagaattggctggttgctgcatcatttgctgctcacacaatgacaaggatgacaagaagattcagaaagaaatgcagtatatttttgtggaatgtgatgttccactttatgttgttctatgttttgaaatgtaccacacaaaaaaactattaaatactgatctttacatacatt

SEQ ID NO: 467970 - DNA, 788 bp, Homo sapiens
ctgtcacaggaaccccacttgggttgctttaactgcccccgattcggcatcctccgaggcccccaaaaggcttaatgaactacagctttcatctgtttcaagtactgagtcatgacagaaagaattaccctgttttctgggagaggaagaaacgctttggttatcagcagggctggccagaggcccggcagcctccagaaaggtccgtgggatttgaatgccaggggtggacattcatccagctggacacgttcacaccccaggagcgcggtaagatcctggttcactgcgtcatgggccgcagccggtcagccaccctggtcctggcctacctgatgatccacaaggacatgaccctggtggacgccatccagcaagtggccaagaaccgctgcgtcctcccgaaccggggctttttgaagcagctccgggagctggacaagcagctggtgcagcagaggcgacggtcccagcgccaggacgtcatagcagaaagtatttgcaaattgttgtctgctgtggaatgggacgatggggcagccagccaggcacgatggctgcgtgatttccactctgaaggagaaaacggcagcagacatgaagcgggtagtgacagcttccagggccaggaatcccaaaccagacagaaaccaaagagagttgctgctgttggagatgccggccgtcaaggaccaggcatggaaatggcctggagaaaccagaatgtgataaaggccttctaggaaaaaacgaaaaggggcccggttcttcagtttggttgtagtttt

SEQ ID NO: 467971 - DNA, 1830 bp, Homo sapiens
ttcattctctctctctttttttttttttttgagaggcagtctcgccctgtcccgggatattatatttttattagtagtaacaattattaagattgagagtcttaagaaaggctattggaaataataggtaaaaatgtagaactcagaatatgagaaatagaatgtaaatgatataattgtgtaaaaaatgcctagtttagaatactgaagtttgttttgtttcattttatttaacttttaaaacttagatcttttgtttaatttttattttttggatggttaagtacatgaaagaagaaaaacttggttaattttgcctgattattttaaacattggaagcaaaatacaagatttgtatttcatactacaggaccgcttccatcatccatctggagagacagagagagagagggagagagagagagaagcgcggcggtgataagtctcccagtgtgagagaaatcggggaggggcgaagaagggtaggcctcttctgttccattgataccacgttcattcacagggagccggctaaaacagactactcccccgtgcagtcgttccctctaccctaataaggctttggcgcctctcccagaactcggtcctggggaatgctctttgcctggtccagccccgacaaacgtggtctgagaacagcggagcgcggaaaccgcggagcatgactcctccgaagctgcgagcgtcgctgtcgccgtcgctgctgctgctgctgagtggttgcctcctcgcggctgctcggagggagaaaggggcggctagcaacgtggcggagccggtccccgggcccactggcggctcctcgggtcgcttcctcagccccgagcagcacgcgtgcagctggcagctcctgctgcccgccccggaggccgcagcgggcagcgagctggcgctgcgctgccagagcccggacggggcgcgccaccagtgcgcctaccgcgggcatccggagcgctgcgcagcctacgccgctcgccgcgcgcacttctggaagcaggtgctgggagggctgcgcaagaagcggaggccctgtcacgaccccgcgccgctccaggcccgcttgtgcgcgggcaagaagggccacggcgccgagctgcggctagtgccccgcgcgtccccgcccgcacgccccaccgtcgcgggattcgcgggggagtccaagccccgggcccggaaccgggggcggacccgggagcgtgcgtccggcccagccgctgggaccccgcctccccaaagcgcaccgcccaaagaaaacccctcagagaggaagaccaacgagggcaagaggaaggcggccttggtccccaacgaggagcgacccatggggaccgggcccgaccccgacgggctggacgggaacgcggagctcacggagacctactgcgctgagaagtggcactccctctgcaacttctttgtcaatttctggaacggctgagactgcctgccggcttagggagggttgatgggggaggcgtggggaagggaaagctaagggcgtcttagaccggggggtactgtgatagagattggggagaagtccaggttctcgaatgggggtgggggcaaggctaaaatgtaagtatgtatctcagagtcattttgaccattatggaagttgtatctctctgtttcatgtaactaattattaatatatttcatttttagtgtgatgtaatgagagactgtgtgtgtatgttaggtgctcaataaaaactgtatggttagatttaaagaagtggcaaggcaatggaaattctacctgcatttgatctacttccaagtacaccttgaattaagttcttaaa

SEQ ID NO: 467972 - DNA, 1046 bp, Homo sapiens
caaacttttaatgtagaaaatatgcaaatctacaaaaaagttgaacgtgtagtgcagagcactcagcctagatccctcgcatgcacagttcacaatagttctcattcctatgagaatctaagcctccgctgctctgacaggaggtggagctcaggcggtaatgcccactcgctggccactcacctcctgctgtgcggcccagttcctaacaggccaagctcaacccggaggttggggatccctgctcagtacgacatactacctttgagacttttagcttctccagagccctccctttatttaatacgtgaagagcctgcagaagctctgatgcatgtggaaggctatgaatttgggactggtagaaaggcattctggctgagcagaaacaacggattaacagagactaaaggactgaagtatttggtggaggatgttcaaggtctatggcctgatgatgagacagctatgctgcgaccgcgaaagggagtctcgtttccttggaggagtcagggaacattctgctccacccgcttcttgtggaaggctgaatattatccaggcctgcccgcagtcatccggaggcctaaacccctccctgtggtgctgtgcttcaatgcgcacgctcctggtccactttcatgttcctcctgtactcccggttcctctttgaagttcgtagtagatggcggtcgaagaaatagtgaaagtcttaaagtctttgatctttcttataagtgcatagaagaaaatgctgacgtatgctgccttctctctctccttcagctacataaaagggaaagcacccctgtcctatgatcatgtgacttgcttcaccttctcaatcacttataagattagtcctccttacgctgccccctttgtcttatatacaataaatatcagcgcgcccagccagaacatactttgtattatttaaattattttaaatatgttgcaattcattttatggtccagaatatggcctatattggtgaatgtcccgtgcatatttgaaaatgtgtagtctgctgttctgctgttat

SEQ ID NO: 467973 - DNA, 1150 bp, Homo sapiens
cctgaagattccccagccgattctggggtggacccccctcacaacatgttagggcatagtgagaaggcagctgtctgcaagcgggaaagaggatccagatttttctggtacttccagtcttggaccatgtggaatcaccactccctccccacccctgccagcctgcagattcggtcagaggagatttctgtccctagaggcagaaaactgctgcaacttgccctccaagaggtgtggaccaaagaggaagctgatgaaaatctaactgcctgcctcaatgaatcttaccatcaaggaatgagccactgccctggccctttctcttcttgttctgttcctacttttttcttctttcctcctcttcctcctcctcctctccttctcccttctcacccctcccccttccctccccctcccctcctcctcctcctcttctttttcttacaaatggtataatgccaaatggatttcaaaagcactcacaccaacagcaatgtatgggatccagatccgaacacctgcattgctaagttttttacttttgtcagttctggcaggtgcgtccaggatactcttaaccttttacagatatttcctgttcacctgattctttgacatatttttgggggaaaaaagtgcacgagtcacctgttattcttatttttattcgactggttcatttgtattacctttcttcaatctttacacttcgatttctactcttttagtgattatctttgaaaatttaatatgcatacttgacttaaagtctaaatttcatcagcatcttaaagcttctatttcccatactattgtcaactagtactttcattccaccttgttttaaaaatctcaaatctattacttgtgtattgcagacaatgcttattatagtgctttaaatagtcctgttataaaattcaaaaggaataaaaggatatacagtttagtctttcacatctgatcccagtggcactgaggtttccttccaacagttcacgtgtatcctgaaggaattttattcataaacaagcaaatgcatgttgtactttttcctacgtatacaaatagtagcaaatcatacagattggtcttgaatattattccttatcagttatattatttcagcctttttactgacatgtttgcc

SEQ ID NO: 467974 - DNA, 1087 bp, Homo sapiens
gccaatgttcgcggcaatacgggcagtagcgacagctttctcctggaatagcggatcacgttcacgcttgctggcaaaatggcgagcaccactaacagcaaggtcagtgcatggatggaaggccataataaaatccggtttgtcatacacacccgcgatcgtatcacgttcgaacttctcatcaatgaagacgttcacatactcaatgttcggatgctctaccctggcgttgtactttgcgtaatctccgtgatcggctccgtcaaagttgaagcacatcaccttatgaccttgctttgccagttcatggccagcaagaccggaaccgagttaaaaatcaccgatatgattcgcctaacctgcgatgcaatgtaccgcgacaaaggcatgaatgagttctctttcgtggctgatgatatggccctcgaggccgcgcgattctacttccgtgaccaggaggtaagtgatgacgatcttgaatctgccgctgccggatgggtggaccagaaccagggggaggtagagaagcgattcaagtccgctttcatcactccgatcattaccaggcacttttgcaagtatggcaaggtggcaaaggtgaaggtaggccggaatgacgctgcaatcacaatgataacggttatcgttaccgacgaagaggttcccgtgaagaagcgccgcagtcggaaaaaagttagcctggccgattgcctggattcgtttgtggttgatgtgggcaaactggctgatagcgaattgatgactcgtgacgtaaacgagatcgttcgccagatgaaagcgcatatcgaaaagtgcgaagcatttcagcttaaccccgagacttttggattcaatggtgattatcgtacaaccttcgaatttgtccggtatgtaaagaaggagtttggattcgaagttattcacgcaggtcttgtcagtggcattcagacgttcatctttaagccaaatgagattcgctgcttcactttgatgaaatagcactttttgttaaaaccggatcgggataacctggtatagtaaccccagggggttcgagtagcatgagagacgatttttaccctcagtt

SEQ ID NO: 467975 - DNA, 2475 bp, Homo sapiens
gtgatcttgattcacacatgaggaactcaaggttcacagaagtggaacctctgctgcgtgggagccctcgcgggctggctggaccgacccagcctctgcccctggcttccgcttctaccccacttcgcttctttcccccagggttgccagagagctgctgccagttttcccagcacattgctcacaggaaattaggatctaaaggtgcaagctccactcgccctgtgcgaaagcactgagaccccaccttcctcgcaggctcctgcgaccgccctctccagtgctgagggtgcagttccaccacgggccatgaggggctgcttgcccggagctcctggagggggcccgcgggcctggctcagctggaagaggacagaacacagcaggttccatccgaagctttacctgttggcagagtgggtggtccctactagccaggtttccagagctgcaaatgacccaatgctagagattgttggaaatgtaacaaacagcagccagccaaggctttccaactcacagctctccacggtcatggctgctgaggctgcagaggagagcatcaagttgcagaaacagacacacagagaagagacacataaggagaagcaggagagacctcgtgagtaccagcatactggagtgaagcagccgcaagccaaggaacgcctggagccaccagaagcaggaagaggcaggggaaggttctccctcagagcctttggagggagcacaccctactgaaacccagagtttagatttctggcctccagaactgtgagaatatcaatttctgtcatttaaagtcagcaggaggagcaaacctgtcccatgcagggtggttttccattttctgtgtttatagggtcttaccctctatttgtgtttcccccgtcatggtccatttgggctgctataacaaactaccatagacagggtggctcttaaacgtcagaaatgtatttctcacagctctggaggctggcaggccaagatgaaagcactggcagattcggtgtctgaactttgtgttcactgttttatcattttcttccatcaaatgctgcctgattctcagggtcctctcccagccctaccccaccattgtaagtggattgctttttgttcttggatacatgagaccattttcttttactttgaagtgtagtaaattcatcaagtatgtctcagagttgagccagcactatcacttcttcccagaatccagagagccctttcaatttcctagccagctctttctttcttttcttttatactggtggatattttttgtatttcatgcattgtagtctttcttttggggaaacaaggacccataggtagatcattatctatccctcatagcttaatcttcatcctaaccatttcgactttattgtcttttccctacactccttctatgattatctcaagcttttttgaatgtgatgaatttaatatttgactgttaattttgtttcttgctctttcaaatttacttaactctgtaattgctgttttgatctgcaatttttccttagctctgtaactaccatttttccatcttattttattgtctcatctaagtatttatttatttttgtttcaatgaattcatgtttccttgtttttttctagatacaaaatacttgtcttagattttttccctatttcttaggcttatattagatttcaggatggatttttcactttcccgtttatactatatttcctcttcttttttgtgttaacctctctgcatagttgccatgaattttcttttattcctgcagaatttttaataaaaggagctctatcagcgcatcccatttgcctgtatatggtgtaaatcaattttacttggtcctcatctcaatgtgtctgagtcctgttgtcttcccttcagtagtgtttgcttctattcttacaatctttcttacccttagcaagttacttatgctttctgtgcctcagttttgtcaacctacatcctatatacaggttcagcactaaatgagccataatgtgtaaaatgcttataacagtgtctggcatacacgaaggctattatcttcaggaagggaggctctcttctctccaatttcttttttccccccagcttttattttaggttcaggggggtacatgttcaggtttattatatgagtaaattgtttgtcatgggggtttggtgtacagattatttcatcacccatgtaataaacatagtacctgacaggtagcttttcaattctcaccctcctcccactctccaccctcaagtaggccctggtgcctattgttcccttctttatgtccatgtgtactcaatgtttagctcccgcttataagtgagaaaatccagtgtttggttttctgttcctgtgttagttcagttaggataatggcctctagctccatccatgtttctgcaaaggacatgatcttgttcttttttatggctgcatagaattc

SEQ ID NO: 467976 - DNA, 726 bp, Homo sapiens
acagaagactttctccagagctccccaccaggaagaggaacgcattgcaagtgctatgtaactacaagagcagggacacagctcagtgggaacctagaaccaggaccctgacatccgcagggcatgcccactcccctttccaaatctacttttctctgcctgtgggattctttcctgctgcaggataggctcctccacatggcaggagacacagctggaaacaaaatccatgcctcccagataagcctgtgtcacccagaccggatagccagatgccattgcggagtgaacatatcccatatcacattccagtcacacagccacgactctggtccagtcttccacccttctggattctggtccaatcttcagtgcatcctgaattcctgccctaagtgctgttttgatgctgttctcctaactgcccttgaagatattacttctccagttcctctctcacatggatgctgtttttctctctcacttcccctacaaacacctgtaggtttgaaactgtactcgtggtcctccattgctgcttgcaaaccacttcgtttttacttaaaatctccaagcctctggaatcaggccattagaccatgtccacccccgtccctctctcttctcttcacccattgacctactgatcatttccccttgttctttaaaggttccagtacttgcttcactgtgattctctctatttcatattccatagccacgagg

SEQ ID NO: 467977 - DNA, 2328 bp, Homo sapiens
aaaggacccatctcagccatgagtaaaagttgatctctcctcaacaagatctttctcccacttcacaatgcgtgaccctctctcacactgtgacccaaaggtgtcattcccctgcatgtggaaggtctttcacgctctcacttgtcaccagcaggtgccttcttcaaaagggtttctcaccattcaaactgggaaaaacctggttgatatgctgctcagactggaaaaagtagatgatttagagtcacaaaacctaatatcaagaccaaatcctgctacctatcaaatgtatgacttttcacacatctattggcgatttcttcttcctgacacccactacaatgacagtaaaggggaaaataaaaggaatcatcacataacatcaaagagcacaggtgagggaggatcagcagacaaggactttcaagaaaatcctagaagtatggagaaagatgaacaagacacaaggaagccactcctcaggagagtgctctagcacaagtgtgaacttgtcagacagaattcggagtggcttggaattgaaggcagagctccagcagaccacaggagatccaggagtaaatgatattattgctctaagcagaaacattaaagaaaaagaaagcagctaatggttatggaatacctagtatgtgccagcactctgctaggcacttttggtccaggatcctatggaacatatttcagttatatgagaatatagcaaatgacatctgcccactgacaatgagaacaaaaatagggcatacagatgaggacttctagtatagacacattattacattatccaggcacatggctgagaaatggttcaaaggggcattgttttaaccaacatgtagaattagttcacaaaataagataaactaccctattacagccatcactagcaggccttatgggtatttcacttacatattctctgagtgtctgtgcatctttcaacttggatatgtacaaacatattgcccagtaactgatgaagactcagattgtgttcagttctgggtagcactctttaagagtaatatcaatgaacaagcatatttacagtaaacatattatagaagaaatcatgaaaaaattataaccattgagcctgaaaacagttcatttgggtcatatatgacagttctctcaaatggaaaaagagtgtgtcacataaaagcaaaagaagaattacttagaggaaatgagtaaaatcaataggtagaattttcagaatgataaaaactacaaatttatatttcaccaaaattcaactgttgagttgtgtcatgttggaatttgcctcatgttttgaagtaatattatttatagtgtgcttctgccgtggtgattatttaaagtgagtgctgaatgagtatttgtgtaagaagtactagaaaatgattcctatgctgaatggatagactgtaaaactctaggtctttctattgtacagttatgtaactataactctataacctacaatcctcacaatcacagggctaatgagtttgcctagaggaattaacattttctttttttcccaacatacatacactttctttcttctctttgtaatcccccaaatgtaagggagtaccctatttgcacagaagtgtcaagaataatggaaagaaactctcaaatgtcaataacacttccatatgtggagatctttctagttaggatgcaatttgggatggaagaacaatccttattattactttatactcagctataatcaaagggcttctatattaacaaaagaactgaaaatcagaccaagtaggtaacacaggtcaaacgccgctggatccttcttaccctattggtgtcattagagtataagtgatttactcagactctgatagaaagaaccagagagattaatatgatctttgctccttgagaaacactgaaagttcattaattggagaagggagtgaagctaagaaattttctcagtgaatcagaataaagcagttgcagatagctctaaaaatcagacacaaacaataaaatcttttctttacacatacattatggctaccagtgtcaccagatattaaacgataatgaaaaaggcttagcactttaacaaaatgatttcttgttaaagaatgctcatttcatactgagcatatttaaatggaatggccatccctcagtcccttgtctcaagttttttatttttagtctcatgggtcacggagtttcactttctttaaaagaagaaaggcaggtatttaataaacttaaagggaatttcaccagttgtcatttctcttctctggaattttctgacaagctgtgctctaa

SEQ ID NO: 467978 - DNA, 727 bp, Homo sapiens
cggattgaagatccctagcgaatgctgtccttgcctccatacacagcacagcttattgacttcagtttttgttacagacaacagatagatagatttttgttcccacagtcttttagcagggactatcttcgctgcagcccaggtcacttaaatctacatgctacttcctggatagcgcttctgagcctctgggattcccaggtcagtgacaccagggtcaaggacatggctggagtgagtttgggagtctgctctgctctcattacctgcctgcacatgggaggtgcaggccacaatggaagagaggaaacaaaggggatagggatctatgagggggaaaaagcaggcgcctgtgttggggtgtggaaagcgccctcggagcccaccctggctagcagaggtcaactttgtgtaaacgcagcccactgctacagaggcctgagcatcgcctgctccagtgatgaagagcgatgaggcttaagccgacgtgggctagcaaaagttttaaatgtactttataattattttatgacctttctttctttgtaaactgcatgtcatttcccctctccttccctgaccaccaggctgccccgtgccagagctctgcctcaaaactggaaaccttgccagaagcgagagctgaaattgctttttggtgggtccgatttcatgctgagtgggaagcggcagctcagagatgaattggaaggccacgcttgtcagc

SEQ ID NO: 467979 - DNA, 615 bp, Homo sapiens
gtgccatgaatgactctgatctctaaacttccactctcttactttgcaaacttctctcctgaggcttcacagtggtcctccactcagatgcccgccttcccccgccatgccctgtccatccagtctgcctcatggacgcctacttgtcttccagtcttagcactggagtcatctcctctgtggagtctttcctgtttcctctccccagggagaactgaccttggccccttgctgatgtgcacacctgtcccctgcacacctttgtataagaagggagtttggacacagatgcacaaagagatgagaatgtcatgtgaagacacagactcagagggaagacagtctgtaaagacagaggcagatattagaactgtgctgccgcaggccaaagaaggcctggggctgtcgcatgctagaagaggcaaggagggaccctcccctagaggcttcagaggggcatggccctgccaacaccttggtttggacttctacccttcagaactgtgtgaagccatccagttgatggtgctttgtgacagcagccccaggaaatgaatacagaagcttacgcctagtattcagatgggacttagcattcgcggactggggagggag

SEQ ID NO: 467980 - DNA, 811 bp, Homo sapiens
atctgaatccttctctcactctcctcaagcatgtctagagggcagtgcctcccattacaagataaagctcattttcatgatgatggagcttaacagacagcccaagtctttccagttgcaactcaattgctgtttccgcaatatattctatcatccagaatcttcttacaagccctcagggccattgtggctgcatgacaggagccagagaatagcagaaagtgaacaaagaccccagttaattacatccacttggagtgtgaaggacaacttgattgtctcaaaaagccagaggccatataatccatctcactgctctcacaaaacaagttcccaattgtctctgctgcgaggaggtaagagggacacccctggcaatgtgctgacacacattccctgccgcaaatggagaagtcacaaaagaagtgtctgttcctctccctctatgggcaaagagaactgccttgtggccctctgctccagatccacgactgagactcttcgatatctccacaatgcttagtgtcttcccagtacaagtcaatatcgcttgatccattctgaacttggtaacatttatatgcaactgagtttgcacatctaattacacgacctggtaatatggttcgtctcttgtgaccatacattttctgttccaatataatatttatggactcgtttagatttactacatgttacccaatgtcttgcttctgtatacggaaaaataaccagaaattaaaatttgttgtagctatggccatgatgtctttatccctttgtccttaatccttgaaatggaaagcagact

SEQ ID NO: 467981 - DNA, 490 bp, Homo sapiens
tccctgacccccgacttcttatgctgggcactccatgcattccatttcttattctgccaacactccatttctacaaggaaattcatcaggtgcacttttggggcctgctctggtttatctgaaacttgattatgttcagttacatagtatgtcatcaaaactagctctgatatttaaatggaagagaaggcagatgggaggagggagggacctgagtctgtgctcatgtttctccatatcccgctcttgtggacgtcagacaggacagtattcagctttccatgttatggtttgcaggttcagtttagaaagaaggaaagggaaatccccttcctcattcaaacatgaatctctagctcatggcctttgcattcgactatatttctgcagttccaaggttagaatgctgagtgtcagtgatgctgaggagtggctgagtgacttggagcatcgcttcctggacccaggttacagtacttctcaatgacag

SEQ ID NO: 467982 - DNA, 602 bp, Homo sapiens
agctcctcaagcctgcctgttggaggagtctgagatagcagcaacttctgcttcctggcacagtgaccaaaccatctgctgaccaggggaagcagcctggatcatgttcacatgtcggaatatctcctaagcaataaatcagagggttctctggacccagcaaaacgcagagtagtaagaattctttatccacatttacccattcagacacaagcatggtacctgcccacctgccgctcgtgctcattcctatcagtctggctgctcgagtctcccttttctaatgatctcattcatctaccagagtccacagtggtttgtccagattggggggtgcagacccatctggaaggagcagagcagagggctacgctattgctgtactgccacaaatcagattcaatgtcacagcactctctgggtgcccacaaaatggtgatttcgaaggacagctggcagagcccaatagctcacctacctttgggacacagaagggctgctgtctcactctgcaccctggcccacgtctttgacaagaactgagggggaagccgaagatttatattggtgccgttagcagaaattgctggttgtcaccagac

SEQ ID NO: 467983 - DNA, 589 bp, Homo sapiens
ctgcatattgtccatcaagactatgaaattggaaaacatgcttggatttagaatgtgttcagttgaaagtgagacactggagatgcctccctcacgtgaccagcagcactggccctgcccgcctggctttgattccagctgtttctctcacattctctggctggctcgccaagctcatgccccctccattctgccctcgcctcctcccacccttgacctttgtggtgtggtagaagcagatggtcttgcagccagacagaggtttttccccttgaagttgctctccatcccaaaaagctgggagcttactgagtcactgtggaatctgctgctgaatggacagcccatggttgaggccagtgaacacggcaggacctctgcttcccttgggcagcggctggggcgtagcctagagtccttcccagagccgaatgtaagaagcaaggctaagcgtggctggggaaactgagtacactttgcggaaagaaaacgtgtgcttcgtacgtgcatatgtttaagaagatcatcttcatcttagttttgctgagttcccgattctactgcgattgtgattcagggattttgttgt

SEQ ID NO: 467984 - DNA, 939 bp, Homo sapiens
cctgggggactgcagcttggggagtgtggcaggccagggctggcaaggagaccagctcagctccatggactgtcagcagcggatagaccaagcaggcccacgggaggcttcgtccctccccagcagggcctctgagcacagcacagcttgtctctgcgggaagtcatttgttacagatctgggccccccaggagggcccccctttccccagggacctttcagtgctggctgagccttctggttctgcgatgagtgagtgacatggggaagatgagagcagcgagcagagaaccctgcggtgggggctgggaggaggaggatcctggcatgtggctggggaagagcgtatcccttgctgctttgctgggttttagcgcagaagaaatattctttgctactttctgaaatgtactacttatatggggatcgagccctccactctgtattacctgatataagcctcacacctccagctaagggacaccaggtagactcaagttaccaagatggcaaatccctctggctatcactggtttttgtgtccttgccctacccagatccagcatctataaaatatagcaaaaggaaccaagccccaaaggagggcctgaggagtgtctcccatggtgaacttcctcccaccaaacccggacttgtcaatcgcaatcagccgccagcgtgggttcccccagccaggccagctggcaggaaggctgccaaggcagcagatctgacgaaagaattctcaatcacatttacatgtgcatggtgcaaaaagggaaaggaaggggggaaaaacccctccggaatccaaaaagaaagtcactaactaattcacacaaaaaaagaatcagccacagatttgtctcagatgttctcaaattgctgtccttaaaagctctgcttccccgtcttcctcctcctcccatccgtccaata

SEQ ID NO: 467985 - DNA, 582 bp, Homo sapiens
gggccattgttagcacagacagacaggactagatactcccctgaatgcaccagagccattcccaaagctcggttctgcagggccatgtggcaggaattatacctagcttcatagaaaaggtctgtggttgtcccttggctgtgccctggagccgtgagacccctctctgtcctccaaagccacagcagggtaacctgatacttgctaatgaccaccagatggctgatgaccacaagggggcatggccctttgagcgccccttcagggtagaagctatcactctgcaggagtgtcaggcaaagcaggatgtagcctgcccgaccctgacagccaaggattgtgcccgtcgaaggagcccacaagataaatcaaggggcagagagaagaaaacagcaaagaggagtgggaagacggagaaggagatccacttaaatcttgaaaatatgggccaggatgtcttctgataacaagctccctcatgtttcctctgtctatgggattctgtatttaagaagattctaacacatcgtgggcatccgaaacgttccaaaacttcttgagtcacctctttggacagctccc

SEQ ID NO: 467986 - DNA, 645 bp, Homo sapiens
tgcctgtgatggctgcacagccagatggtgattccagcaccggccagatctgtgctgcgttcatctctctcatcaaaccctctcttctaattcctccgtgctctctctgttcttgtggtaatttccaccagctggcccttcagagaagcgtgtgtgtgtccagaagcatggaggccgcaggtgtactagctgatcctgtcctccccatgcaggactggagaggccttggaagcccagctcatgtcccacctgtgcactgcctgtgcagaagcctgtccctacgaacaggctccactgtcaacccactctgcttgccagatgaaaactgggtgagtcaagaaaaggcagcttctacctactcactccacttgttcgttccaggcaatgtccccatgtttactcacgcacgcattggattaggagacctggaatctgagatgtcccagcaagctttagctaaggtcatggttacctccatgaaactgctgctcttccaagtcaggtcttggtttgaccccagggaagcctccctgaagtccttgtcctgggctgcttggccaaccatgtgcacgtaaaccctggactgcccttggtgccttcacactcttatgcatgctcctcatccatttttctgattagaccacc

SEQ ID NO: 467987 - DNA, 784 bp, Homo sapiens
ccagtgggtggagtgacactgagtctccccactgggaggcaagcattgctcttcaagaccagaccacaagaatggcaagcattgctcttcaacaccggaccacaagaatggcaagcattgctcttcaacaccggaccacaagaatggcaagcattgctcttcaacaccggaccacaagaatggcaagcattgctcttcaacaccggaccacaagaatggcaagcattgctcttcaacaccggaccacaagaatggcaagcattgctcttcaacaccggaccacaagaatccccactgggaggcaagcattgctcttcaagaccagaccacaagtatggcaagcattgctcttcaacaccggaccacaagaatggcaagcattgctcttcaacaccggaccacaagaatggcaagcattgctcttcaacacctggaccacaagaatggcaagcattgctcttcaacacctggaccacaagaatggcaagcattgctcttcaacaccggaccacaagaatggcaagcattgctcttcaacaccggaccacaagaatggcaagcatgctcttcaacaccggaccacaagaatggcaagcatgctcttcaacaccggaccacaagaatggcaagcattgctcttcaacaccggaccacaagaatgctctcgtcccttgcttcttcttcccccttgacctcattggcctctgggacctcctagcttttaaccagactgttaatgcctagtacctagcaggcaatcaataaacacatgctgattgcaact

SEQ ID NO: 467988 - DNA, 748 bp, Homo sapiens
gcctggattttattccaagcataatgcaaagccaaaagagggctgcaagagataaaaggtacgaagctagtgcagttcctcaaaaatgtgctggctggactctggttattggaggcagggtgagaaagaacagaaatagggacgccgactgggaggatgttgcaggagcccaggtcatggtggaggtgactgtggccaggctggtaacagctctgattctggatgagaaaactgaggtccaaagaatttcagaaacttattcctactctcaaagcttccaaaccagcttccctccagataacaattcccacaatatcttccctacagccctgaaaggagcatttgtttggactcgaatccagttatgtctgtcccagcacctgtgcatgtggccatattcctcaggtggattagctacagagcaagctcaggcttttagttttgggggctctgtagaaagaggacgacaaaggctgacaggaagaagttcatgtgattctggtagctggcagctcagctgtcctgtccgtgtgcccaacataggcactggtggcacgtgctcaggatgacaatagcaactgggctttctgggcacagggatcatccactcacaatgggacctagctcagggctaaagaatgaagcccgtttcagcccttgctggaggaggttggtaagaaagagtaggtgcaaagcccagataaacagatcctggttctaaaatgaacactagctctgaatgtaaaaa

SEQ ID NO: 467989 - DNA, 733 bp, Homo sapiens
ctgaaggctgatggttgaactcggttctccccctttgggaagggacgtaggttcagttccgcagagggaacaagtcacctttattgccccagcagacttccccaaccaccaaatgagggaaggcatcctagaacacatggcctcgtttgagccaccagccggtcacagtgatcaaccaagccattccagacaaactgcccaaaactgtccaggcaccctaccagcattcatgaaaaataagaaatgtttgttgttcaaagccacaggttgggggcaatttgttaggcagcaaaagctaactgatacacaagttaagatcaatttgccaagaggtgcatatcacttcggggtctgtgaagagaagggcattccggcaaagagactcactcttttgaacactggtggatttcctggatctagcccttcaaagatactgactgagatccagaatatagcaagtgcctccaacacattattaaatgaatgaataagtaaatgaatgttggtaataaaggaggagggtaactctgaaaagaacgatgagaaaataaacatttccaagtgataaatatggttcaagaataaaggagaggagggatcacccatggtaaaaagtttctagcctgaatggggtggggggaatggagggtaggaaaatttgcctcacatcaactaaaatccgaaagtttctttctagtcctaccctattgcattttctaaatccttaaggggt

SEQ ID NO: 467990 - DNA, 1336 bp, Homo sapiens
gattctgccaatggctccaggtgccaggtgggaagcacacttgagccagcacccaaaggtgggggcaggctgtgcgaccagcgagcctcctactcacctggaccttgggttttaggcacacctgaaaaacctagaaaatacgcacctcatgaaagtggttatgaggatcaaatatgatgacagatataaaggcatgctttacacttatcagctccattcctttgtccgtaaaatggagataacagcatccagcatgtgcaggcatggagaggatttgaagcaggataatgaggctgggacttcatccttgctccacctcaggagatctgggtgcagccagctgtggagctccgtggcacccgagctggggagccaggcctcccttggcctccctcgggcccacagccaggcccttgcccctcgctggctggaggccctgccagtcagcttcggggtaggcatggccgtgggttctgtggatccctgtgagccaggggctggaggctctggtctcagctgctgcgggccccatggtttggtgggtgtcggctgctcattagcagcaaatcaagatgttcagatggtgcaggagccagaccctgcctctcaggcaagggtggcagactgtgcccgcacccgctaccaacttcctgtcagccctgcaggcctctgtgccatgtgccatttcaaagagaacagacccagcagcagcacccatactgctgctgcgtcctgcgcctgtgtccccggctcccagcccatccttccagggacacggagagtcacaggcagcttcatcgcttccttacatccagcacagaacttgctggagctgcttcctgcagaatattgctggggtcatgctcttctcttcactgttgcagtgccagcacaggtccatagagatgtgattcctcaagagctctgggtgaaggcatcgtgccccagccctggctatgggcagcacctgagcaacagctctgttttggggaggcagctgaaagtggagggctgtgggaaaaagatcaggatggagaacgatgctgagctccatgaagataggcgctagatctttaaattccttgtagctacgaccatgtactccttatccctaactactaaggagcatttactccaaacaaaggccccatgagcaacccactgcagactcacaattacacgccagccacaccagtcaggaggaccgtcccttcccttcagttgctacttagcttttcacactgtaacccaggcctactgccttcctggtaatgatattataatattgtctttgtgtgccctttgccaagtcattcttggcaatccatggaaattc

SEQ ID NO: 467991 - DNA, 803 bp, Homo sapiens
ctcactcccacaacccttgctgctctgctcgcctttggcagtcatgggatccaggccagtagtgcaagctgagcacagcctgccaggccaagtgggcccagcagggcagctcaaggatgtgggagtggaggctgtctgcaagctgcatatctcaagcattactgatctaagggctgtgaagtggtatctggagctttgcaggcacaagatgaagtggctgcagtgtcttgagctgatcctggttctatgttttagagttttgaaaatggagagcaagtggattagaaagggcttgagcattagcactgtgcagcacagctcagcagaacttcactggaaacttcaaaatgcaccacaacgcagaagtgaaaaccaaggaagaaagtctgcagtaaagggggcaaagtgggaagcaaagcaccaacttagtgtcacttccaatgaacttgaaaaacggaaagaaggaaaagccatctttaacgaaccaccagctctcccagaatcctccatcacttctctcctgccacccctagaaaatgcctgcagaatcctggcccatcattcacggccaagccagagcctgcccctctcagattccaagtttgccctcccgctggcgaaattgatacagcagccgaattccccttgcagccaccctcccctcatctctgaggaaggaagtttcctgtcctccatttctcacacgagtgctgatgaggggaaggaccacacaaggcgaaatcctaaacccggaccttttaaaccatttgtgcctgcttgttgtttgaagaagtagggtgctg

SEQ ID NO: 467992 - DNA, 485 bp, Homo sapiens
ccgccatttacctctagtgaaaatgcagacggttgcctcattttctgctctgaaaccccctgttttcaatgctttctggctgaaaaggaggcttccattccaagctatgtcaataagttcagaaaagggactggtagcggcagcggggactggtagaggtggccggaccaggcctcagggtgaggttcctggaatcacagccagcaaaagaggttaccttcctgtgtcacaaactaacatgcagaccacagtcatgtcatcatcttttccttctggggatcctattgcgatgtctaaaaatggtatctttattctgcccattttctaccaaggaaaagcgcttggttcaactgcaggtgttttgcaagggctcagcgactctgctagaagtcatcaggaaagctgtttgtttcccccagtaattctggactcagcgcatttgtctcaggctcctggtgatctgggacggcacattatttgatgtc

SEQ ID NO: 467993 - DNA, 702 bp, Homo sapiens
gccctgtgcgcctcatgaaatgaatgatcaaaagtaaattacagacttgcaaatgggtggttaacgactgagacaatatgagtgcagggagaagctcatcagaacacactgggcaagagcaggggagcggagtgctgaatacaaatgcttgccgcaaaaccgagcatcagcgcacacggcccccagcggagggacgggtcattccccacacctgtcaggggcgaggggagaacgtgcttgtggagccttctttcaaaggaggggtagaggaagagactgcatggagagaaagaacagcggagaggaaaaacaccaatgtcacggagcccccagctccctgggaagctgatgagaccagccctttcttccctagacagtgggctgctgctcatgccctgggaatttcaatgaaagctggagagctcaaatgtggggagtgttttactgggaaggaaggtgccaaggcagagccatgctaccatagaggaatgcgggccatatgtatttctaggggtgagcacccatgtagcaacctctccactactttgtgacagaatgagggatttagtgaaccattagagctggcttctccaaagaccaatcctactgcatactacagagctctatgcattctgtggaccgtggttaatcatgaaatgcgtacgtttgaacccttacgatgtaccaggtactctgctaggt

SEQ ID NO: 467994 - DNA, 582 bp, Homo sapiens
acatcaaagaccaaaggtagataaatccacgaaaatgaggaaaaaccagcccaaaatggctgaaaattccaaaaaccagaatgcctcttctcctgcaaaggatcacaactccttgcctgcaagggaacaaaactggatggagaatgagtttgatgaattgacagaagtaggcttcagaaggtgggtattaacaaattcctccaagctaaaggagcatgttgtaaccaaatgcaaggaagctaagaaccttgaaaaaaggttagaggaattgctaagtagaataaccagtttagagaagaatgtgaatgacctgatagagctgaaaaacacagcagaagaacttcacattgaaggtcaacttaatgaaataaagcatgaagacaagattagaaaaaaaagaatgaaaaagaaccaacaaatcctccaagaaatatgggactatgtgaaaagaccaagtctacgtctgattggtatacctgaaagtgatggggagaaaggaaccaagttggaaaacactcttcattatattatccaagagaacttgcccagcccagaaagacaggccaacattcaaatttagga

SEQ ID NO: 467995 - DNA, 1874 bp, Homo sapiens
agcagtagaaactgcaggccaggatgcggggggctgaagtcaagcagcagccctcccacctttgtatgaggaggttagccctgcttttcctgagggagcttaatgtcctccccaggcaattgccttgtaagacactgctgactctcctcagaaccgtcccaccacccttctttgcttctaggcctttagctagattcaagtcccagcaggcctcaaagggtgcaatgcaaggagacccaaaatgtcactgtggcccttcagtcagagtacaggcttatggagatcaggtgatcaatgaagttttagctaagtggggcctagaacaagagaaggctctgcgacaggtccaaactgacatgaaagctgccctgcaagttaggcccagtgatccatccgatccaatggttgttggggagtcaatgtcagacaaagatgttatctggagtgtttggctggcatatcacaatgttgactcaggactttatattaaagaaggaaagtggccagtcgtgcaattatataccaactcatgggctgtggccaatggtgaggctagatggtcaggggcttggctggaccatgattggaaagttggtgacaaagaggtgtgggaagaggcgtgaaaaagtgggcttcttcaaaattaagaacttttgttcttcaaaagataatgtaaagcaagccacaggctgggagaaggtactggtaaagcacttgcatctataatataaaaagaactttttcaactcagtagtaattttaaaaattcaataaaaacaggcagaagattataacacacatttcatcaaaaatatatatacaggtatcaataagcacattgtaagatgttcagcattgttattcattagaataatgcaaataaaaacacaattgcatattagaatgtttaaaataaaaaagaccatataaaaaaagccccataccaagtgtgtgaaaggctgtggagtaactgggaccctcatatactcctggagggaatataaaatggtataattactttagaaaacaggttatcagcctcttaaatagttcaacatatgcctatcacacaaccctatcatattactgataggtacaggtgaagtatcccttattcaaaatgcttgagaccagaagtgcttcggattttgaatttttttgaatgtttgaatatttgcatatacataataagaaatctttggagtaggactcaaatctaaatacaaaattcatttatgtttcatatacaccttatacacatagcctaaagtaattttacacaatattttcaataattataaacaaaaacaaaattttgactgtgttatgactaagacctgtcacgtgaggtcacatatggaattttccacttgtggcatcatgtcagtgctttgaaagttttggatttgggagtatttcagattttgaatttttgggttaggaatgcttaacctctattttcccaagagtaatgaaaggacatctccaaaggcttgcacagaaatgctcacaccagctttatttgtaataaacaaaaacaaaaaagtgagacaatattcatcaacaggtaaagaataaactcattatcatacatccatactatggaatactactcagctataaaaatataaactactgattcatacgacaacgtggatgcacctcaaaataattatgcatgctgagtgagagaagtcagacacgaaaaggccagctcaaaagtcatctcttctgtgcaactgttcctaattttctgccttcccatattttgacatattttgattatagcactttttacattgtgtcaatatccatctcttgcattagactgtgaattctttaagaagataaactatataaagaccatgtttgaa

SEQ ID NO: 467996 - DNA, 919 bp, Homo sapiens
aacaaggtgcaggggatggtgaaggctcagaaggttccagggtgagatggaggcagtggcagctgtttggataagacatgataggagcttggactacagtggtagccatagcaatgaagagttcggaagatgtttagaagtgcaggtctgcagcttgtggcaagccaaggatggaggagacgtggtcatgtgccacagccctgttttacagctgtgcaaatggccaccatatatggaggtggaagtcaaaactaaggtcacaggagatgaagatgatggacagtcctgtctcctgcaccaggtgatgaatggttctgtccccttcatcagtgagagctggtctagctgccagagcacagaacgacacagatacaatgtgatgtgtcaaccactcatgtttcttttttatgagatcaacatttataactctgcagtcagcccactgacagactgtaaaacttgccttattggaagcagacacatcaaccacaaggcaccacttgttgaaggctgattccagtcttccctggactggaatcattaactcaggcaggcacgtggtcagcacgtcccactcccatcagcctgctgggaatcagcattattgggaatgacgtcgtctgcccctctgcaactccccgaagagctaacttaattgttgggaaacatcggagaaaaagatgtcattcctctacatgagtggttctcaacatggggggaggagagggacttgtccctgaggggacatttggcaatgttgggaaacattttggttttcacaactatggaggaggagtaccagtggttaatactctaacgagagtgaccagggatgctgttaaacattgtatagtgtgcaagacagcagccttgctcccaccccaacaatggatgacccagctcaaaatattactagtgc

SEQ ID NO: 467997 - DNA, 731 bp, Homo sapiens
tcttgggtatttaccccagacaacgacaccacttcaattaggccatgggggctctgccccacttgattcatctgcacgctccatggagggcttggtttcagatgtaccatcatgctgatgtctataggcacatctcaggatcctttcagacagaggaatgggaaggtgatgatgtccaagcaaggaggatgtgtttttctccaactctgaagtcccactcaacaagagactatgaagtctccacagttcaggtgagggaagctgtgcagggtgggaggaggggaatgggaattcagcctgtgggctttggcatctttgccccagcccactctggcctaaacatgtatgttcttttgaaaggagagaagggaggtctccaacttccgctttataaaaacactgtgtgcctctcacccatcctgaatctcccaaaggcacatttcttgcactgtgaaaacctcctgggtgccacacacagggacacctctggaactcatctgtcctgaaggagattccccgacagagacgtaaggacatattttccttagaaaatactggaggtgaagggcttactgggtgtaaggcctaaggagaatcagcaagaatccgaaaaggaggctgaaaatctaagaacaattggaaaaaaccagtagccttaattactttactttgctttcatttttattcagttttcgttttattaaataattttccttccacacagatatgtg

SEQ ID NO: 467998 - DNA, 614 bp, Homo sapiens
cagactttctttatccaaaggccacacaatgatatgggtggaggtggctgtgcctagaaacaggcgattggcccatgttggagaggattctggatgccatccaagtcctggaggattcactgcagtgctcggtggccttggagcaaggccagctcagaaagtttcccaagcccaaattagccacagcctgggatccactcatgggaaggtgtcttggctaaagaaggccccccaggtggggatgaggaatagagaaaagcaggaaaaggagaggcaggagacaccacagacagaactcactcccttcaataccttgcccagggccagctctgattttgacctccagatgcttcctactttttctggctcctcatcacagttggtggtgattaagagcccaccactgggtgtacatgcagagaaaatgaggatcttgagagatagcgtcagtcccatgttcgttgccttatttgcaatagtcaagacatggagacaacctaaatctctgccaacgaatgaatggaaaaagtttggtctatagaagcatatttaatttacttgaggaatgaaatagaaaggaggcctgtgacccacgagtcctgccttcttcccac

SEQ ID NO: 467999 - DNA, 680 bp, Homo sapiens
cgccgggccttagctgccttcccacggggcagggctcaggacctgcagcccgccatgcctgagcctcccacccactccatgggctcctgtgtggcccgagcctccccgacgagcaccaccccctgctccacggtgcccagtcccatcgaccacccaagggctgaggaatgcgagtgcacggcgcaggactggcaggcagctccacctgcagccccactcaaggtttgtgatgcaccaatcgacactctgtatctagctgctctgctcaaggtttgtaaacacaccaatcagcaccctgtgtttagctcaaggtttgtgaatgcaccaatcgacactctggattgtaaacgcaccaatcagcaccctgacaaaacaggccactcggctctaccaatcagcaggatgtgggtggggccagataagaaaataaaagcaggctgccagagccagcattggcaacccgctcgggtccccttccacactgtggaagctttgtaatacagggagggatgttcagctccataaagcatagtaagatgtaccctgggagctgaagacacagctaactacatttttcctaagaaagcctgtgttctttgaggccttttgttctggaggtaaagcacaaaaatcagtgactcagggggacaaaaattgggctttttaatttctgttctgtc

SEQ ID NO: 468000 - DNA, 578 bp, Homo sapiens
aggacacagggtgtgacgatttggaggagacagaactctggaggttaatgctttactttgaaggaaaaaaaatcactctgaagcttaagagcaaaaggatatcctctctgcagtttgaaaggaaactggagacagagctttataaaaaatgcattagttgcaagccgagaagaaacccatctgaggtgcaaactatccccagaatggtgaaagccaccaaaatcactgggaaccctcactttagtggggagacgtttgctgcaggtggctgggggagcaggaaagagaccaacaacatcggcatcacctggaaatgtaatagaaatgcaatatctctagccccagctcagaccaacagctcagaggctctgggagtgggactggtgtgtttcatgatgccctccagtgagtgtgaagtggtacctcactgtggttgtgatttgcatctctctggtgattaataatgctgagcatctttttaaaatatatatttttacattttttatatttaattgacaaataacaattgtatataactatggggtatgatgcgacactttgatatatgtgtacattac

SEQ ID NO: 468001 - DNA, 666 bp, Homo sapiens
agaccagctctgagaaggcaggggcaactgaatttcccacacgtcatctgcaatgaactggaaagaagatggagatgagacatgtccctcggggaaggctttcatgggaagatgtggccgaatttaggcaccaaatggcttctgcttgccaccccgctgcacactctacagaaagaaggagaactgcacggatgcctccgatgtgggtttatctcttgcacatcagtggtggtggaagagcatggaggacgagaagactgcctaggccagcgtcctaaaactgtggacactgaaggcaatgttttgcacaccagtggttgtgacctttttgtctgttcagtcacggacaccgtaactgtgctcctgggaagtgtagctggcgatgctgaagagcctgactcacaggcaccagcccttgcctctgggatggaccagcccacccacccctggccttgcttttcagctggcaaacatgactctgtccccaaacttctcatagatacttactctcctttggctttctgtgttctttgagggaaaagtttgagaagccgtgtgatagctcattttgcacagctgtttcttgcttcatttcctggtatttctttgctctttttgaccctaactgcccatctcaagccctttgtgcctttttggctttcagta

SEQ ID NO: 468002 - DNA, 614 bp, Homo sapiens
gagatcttgggtgataccaaaggcggcacatccggaaggctggttatacctagcgtggaggggagagggagaactgtttcttcccttctgcaggatgctggcattccttggattatggccgcatcactccaatctctgcattgctctctctgtcttcacatcaccatctcctgttcctgtgtagcacacaggctgctgcaggcaaatgactttccagaagacaccacatcaaaaacactaaaagcaacacggaatggaattcagacaggtcagtgtttgcggatggggagaggggacatgcaggaagaggttgccaggtcggatgagaaggacctgctgtgtttcacatcagacaccacatcaaaaacactaaaagcaacacggaatggaattcagacaggtcagtgtttgcggatggggagaggggacatgcaggaagaggttgccaggggaagaagaaacaggcctcacctcttgatgagaagtggacgttttggaagaatttgtgggaatgagaagtattgcagtggccatttttggagtggggccacagatacacaaactctatatgtacaagtgtgtgcatctatagccccagtccaaaaataagctac

SEQ ID NO: 468003 - DNA, 538 bp, Homo sapiens
aacttcaaaccaggtctgtccatgattttatcaactaagttaatactgcctcaaggtagagatgaaaaacaagcagtattaaggggaaaaaacatgccagttgtgggcttgctgattttaacattagttcctattgtagcccccagagaaagggaaaatgagtacaaagtatgggcacctggtggccggggaggcagctgtggcccagctatgctagaaatcgacataaatccaatgcataagtttccaatgtttactaaggaatttccttggcatcaaaacctgtgggaaaaagaagaaagtaagagtggtcagaaggaaaagttcatctgtgatgtatgccctataacagtctcagctgaccacccgggaagatctggagcaagaacagcccttcagatacgtcttgccacggaccaagatgaacagcagtttttgttcaaatgttaatcttcccacatatctttgggggacccccctaaaaaaaaacctaagggagcattggtaacagaagctacctgatatggtttggatttgc

SEQ ID NO: 468004 - DNA, 704 bp, Homo sapiens
tccttaggacgtttgcaactgtgttggtttcgttctcaagtaggctcttcccacttggtggtaaaaatggctacgaaagctctagacttacatggtcctcatgaccattacaaagcctcaggcatttatagcaacacaaatgaactaaggaagacaactggtaccaaggagagggtggttgctataaagatacttgaaaatgtggaagtggctttggaactggatcaagggatcataaggacctttaaggatcattacacatggtcctctatgaaaaggactgtcaacactatggaagagaaccctgattcaacattacgaaaatctgaagaaaactgtccagatgttgtgcatgacttcacaggatttaacttaagttttgggggagtcaaaagttctataaaaaatggtttgcaaagtaataagcccacgttacatgggctttttctactatttgggggaaaaacagcttatctaagaaacaaaacaaaaacattactttagaaaaaaatctttagctctatttagagatctctgcaacgttcttttaatttctaaattattgcttttatacaatggaataaatacatattcatgtttgtttttcaacagtgtcacactccaaaatttttgcaaatactacaaaattctattattttgaagagatggcaaataggcaattataacatctgataatgtcaacc

SEQ ID NO: 468005 - DNA, 983 bp, Homo sapiens
ctgggactgggcacaaccaggcgcggtatggtgggacttgctgcaactgctgtggggaatgggggtgtggttcccaggccaatggagttgttcccataaccattatggctgcctctgctgcatcacacaggtcaccagggaattgggggaaagtcggcagtcacaggccccactcagctcttatgtaacccacagcccaaaagaaatctatggaactttgaacttgagagatgatttagggtatctggcagaagaaatttctaagaagcaaagcattcaagtggtgacagaaaataaaagtttagaaaatttgcagcctgatgatgcagtaggaaagaaaagcccattttctgggaagaaattcaagttggctgcagaaatttgcgtcagtaatgaggagccaaatgttaatcaccaagacaatggggaaaatgtctccagggcatgggccccctgctgtgtgcagcctctggagttggtgccctgcaccccagccactccagccatggctaaaaggggccaaggtacagttctggccattgcttccgagggtgcaagctccaagccttggcagcttccacatggtgttggttctcgtgacctggatgtgagacatggagtccaagaagatcattttggaactttaaggtttaatgactgccctattggatttcagacttgcatggggcctgtagcccctttgtttcgagcttacacagctgctgagtttagcggtagacctgaaattggacccagtcccttctctaccagcctggcctccagatggcagcacaagtctgagagtttcttctttatgtaagaaaggaacagtgttttgttgtggatcattttatacaccagacaatgaactgtcaatggaaatagatgtcagctgcattcaaatttctagtttatttgtttttatttttttaaaaattgtccttaagtgttccttcccttgtgagaacaccaaggccttattt

SEQ ID NO: 468006 - DNA, 584 bp, Homo sapiens
aataaggtgttcctgcttgaagatgtcaatgccctctgagtgtctccaagagaaggagacagtatgcagacttctttataggtatttaaacacagaattcttttgtcaatttctgtgctttgtagcaggtacttttgtaaatgctgatccagttgcaccctttcattttgcagctgaagactcagcagagaagcagaggctcagcttggcttcttccgggtctagtggggagccacaatgggctggccgctggcattcccaatccatgttggaggaatcaactgagctatgcttacaattagaagtcttctcattttgtccacaactgagaaggaggcagcatttaggctctgagcgaaaagatgagaagataccagcagggaagggttctgcaggcaaagagaccgtgtacaaagtcaccagcaagctcacattccttgtagcatttgattttcataacaattcagagaagcagcaaaggcaggtataagccccagttgatacctgctagggcagtggtcctttcagttcacagtgctgaggcttccaaatttttgtgacatggacagctggagaatagtctt

SEQ ID NO: 468007 - DNA, 706 bp, Homo sapiens
ccctgctgttctccccgtagatggcctggcctcttcccgccatgaccgtcctcaacttccctctcaaaagaatgtatcagctcagacttagcgtggagcaggacttggaacagctcaggtttattctgaggggtaaggatcagttgacgagggcccaggccagctggctccgagggcagacattctgccagcacacttctgtctggggtaatggaaagcagagacacctaatccccaaacttcatcttagacacaactgtagtttaaaacctccgccttcatcggagctgctggtgatccgtccgtgcggcgggcagcgatgccgctgcctctccttcccctcctttgtggatgtgcgacgtaatggaggagaaaccgtgcaacagggcctgcgtcatgaacagcctggacagccagcctcggatggaactgacggaatgcaggccgactccaggcgagagaaggcgaggaagcagattctcccccctggagcctcctacgggaaccagccctgccaaccccacgactttagcccagtgacagtgattgcgggcttctgacctccagagctgcaagagaatatgtgggtgctgtcagaggcaactaagttcaaataaccatttgtgaatgacaagtgttatttacatgttaacatgttaaatgttatttacaaataatatttgttatttggaaataacaaataacc

SEQ ID NO: 468008 - DNA, 544 bp, Homo sapiens
cgatcttgaggaacgttggctccctgagtcccctgaccccttcctccttcttatctctgcgtcttcatgcatgctaagcatggaatgtcctcaccgcgccttcccattcctagtaacccaaccttatcatctgtatagagacccccagccagccagagccttccagaaggtgcctttcaggaacccacagctctgccatcgttcctgtcctctgaatgtagttaaagttgggattcaaaacaccagggccctggggaagactgacacatgctgccacctggttagacagagatcagcaaactgcagctgtttctctctcgtgaaatcacaagaaatggtgctcaatcctggcaggcagaaaggaggtgagggggaacctggggccaggccgacggcttgggatgggcagagaaaggccatattggtgatattgaacaaatgctcattccataccaaggcagccagaaagggaggaaagacagtttctgccctcaaaagatttgcagtctagttgaagtatgaaaatcaaccctggcagtgtttc

SEQ ID NO: 468009 - DNA, 1236 bp, Homo sapiens
gttcatctgattttttttttttttattgtaagccatgaaaaaaggatgcttcaatgtttcctttcaggaagaagaactggaatttgattgtaggaagatctgtttcatggctgtgaccaacttcaggggatccacacaggtgggctgctgtcctgaagaaaagtgggagtgtgcttccccccctctgcaagatgaaaaccattgctgccttcattctgcttcagctaggtgccttagcgtgcccgctgatgttgaggaggggacaaaagccctccctggccaccttctgaggcagcagaggtgcctgcaagatggtagctttcctcttatggtttacgatcctccttcttcctacctggggccagcgagcaggctaaagaacgaaaatgagcggaatagtcagacgcacgttgatccggggtctgaagcaatctgcagcctcagagctatggcaaaatgcagagcgtttgactgaagtacttcgtgcagttggttggccaaacaaccaatgtggttgggaaaagaagctaaatttgatggacttgatcaattcataaaactgtttgcccatgtgtaatgggaaagggagttccaaccaatgctccagcgatctaaagatgacacagtccaacaccaactcaggtagaggtgacactatccaatgccagctcagcaatccaaaggtgacacagtccaacaccaactcagagtagaggtgacaatatccaatgccagctcagcaatacaaaggtgagactgttcaacaccaactcagggtagaggtgacactgtccaacagtgagcaaggtagaggtgacactgtccaacactgactcaggtagaggtgacactatttaacacaaactcaggtagaggttacactatacaatactgaccccagtagaggtgacacggtccaacaccaacccaggtagaggtgacactgtccaacactgacccatgtagaggtgatactgtccaacaccagtccagagagaggtgatactgtccggtgctgaactggtagaggtgacactgtccatcatgttaccgagccaggtagaagtgacgctgtctgacactgactctgtagaggtgatactgtctgtgactgatttgctgaaaatgacaacttcttccaaagcagcattttgagaagttaataataatgataatttttgatttccatcacaacttggctcttttttcactccctgtccttggtgtgaccgtgta

SEQ ID NO: 468010 - DNA, 736 bp, Homo sapiens
gataacgccatggagttaatgtttgtgggtggcgaatatggtggcaacataaaaccaacaccctttctgtgtttaatcttgaagatgcttcagattcaatccgagaaagtgaagaggaagaagaggaggatgagaagttggaaagagtgccatcacctgatcgcctccggagaagctacggagacttggacaagccccgtccatctcccacactgtgctacagaaggagtaggagtctgtctcccagaaggcggaatcgatctcccaaaagtagaagccccttctcccgccgagaaaggcatccgagcaagggtccaagacatcaccgcagcagatcccgagaccggcggcacagatcccgttccaagtccccagatcctcaccgtagtcacagacacaggagctactcaaaatctcccaaaaggtctaagaagagccacaagaagagccggagagggaatgaatggtaacacagacacagagaagcaaagccacttgctcagcgttccacagctcgttggtgtccaagtcaagcttagaattagggtgttggtgttctggccatactatatttctgcaatttttccccttcagcgtcacaattctggcctaatcttgtttcgtaatgttgaagcaattcttgtttaaaccaaaaggtattctgtttattacttaaagtgacatttgggtccccagcctttaaaaaaatttattttaagttctggggtacatgtgt

SEQ ID NO: 468011 - DNA, 855 bp, Homo sapiens
taagattctgtctgaaagaaagaaagaaagaaagaaagaaagaaagaaagaaagaaagaaagaaagcccaaacaaatcaaaatcttttttctctgctctggatcctctctctctcctgttgccatggaagacgtgactgcttctccttctgccatgattagaaattacaacggaaacgagaaatgttatgaaccagatgccgaaaaagtcccagtggcaagaatcagaagagggcacaaagaagccataggcttccactggagcgggcgggattcacacaaggtacacaacactttgtcaggcttgttagatgctgtgatgaggaagaaccaaggatctaagcccctcactctgtatgaaagatgccctgaacaagcacacgtttttgagaccaactcatcggaattgtcaaatccaggggaagagctccaaggtcctactcagatctggccagcccatggatctcctggtttcctaaagtgtcgcagagtcaaagatcagggctggtggctggatgtcccacagtcaccttgtttatggattgccactaacgcgggggaaattgactgcaagccggttcacttggattcctgctcttgtgtatcagccattgacacagctgttcagattccagttcaaaggtgttagaaggctgattttctccttctaaattatgtcttaaaatagtttaaaaatatttttcccttgtatggaatattttaggttactcttcaaagatctaaatttaaaatgtgatcattcttcagtgtttaaaacccttaacatgaaactgacataaatctctatttaattttattacaacattttggtaataggctctagtattatattaat

SEQ ID NO: 468012 - DNA, 535 bp, Homo sapiens
gccccgttactcagttcaagagcaaaataattgtcacctagttttgtgtgtagcagtgtgggttgggagattcgtggagggccatggttcccatcagtgcatggaagccttgtgaaaacacaaattgctgggccacaccaccggagtttctgatttaccagagaggattctccagcagatggcctttgaacttgaactggaacctgggctttcttgggtctgcagcctgccagcctttggactggaattggagctttggctctcctgggtctccagcctgtgctgtatgctgcagctttcagacttgccagcctccaagctgttcaaaggatgctcttggaggtattagtgagaaacatggattgatctctgacagagatggacagagctatccacaaatgataggagactcaataagtaatggttggaagacattaatcaagggcacagcctcctggacatgcagaaggaaatgctatggttttgcatgtgtggaagcaccgaaagcctaggacagttctctccaggatgctgt

SEQ ID NO: 468013 - DNA, 1627 bp, Homo sapiens
cttcagctatttgggaagattaccgatggaaagacttccaggtatgcttcacctggggatcaccagtgtttttcaggtcacaagctcatgtaggcaaataatcagagataaaaaccatctggaattaacgtccactgacttttcaaccacattctctgactaccaaccaatagatctgttaggttgctgcaacagtaactgcagttttaccattgaaagtaaaggcaaaaactgcaactacatttgcatcaacctcatagcctctcagagaagagaaaccagggagatgactggacaaccagcagctcttctctcttcctgtgttttctggaagatcttgtacctcacctgtcatctccaagcattgggcataaccacgctgccttcactcacagcgatgtcaggggagcccacagctacaccagatgatcaaactctcagagatagagatagtacagaggtgattcagatagcagatgagtggttggactcgcagacacttaccatccaattctgattcggtaactcctgaaattgattaagaaaacaattgtcagtgacagaatttattcacacggagtcagctctactttatcgctgaataaggaagggaatagcttaaggaagctgggaaatagcccaaaacaaacgtcaaattccctgtccttccaggaagaggaacagaagaacaggaggtgctgtggagttgggagactgagactgtcaggagcgaggagggatggctgtaattttaaatagtggcatcatcaggatgaaccttgctgaactgaagccccttccatgacactaaagtaagaagataattctggtcatttcatccaagcccttcagattggcaggtgtttggttcaaacatatattcaggacatgacttattttgatatttgaggagccctcttctctccatcccctccggaaaaaaaaaaagttgattttccttgtgattcttctggaactccgaggcaacctgttttcccaagaacagggcaccgaggtggtcgcaagggtgcggagggaggatcgcccctgtgggagaggcgcgccggtctctctcagggacctgtagctacacgcagaagatgctgccaattgcgcggaggtctctgacgcttggtgctgaggacattgtactaatttaaatggtatcagagtgaacacgatgctacatgtagaatgaaacttcccaagccctcacctgaagagacaaggctgaagtcataaacatcatacgtggaaaagtattgcaaacctgcttctcttctgtgctggggtctgtaccaatgttcattgaaccaaacaaggtccctatcttacagaagatgcttcttgaaggatggcgtgttaatcttctaagtatgttctggttgcgaggatagagcactgtcacagctacagctatacctgtgcaaagccaggaataacacgctccctaggagagtctctagccttaatctgtagctgcaaatagaaatgacaattcattttctcaataatgaaatgtttttgggtagggctaaaagcagaatgaaccaccaaaaagccccttttgacatggtgcctgtgtaaagacaaacgtgtgtaatgtgtctgcttcttttaaggtgct

SEQ ID NO: 468014 - DNA, 606 bp, Homo sapiens
tctgctagtcacatgatgttatgcaacttactctacctccctgagcctcagtgttcccatctgagaaatgggaataatagtgtccacatcatgaggttaccggagcaagcccagggagtgggttcccacaaagagaacctggagatgactgggaagtggagacaaatctaccgcgctggattcttgaactactgctgctccaagcatgtaagaataatagatgaaatatggggaaaaaaggtaatctttgctcaaaagcacaatgaacatctccatggactactgaaaatgaacctgaaaaacaagatttttaagcaaatgaaaaaatctaaccctaagaaaaaagccaacaaaatcaaacaacaggaagaaaaatttaatacagataaaattaaaataataagattatctgacagatactttaaaatatgtttaagttgctcaaactaagaaataatatgtatataagaacaaaataaaggtgaaataggcagaaaaaaagggaacaggtgagtaatgaaaaagaaccaagtaggaatcttggcaaaaaaataaataaacaaaaaagagtattccacttttggcctcgatggattaacagagacc

SEQ ID NO: 468015 - DNA, 638 bp, Homo sapiens
aggcggctagacattgcctgacatcacctctctttggtatctaatggggacattggacttccagtttcacaccatagaatttattctcattttctccctttacatctttgcagcccatttctccagtggcaagaattctggtttcattatcctgaatgtgttgccttctttgattaatccctctgtatgtgaccaatgtccatgtcctccactaatccttccctcatcaaacactctcctctccgcttgggccccaaatcccccattccaggccacctgtcacctacgcatagatgctctcatcagctcgggaactcagcctccccacatatgccaggaccctcccagagagaggctggaccctctggtccacttattgctggtgcccccaagagatttgcatacgaggaaaagatcacaccctccaaattcagacaagcctgaacttgaaccttggcatgtgtgtgccctaagctaagtttcttcaccttcccaggcctcagtttcttcatctataatgtaaggccaagtcatgcataccttatatgggtgttgtgaaggttaagtgagtgtccttcgttattccataagccaatgtttgttgaatgtttgctgtggttaattttattgttttcaaa

SEQ ID NO: 468016 - DNA, 755 bp, Homo sapiens
gaaatatggccagaagtctgggcacagggatatgatttccacatggccaacagggaaactgaagcacagacagagccattatgcccatggttctgcagcacaggtgacagatctgggaccagttgctgatttccaggctggggctctctcactagtgccttcaggtgagtggttctcctctgctgaaataccttcatccttcctcttcgtgaacccaaatccacctcagtctgcagacaccttccaagtcactttcctacctgaccccacttcaccccaccaggactgtgactcaaccacgctgaccaagagtctacgatggggccagtcattgtttctagggtcttctaccttcctcatctcatttcaacccacagaaaacatgtgaggcagattttttttcccccattttagagctgatataacccaggctcaggaaagttgagaactccagcttcttgactctccaggttttgtgctcttttcttttccccataactcaaggtgttttttccctcatcaatgtcttttcctttataaacattctagtatttctgtgtaccattcagaagaactgcaagaattttagatccagggttagtaacttgttttttgcatttcattgctttctcccaaaaatacttatactagatttagggattttgtattaaatatcttttaaattataaaagataatttaaaccagaaaatgtatcagcttacgttactgttaaataatgtagttttgtgtttaa

SEQ ID NO: 468017 - DNA, 671 bp, Homo sapiens
agcagtggaactgctgctcacaagttcggcttctcacgttcagctttggtggatactaccaaagagtgccctgaagggctttgatggttttacttcccaacagagataatgacaaaatgtcctcaaacagaaaatctgaaaacaaccagattaagattggaataagctctaccctagcatatttcttgccatatgaagtggtctgccagaatccaagcagggaacacagcgatcttactcatttgcatgctattgcccagaatgctctacagcatttctctctcttgacaccttctgaggaaagacctcatgccatcctgaatgaaagctttataagaaggtcagggtcatgggtgaaggcacctgctcccatgtgggagtggactgatctcttggctgaaatgaatgttgtagcagttaggctgttcccctgctacaagggccacagcagtataccactggtcagggaaagagaagttctccatactctcctgaatctcgagtcaattgagaaaccatagaccagtgtgttaaatggtatattaagaaaacatgtcccatttgttaagggatacaaaattacagctaaacaagaggaattagttctagtggtccatactactggagtatgactaaagttaataatacatagtttcaaatagctaggagga

SEQ ID NO: 468018 - DNA, 719 bp, Homo sapiens
tgtttgtcaatggggagaggtcaatgcttctggaccagaggctgggctctgccacatccccaacatggagcagctgctcacatggtacagttgaagtgacgaccccggagctgcccttgagccctttatcaccctggacttggccatggcagagctgtttgcctgggacgagctgggaagcctttggacctcggagtccccgattgccgcctcagctcagcattgtcacaaaaatagcccttcttggggaaggcagtgagaaactctttcacggcagactggctgttcacaaggcagatgtatttcaggagatgaagctgcagcccaaaccctttatggaaaaggagtcaaggttgaccggccaactgttggcgctccctggcttccacaactgtgtggagtcagaaactccaggccggggcccttctgaggaaggggaggaggagaaaccgccacaaccttctccatctcccgatgatcaagtcagatttatctggctttgcccaaagcgcctttctccacttatagatgaaagagagtacaggaaaaaaaatcacagagtaagtgtctggttatgaaaaaaaataataatccccccataaccgtacggtgctctaccaattacacagccctttgggaaccctattccaatggattctctcttaacaacactgtgagcaaggcaagcattgttcttcccacttcgtcgatgataacac

SEQ ID NO: 468019 - DNA, 530 bp, Homo sapiens
agacttcctcatcctttggctaagatatcagagccagaaggggagaagggacttctaacagtcgggggatgggatgtacagcaacagtggctgcccacgtctttgtctgcgtctctgtgttcagaagcagttaccagaacacaggtctgcagtatttggagggcaagtttccttttgttcattttggctcccacaagctgtatgccagttgctctgggaacgtgtgcataagttcctgccaaggggctgttaaacctgttcttccccaaggcagcctcagagcaaagtttgatttaattggctgtagcccgagaagcaaagaatctcacggagccaatctgagaacagccactaacactgggagcagtttgcacctccagtgggtgagtatgagaggtttttgggacatggatgaagctggaaaccatcattctcagcaaactaacacaggaacagaaaaccaaacatctcgtgttctcactcacaagtaggagttgaacaatgagaacacatggacacagggaggggaa

SEQ ID NO: 468020 - DNA, 835 bp, Homo sapiens
ccgttctcctcaatgaagacttctttgatcaaccatctcccttctttgaagcatgttttatgaactatttgggtagcactgaacagactgtgatcatgcctggacctgtcatatcccctttctcacaggggcagtagtaaagtgcagggggtacatgtgcacaatgtgcaggttagttacatatgtatacatgcaacatgctggtgcgctgcacccactaactcgtcatctaacattaggagagtgcaaaatccatggcatcacttatgcaggcgattatgcgcacaataagaggaatggcttgccacaaagagatcagggaaaattaggctttatggatccctggggtgctgcccgaatcccagctacaccattaactagttatgtgatcttggtagttatgggagattatatcaaggacagcaaacccaagctgggtgttcagggaaagcctctaggaggaagtgacatttcagttgaaacaaggttaaatggcattttccatttacaaatgatgctgcatgacttatttctcatgtttctgtggccaaaggcccgagggcccctggcaaaccactggtgtaggaccaatagcccaaaagctgaagaacttggagtcctataatagtttttcaactctttttgtggcctcaccttccctgagccctttaagctccctgttttggatttttgtttcattgagtaattgcttaagtttttcataaaaaattctgatactttctgagttgatgcatatttatagtattcatctttgaaaatggtgagttctccctggattcgctgttggtaggaattttatgtgatggaagagcta

SEQ ID NO: 468021 - DNA, 468 bp, Homo sapiens
tcatagagggagaagactaacaaagatattcaggacctaaacatgacatctgaccaaacggatctaacagacaactacagaactcttcactcaaatgcaacagaatatacattcttctcatctgcacatggcacgtactctaaaatcaaccacacgattggccataaaacaattctcagcaaattcaaaaaaccaaaatcataccaaccacactggaactacagcacaataaaaatagaaatcaatacaagaagactgctgaaaaccataaaagtacatggaaatataaaaacctgctcccgagtaactttcagaaaacctacaaaaatgaataaattcctgaaaacatacaaccttccaagattgaaccaggaagaaattggaaccctgaatggaccaataataccaaccagaaaaagtccaagaccagacagattctcagtctaattctaccaggtatataaagaa

SEQ ID NO: 468022 - DNA, 679 bp, Homo sapiens
ctgcactcccgtttctcaatgctgctttcagcttctacccttctgctgagacagccaatcaaagtctccctggcagccctgctcttcaaagggccctcacagctgtctccaggaagacccctttcccagaactactctcaaccctctcctcctgcttcctcaacaatgaatcaacacatctgggggcatcagggctttggcctggagataagcacgtgtgcttcacactcccaggccaagagaaggctgcagcatagaagtctgtaccccaaagctctctaccatctggacattggacctagggtagaagttcttgagtcccagagggcaggcttggggcatttgggcagagttccagggtccctgcacttggagcatggccagttgtggagaccctcttgcaggcatcaggccctgaagatgcctcctctgcagggacagtgtcacctgagcagggccaccatggagccctctaaagtagaggcctgggtccttcttgctcagatctcaggacagttctttttgctgtcgggtttcaataatctaggccaggatctaataagaaaaatagcaaacattattgagcactaagttgcagatgttttaagctctttgcacatgtgacccgatttattctcacaacaatttcatgagatggactatgatttatatcccttct

SEQ ID NO: 468023 - DNA, 491 bp, Homo sapiens
tcagtaaattatcaagtgcaggaatcaatgtctgtattacacacagaggaccccaaggcaggacctgccaaaagtcaggatcaagtgtccggtggtggaatgccaagtgtcagagggcagatccaaagtagaattttctgggaattcaaactccatggggcaggaatgggaatccccgggaggcggtctgctgaccatgagtttgctgttctttcatttccacattttggaatttctggaggaagtcttgctgtccaccgcagggctgaaggagctagaagctggcctgcaggctctgtcaacatctccaacttcacctgctattccacaataacgttttgcctgatgaataagcaaagacattacctgtggatcagtaactctcagcttgtggatccctgtgaggacagggatggggtttgaccacttctgttcttggcccatggaagatgccagtgattgctcataatattccctgatttccttttata

SEQ ID NO: 468024 - DNA, 606 bp, Homo sapiens
ccggctgcctctggaaaaaggggttggagcatccccctcagacatggcttccaaagaatcagcggacgtctctgataaatgctcgaccggggatgcccaaggtgtgcctgatactctagcagtaccctttgagaatgggatgagcagcttcttgctaaaagtacaagacgacccctctcaacagaaccaattgcattatccagacaatcacaccttcctacatgcctctcaggaccttcccatagaggaaagcagggataagatttattttttacaaagtctgcttctgttatggggatctggctttgacacacattacaagtatttgaccaggaaaattatccctaaatcactgcccagttcaccaagatttagacaaattcacgtggtcctcagtgaagtagcttcctccttactgtgctcagcagaatatcaagggtcatcgtagtggtaggtaagtagaaaaatcagagatgcagggctatatattttttctcccctcacttcctaaacatagctatttagctccaaatgtaaactcctctttttgttgttattcacgttctcactgaaaacgatcactacatattagcagtctcctcacac

SEQ ID NO: 468025 - DNA, 869 bp, Homo sapiens
aggtaggtagatggtaggtagataggtagacagatagatgtagatatattgatatacttataatcacgttgtaataatttatttatcaaccccatcccctagaatgcaaagtccttgagctccatggacaaggggaaggagtaaggcctggcttctctgggatgatagccacaatgccggagaagaaggaggaggcagagaagacagagaaggcaaagctggatggcaccaactgctcaaggactcggggcctcacctccttcgggccccacctggtgcttgtctggcttttggtttccatgaccccaaacaggaggcgcttccagtttgccccagtgctgaaggtaccccttgagcagtatgtggagaacaagccagaactttggggccacacccgttcaggtggtggtgatgcgagtgatgagaatggagatggtgctgaaggagaggatgatggcagcgggagtgacagttctgatggcgaggaggctactgaaaaggagataggagacaaggggctcagggatggatccttcagtccaaatgggagaggtggtttttgtttggggagaataatgctttcaaaaccccatgtaaccctgggcaggggttgaacggagtcttcctcacttggccctggctccccccaccacagccccacctggatccagggtcaggaaggaggccttaggtagagagaagcgtccccctgccctcatttccttgctcccattatccgtgttgcagccctcagggcctgtggcagctttctctgtaaacaatatctcccttcctcaggccaattaaataagcactataataaaggcaaaggcaaatgcaaagcactgggcagccctgtgtaaagggct

SEQ ID NO: 468026 - DNA, 792 bp, Homo sapiens
atagacagctttcatgagctgtttggcttacgaagggcatttccaagtattttcttggtattcaattaatttttgttctactttggttagcagttttataaaccagtcagtcctttcattacagttccaggaattctcacccagtctaaatgatatgattatgaagttgtcagaaacctgtattcaaaagtgcttttcagggtcttttccatcctttcctgaacttcctaaaatacatcatattataggcttttgtgtacttgtgtggagcccaggacaccagacagaagtccacataacatctgactctttccagcataatcagggggaatggctaactccatatgtccccaggcctcacctagaatctaatggctccaaagcagccacatgtactgtaaaggagcagacaagatggcactaatcaactagaaagcccatttgcataaaaacattagggtgggacgacagccttccccatgcactgtgacacaattggaaaaattggttattttatcaaggctttgactggaagggtatgcttccctttaaggagtcaacctgtacctgcagagctgataaaagccccatggggagaactggcctcataccttgtttacacagtcctaaatttccctagtgtgtgacaacaaaccccagggtacattgtcagggggtcctagactgttagaagttatgttaggtctcctcatgtgtgcatcaagagtggtaagaagacaaaatggagaaatacaattcggttgactgaaaataaaaaacaaaacttttttt

SEQ ID NO: 468027 - DNA, 578 bp, Homo sapiens
caaagatcaaagatagataaatccacaaagatgagggaaaaccattgcaaaaatgctgaaaattccaaaaaccagaatgcctcttctcctccaaatgattgcaactcttctccagcaagggcacaaaactggatggagaatgagattgacaaattgacagaagtaggcttcagaaggtgggtaataacaaactctgagctaaaggaggatgttctaacccaatgcaaggaagctaagaaccttgataaaagggagaatggaaccaagttggaaaacatacttcaggatattatccgggagaacttccctaacatagcaaaatgggccaatattcaaattcaggaaatacagaaaacaccactaagatactcctcaagaagagcaaccctaagatgcacaatcatcagattctccaaagttgaaacaaaggaaaaattattaagggcagccagagagaaaggtcaggttacctacaaagggagtcccatcagactaacagcagatctctctgcagaaaccctacaagccagaagagagtaggggctaatattcaacatttttaaagaaaaaaatttcaa

SEQ ID NO: 468028 - DNA, 552 bp, Homo sapiens
ggcatagaatagactcgaatgtaatggattgctatgtaattgattcgaatggaatggaatcgaatggaatgcaatccaatggaatggaatgcaatgcaatggaatggaatcgaatggaatgcagtggaagggaatggagtggaatcaagtggaatggaattgaatggaatggaattgaaaggaatggaatggaatcgaaaggaatggactggaatggaatggattcgaatggaatcgaatggaacaatatggaatggtaccgaatggaatggaatgcaatggaacggaatggaatggaagagaatggaatggaactgaatggaatggaatggaatggaaatggaatggagtgtaatggaataatatggaatggagtggaatggaatgcagtggacacaaatggaatggactggaatggaatggacacgaatggaatggactggagtggaatggacacgaatggaatggaagcgaatggaatggaatggaatggaatggaatggaatggaatggaatgaaatggaatggaatggaatgaaatggaatagaaag

SEQ ID NO: 468029 - DNA, 2857 bp, Homo sapiens
gactcgagtggaatggactggaatggaacggactcgaatggaatggactggaatggaatggattgaacggaatggactggagaggaatggactcgaatggaaaggaaacgagtggaatggaacggaatggaatggcttgaaatggataagaagtgaaaagaattacggaatggaatcgaatggaatggaatcgaatggattggaacgaaatcgaatggaacggaatagaatagactcgaatgtaatggattgctatgtaattgattcgaatggaatggaatcgaatggaatgcaatccaatggaatggaatgcaatgcaatggaatggaatcgaatggaatgcagtggaagggaatggagtggaatcaagtggaatggaatggaattgaaaggaatggaatggaatcgaatggaatggactagaatggaatggattcgaatggaatcgaatggaacaatatggaatggtaccgaatggaatggaatcgaaaggaatagaatggaatggatctatggaatggaatcgaatggaatggaatcgaatggattggaacgaaatcgaatggaacggattagaatagactcgaataatggaatggagtgtaatggaataatatggaatggagtggaatggaatgcagtggacacaaatggaatggactggaatggaatggacacgaatggaatggactggagtggaatggacacgaatggaatggaagcgaatggaatggaatggaatcaaatggaatggaatggaatggaatggaagggagtggactcaaatggaatgaaatcgagtggaatggaatcaaatggaatggaatggaatggaaatgaaagtaatagaatggaatggagtaatggaatggatcgttatggaaagacatcgaatggaatggaattgactcgaatggaatggactggaatggaacggactcgaatggaatggactggaatggaatggattgaacggaatggactggagaggaatggactcgaatggaaaggaaacgagtggaatggaatggaatggaatggcttgaaatggataagaaatgaaaagaattatggaatggaatcgaatggaatgggatcgaatggattggaacgaaatcgaatggaacggaatagaatagactcgaatgtaatggattgctatgtaattgattcgaatggaatggaatcgaatggaatgcaatccaatggaatggaatgcaatacaatggaatggaatcgaatggaatgcagtggaagggaatggagtggaatcaagtggaatggaatggaatggaatggaattgaaaggaatggaatggaatcgaatggaatggactggaatggaatggattcgaatggaatcgaatggaacaatatggaatggtaccgaatggaatggaatgcaatgcaacggaatggaatggaacagaatggaatggaactgaatggaatggaatggaatggaatggagtggacacaaatggaatgaaaccgagtggaatggaatcaaatggaatggaattgaatggaaattaaagtcatagaatggaatgtagtgtaatggaataatatggaatggagtggaatggaattcagtggacacaaatggaatggactggaatgcaatggacacgaatggaatagactggagtggaatggacacgaatggaatggaagcgaatggaatggaatggaatgaaatggaatggaatggaatgaaatggaatggaaaggaatagaatggaatggaatcagttggagtagaatggaatggaatggagattaatggaattgaatggagactaatggaatagaatcaaatggaatgtcatcgaatggaatggactcgaatggaatgtgctcgaatggaacggaatcgaatggattgacatcaaatggaatggaatggaagggaatggaatgtaatggaatggaaccaaatgtaatggacttgaatggaatggaatcatatagaatggactcaaaagcaatggtctcgaattgaatttatagatatagaatggaatccaatggaatgcaactgtatggaatggaatagaatggaatggaatcaaatggaatggaccagaatgcagtggactggaataaaacggactcaatagtaatggattgcaatgtaattgattcgatttcgaatggaatcgcatggaatgtaatcgaatggaatggaatggaaggcaatagagttgaatagaatggaatgcaatgaaatggaacgaagtggaatcgagtggaatggaatcgaatggagtgaaatggaatggaatggacgcgaaaggaatggactggaacaaaatgaaatcgaacggtaggaatcgtacagaacggacagaaatggaacggcatggaatgcactcgaatggaaaggagtccaatggaagggaatcgaatggaatgaaatagaatggaatggaatcgaaaggaatagaatggaatggatcattatggaaagacatcgaatggaatggaattgactcgagtggaatggactggaatggaacggactcgaatggaatggactggaagggaatggattgaacggaatggactggagaggaatggactcgaatggaaaggaaacgagtggaatggaatggaatggaatggcttgaaatggataagaaatgaaaagaatgtaatggaatcggatggaatggaattgaatgtattggagtcgagtagaacagaattgaatggaatggcatcaaatggaatggaaacgaaaggaatggaattgaatggactcaaatgttatggaatcaaagggaatggactcaaatagaatggactcaaaagaaatggtcttgaatggaacttattcgaatataatttaatc

SEQ ID NO: 468030 - DNA, 641 bp, Homo sapiens
gtgaagagaactcagagctaaaaataagggtgatgggtgtctgaaacgatacttagataatctcttcaaagaagcttgggagaaaaaagatgaggaaactgaggcaccaagccccttccactcatgttgacccggatgttgagatcttacacaattgtgagagaaactgggggaataaaggttggaaagggctcgttggaagatcggagtcgcaaaccggacaatctgagaagctgagcatgtccagccaccacagagggactgtgcgggaggagctggtggtagaggaatatatagggggttggtgcctctgtgggtctgcatggaagcttctggtgacagggctggagcagctgctcttcagcaggacccgccctcaggaggaggctgtggacaaaacctggaggacagccaggcagctggagtcagggacacttttgtgtcgtcattgcatcacattgccctggccttctgagaggaatggtggttgtttcctttctccctccaacatggtgtgcaaactcctctttggtgctcaaaatcacaaccataacatgaaggggttttcgtgaaatgttctggcttaagcaacttgatacggaataaatcacctcaagtttagagcctgaaatagcaacagc

SEQ ID NO: 468031 - DNA, 621 bp, Homo sapiens
ggcttgccaatcagctgactgcagcagcagcagcagcagcagcagcagcagtgatgcacagatctgatctgcgttggcaatatacttgtaattcggacatgcatctccaggacaccagccttagcaggaaggggagccaatcaaggggaaacaattatgcaaatttaaaatgtaaactctctggagcccctgccacaacctgctcagtactccccaaactgatctccaattctgtgaaaaatcacagccctgccttcatcttattgctcagcgtgctgctgctgagagttgctgcagaaggaaccctgatccggcagcttagctggatggatctctataagaatcatgatgtttccaaggcagcacatggtttggggaaattggagagaatactcccgatggaaagggataacatcacagctgccacaacaatgctatccagtgagcaaatgtcggatgttcagagggaccaagtcatcttgattagaatcgtggaggtatgagtttcaaagtggaataatctcatatttaataaatttgcaatctcttcacagtgcactggaaaagggaacatgcttaaaataattccagggacttggctcctgggcttattcagatatc

SEQ ID NO: 468032 - DNA, 626 bp, Homo sapiens
attgttttatgagtctatcacagattatgacggacatggaacatggaaaccagtttctaccaaagcctgtgaggaccattctgtacaaattgggagagagtgcacagaagcctggagagctgaccggggaggagggccacagtgcattgcgtccagccctcttccacccttgcactcttagctgctctcatccccgtctgctcacaccttgcttacaggaaactgaggctcaggggcaatcagataagaactggcatgtgaaagcatccagatttgggtatgtgtcttttaattccaagtctcttgttttctccactccactggagggaataattgtctctggggcagaacttcaagaaacatggggtgcctgggcacaggaaaaatcccctggtaagggagagggcacagaaaagggagatggggaaactcaaatcacatgtttttcctttactgctatttctggggctacatccagctggaacaaaaggacattgaggcagtcccaggtggaggcaatagacgacttccagcttctccctgcttgtcccgagccctttggccaatgcttcaaagtcagctgagcagaccgaagaccaatcacttctaactctctggaaagtgcc

SEQ ID NO: 468033 - DNA, 1256 bp, Homo sapiens
ggcatatgaagactgacgcagattggacttcttaagttcatgcagcattatgggtggtagcagagttgtgctgtggggaccaggactgggagttgtgtcaggtgagaaaggactgcagcgagtcacgcagctgcaagtcaaggaatgccagcagccaccagggctgaagcggcaaggaacgggttctcccctggagcctctggagggaggctggccctgccaacaccttgatctgcaacttctttccagcttccagaactgtgagagaagaagttctgttgttctaagccatcaacttgtggtaatttggtatagcagccataggaaaccctatgcaaacagtgaacttgatgtgtatgagcctgtggaggacacgtttctgcttctggacgtactccaggtagcggctgccgagctggcgggagtggaaatatgcctggaaataggggcaggatgtggtcaaatgtttgctaccaatattgaaggaaaagttgatcttctggtgtttaatcccctctatgtagtgactccacctgaagaggtaggaagtcatggaatagaggcagcttgggctgctggcagaaatggtcaggaagtcatgcacaggtttttcccccttgttccagatctcctttcaccaaaaggattattctatttagttaccattaaagaaaacaacccagaagacatttggaaaataatgaagacaaaaggtctgcaaggaaccactgcactttccagacaagcaggccaagaaactttcagtcctcaagttcaccaagttctagcatacaatgtgtgcccagtgctactggaaactgaatgcatttagcatatcttgaaactgaagtcattcattaggtaaaaaggaattttatcagaaatttgtcattaaaaaaaaggtagaaaggtggaacattccctttcactcaggcctatagaattatttgcacaagtataagtaaatatgtatcttatatttataatttgcattttaaatataaaagttatgtatgaaatatttatttcagcattatttagtaaggcaacagaattgatctggcaaatgtcttttttttcataccagtccataaaggcagtttgctttcagatggcagggccagcaatacaccttcattgttgtatctccggtgtatatcaactctccaactctatgtcataatttagttcatagagatcttgattgcctttcccttccacaaaatattacactgattggttatattaatgacatt

SEQ ID NO: 468034 - DNA, 464 bp, Homo sapiens
ccctgttcatgcctggctgtgcattctctgtagcagaagttccagagttatctgccgatggctgcaaatccacagacaggtttttcacaactcagagagaaactcacagatcagtggagagaaaaaatgtatataattacaaattttacaaatgatgttaagcgtgctgaagagaaagaacaaggttctatgagaaagttttataaagagaacaagttttatattgaaagatgtgtcaacagtgaccagaacgtcaaaggcctggccacagatggagcttactcattccaggcatgggatgtagacaagactgtccagagcttctgctacaaaaagcctctaaaaccacatggttccaaagtccatttctgttatttacaggcaaagaattctaaatgggacagtgctttttgctgatagtacatctaaaactgaagttcttaatctgaggtccagagacttgg

SEQ ID NO: 468035 - DNA, 791 bp, Homo sapiens
cggcaccaggtacagctgaaggaagagatcttgtactaaaaatatgggctccactgcaggtctgttggattttgctggaggtccactccagaccctgtttgcctttgtatcaccagtggaggctgcagaacagcaagtattgcagaacagcaaaaattgctgcctgatccttcgtatagaagcttcatcccagaggggcagccgcctatatgaggtgtctgtcagcccctactgggacgtctcgccttctgtgggctgcacgcactgtccacccactgtccaaccagtcccaatgagatgtaccaggtacctcagttgtaaatgcagaaatcacccgtcttctgcatcagtcacactgggagctgcagactggagctgttcctattcggccatcttggaacccaaagcccagactttttatcagagcaaaagtgtttggtttttacaactttcaatttaatttttccattcatggattgtgcttttcctgtcacatctaagaattctttgcctagctctaggtcccacagcttttatcctatgttttcaccctaaaagtttcatagttttacatttaagttcatgatccatttttgtataattaattttataatttattaattacaaaaaaagataatttttatagaaagttgctattaatttccttcttagcactgctttagcttggaaccagaagggtccctttttttttaagtgatttaatcgttttatttattttattgattctcttcaaggatcttcatttcattttattaaattttctggatttc

SEQ ID NO: 468036 - DNA, 517 bp, Homo sapiens
cggcaccaggtacagctgaaggaagagatcttgtactaaaaatatgggctccactgcaggtctgttggattttgctggaggtccactccagaccctgtttgcctttgtatcaccagtggaggctgcagaacagcaagtattgcagaacagcaaaaattgctgcctgatccttcgtatagaagcttcatcccagaggggcagccgcctatatgaggtgtctgtcagcccctactgggacgtgattgtgggctatcatctagcatctgggccaatgtctgacccttggtgggttctcagtgaattctgtggaacgaatgatgagccagtaaacaacatttgggaagtcaacgcatctgagctcctcttatttagcagaggtcttggtcatcagttgtcagcagtaaatatcaaaacaagtgtggttcattgcaaaccacaccttggtcctttggcattttgtttttcctttccttggcaggcaagggaggaaaacgtgtccatctgaattaagtacagc

SEQ ID NO: 468037 - DNA, 790 bp, Homo sapiens
gtaacccaatgtattgtgaatgggaatggaaaatggtacagccattttggaagacaatttttctgttcatcaaaaagttattaaagttactataagatccaacaattccactcctagtctctatctgctgcagataagaagccaactccaacaggtggaagagtaccataactctgagcaggaaagaatgaggaatgaaatctctgacctaacagaagagcttcatcagaaggagatcactatagcaactgtcacaaagaaagctgcccttctggaaaaacagttaaaaatggaattagaaataaaagaaaaaatgttagcaaaacaaaagagtatggacttcactaacagggaacagtcaaggcatacatctattaataaactgcaatatgagaatgaaaggctccgaaatgatcttgcaaaacttcatgtcaatggaaaatcaacctggactaatcaaaacacctatgaagaaacaggaagatatgcctatcaaagccaaataaaagtggaacaaaatgaagagagtacaggaaacaatgagcagttcatggaatagggagtttagtggagtgttggaaggtgaggctggaaaaagacttagtcatgactgtgagccaaacagaagtacaatgcctcccttgccaccttcgacatttcaagccaaagaaatgacaagtcctttggttagtgatgatgatgtattcccactggtgagttgctggttgtgggctttttttttctttaatgggttattgctttactcttacactgatgtcaataaactgac

SEQ ID NO: 468038 - DNA, 513 bp, Homo sapiens
atgaatttaatgcgcacccacatccctccgtccaggtcccatctgaattttataaaaccattatgctgtttcttgacaaattgagcttcatagatgaattatcagaagaagctgaaatagaagcccacgagggtgaaagtcagggatttccaaaaacaatcttggaagtcgaaagcaccgggtacttcagaatgaatgaaaaaagaaatccaggaccagacaaattcacagctgaattttcccagaggtaccagctcttctttggacatctggcagaatttggctgtgaatcctggtccagggatttttttgaaagacaatcttcaagctattttggctgtcagcgcctgcattgttttgtcatgatttttggcttccttgcattgggttatgacatgctgctttacctcagcaaaattcatttcatttttttaatctacactctgaagcctacttctgtcacttcagccatttcattctcaggccagttctgaacctttgctggagaggtat

SEQ ID NO: 468039 - DNA, 1930 bp, Homo sapiens
gatgtgataacagcaggatcttgagatgggggaatcatcatggattatggattttcactgcaaacgttaccgttctccatacctgctgacacagaaaattccctgtacatagttgcagaaaagtacaggaaagccctgctgggacacaggggaatgtccataactctgcctctggagagtggaagtgacctgcaaggactggttcccacggatgcatggtatgacacaacacccaacaagaatgagtacacctattacggctacaagagaaacaccccgaccaaggaatgcttcaccaccaccgtggcttttcttgcctcggtatttcctgaccaaggaatacttcactgcccctgtgatttttcttaccttggtcctgaccaagaaatacttcacctcctctgtggcttttcttaccttggtcccaaccaccaaggaaatactttgccgcttttgctacgtttgttacattggtctgtgcacagagttacctggtcaccacggtacatgaaaatcctttcccaagctgctggcctgtttcttcctgcgttgctgagtccgggtttatccatcacactgggtgggtctcaattccttacccctgaggccactgcaatgaggcaactgggtgcgcctcctcacgggagaggtctagaccctccccagaggagaatgggaattctggatgggcccccaaatttgtcagaaataaattttcagtgccacgaaagaaatagcattcgaacattaattttctcagcaaggcaattttacttctatagaagggtgtgtctcacgggtgaagcaatggcaagagcatctctaatatcctttatgtagcaccggtgatgagaaatttgagagggatagcaggaagctgggactcagagtacagtaagatcagcattgaatctgggctaaagttattcaagtagtgggataggagaagagtgaaaggaacgtctgattcagaatcaggacacctttttgttaacagtatgatcactggttagataatcacaaatgaaacgtaaagaaatactctatacagaaagtctgttagcttttctcaatctcgattttctcacctttacagtgggaataactaataatgctgacatttacccccagagttgttataaatgttcaatgagaaaatgcatataaaattgctttgtgaatcagttcaaagtcatgtacttccctaagagagacaggacagtaaaatgcatcaatttttaggatgggaatgatgaccacttaaaactgacaggcaaattgcagatgtacttggaatgggaaataccagctgacaacgaagtcaagcatttttaaaacaatgtacatgaagaatataaagcccacattaagaaaattgaaaagctcgtaaaagaaatgttctgtgaagaatgatggcatcaccctgaatttcatgttttattgcatctctaagtattcttacagactatttattttagttaatctctaccatcataaagatgaaagaataaagtgtataatcgtttggtgcttacttttcagtgaatattataatgctagattcatccatattttttgcatttcattgtagtttcattcagtccaactgctatattctgttgctgaatataacaatgttctattatatgaatattcatctatttttctcttaatggacacctgtactgcttcaaagtttcaatatgtgaacaatgctgctatatgaatattctttcatattgtcagcctaaataacaaacaagaagaggctctctaaaagaaaatatgtttgtttgggaatatagtattgcaatgggaatacgtatgtcatagtgaacaatgtgtatattcagggaggtaaaggaagacaaaggtttttaaagggaaaaaatgaggaagattacataactgttttgaaataattattctt

SEQ ID NO: 468040 - DNA, 597 bp, Homo sapiens
agccatgccaccatctccactcagatggattctaacaacagctttatcacgagcggcttaggcctgccctgtggagcatccctgtggggcactctggccagcttgagtgatgcggatcctgagagtgctcctaggtaggcaattgccccagtggaatgcctcaccagagcagtgcgtggcaggcccccatgaaggatcaatgcagtggctgaacaccaggaaggaactggcacttagagtccggacatctgaaacttgggaggaaacagcgttccttggagacctgaagggattcagtgagcttaagaattttcaagagcttatcaatcagtcagcccttgttcatccccgagtggatgtgtggtggtattgtggtggacctttactgggccctctgccgaataagtggagtggcacttatactttagtccaattggctatccctttcaccctggcatttcatcaaccagagggagaaaaaataagacatcataaagcgagagaagtcccttacgggtctttcgactctcacgtctatttagacgcaattggagtcccatggggaataccaggtcaatttacagcttgaaatcaaat

SEQ ID NO: 468041 - DNA, 649 bp, Homo sapiens
tctccgggtatggtttttccgactctcccctcttctcagtctggtggtcctcttcaactgccagaagttaatgcagatggtgaactgctccctttacctcgggtagctgacccccctactagtcctctttctgatgatgaagaagaattcgatctctccttgttttctccccaagaggaggaacctggtgatgatcccctccctccgcctcctatcatggaaactgtatatgttaactcttcttctactaagctgttgccccctctgccagaggaggacatgcggcattcttctgaatggtctgtttctcgttcctcttgtccttttggacctctccccttttctaagcccactgtttcttttgatgctccgggaccccttctttcagaggcttggaaccctgcttcccctcagtccgcatcccagcgccctcactctccttctcttcctctgtccctgcacaatggatgcgtgagtcacctgtttaggtagagcagtggccactgtccaaacacaagttggaggctttaattgaaattgttaatgatttactacaagcaaacactactgagccctcattgtcttcatggaactctcctgtgtttgttgtacaaaaaaagtcaggaaaatggaggatggtaacagactt

SEQ ID NO: 468042 - DNA, 1063 bp, Homo sapiens
atagtaggggtccagcaaagaacgtggcgctaatgatagctaagaaagaatcatctgacccaaaatgtcagtagtgttgctgtggagaaaccctgcattatatcctgaagataatgccacagaagtacagagatactcttccagctttggtggacagtctttcttaacccagaacaatagtgctttgaaacaccatggcagcccggtgacagagctggggagccttcagaggacaatgatccccccaggcaaagagaagactatcaaagagccactaaaggcggccatcctgggatggcacatgaggaactgggaaaaacccactaagatacctttggcctggtgtggccacagagcccttgacaaattctacctcatgtgcaccgaggagaagcattcctgccaccactgctgggaaagccgtggtaagtgtgagagaggcctggattggcaggggctggtgaggtggtcaggccctaagatagctcagcagacagagtaatgacttcctgatggcaataccaatgacatacaagtatgtactttggaaactcttagttcccacttcataaaaaggtcatgactctggagacacagagtgacttgaatactttagacaagaaaatctcttggcacccttcattaacttccttatcttggccctaccaaaaggtgcctcaaagttcacctaattctctaactaattctaaacagccctggagataagcctaactgtatactagccacaaataaaataaacaaaaacaggactcaaagagtgtgtacattcaaagtcttgtaatacatgtttccatattaacttgaaaaaaatgaatgcatgtcagtcacctggatttaaaactgtgaatcactgtgaccttagtacttagcatctagaactgctcctagcctatggtgtgaactctaaagatatttgtggaacaaacgctgttaaatgatttctcatctggttctaataaaattctaaagtaaaagtatcattgataatttttgttgttgtttttaacatgaatcagttttgtgctttggagatccagcatat

SEQ ID NO: 468043 - DNA, 527 bp, Homo sapiens
gacaaggaggtgattttgtgcacgatgaagacattgagagttgtgactgtgacagatggtggtccctctccaaaacagtcaaccatttgggtggtggttcaggttctagatgaaaatgacaacaagccccagttcccagagaaggtctaccagatcaagctgccagaacgtgaccgaaagaagagaggagaaccgatttacagggcttttgcatttgatagagatgagggccccaacgcagaaatctcctacagtattgtggatgggaatgatgacggaaagttctttattgaccctaaaactgggatggtttcttctagaaagcagtttacagcaggcagttatgacatcctaacggtaagatcttccaaactccagcagcacagcagatggggggaagtggttatgttcttattcaagtatactcctttgagcaataaatctttagagtaaaaagtgaagccacacagctgtggaagggttctttctgggaggcaagtgcaggtctgtcctttattattttaaac

SEQ ID NO: 468044 - DNA, 927 bp, Homo sapiens
ccaccatcacacaccaccatcacaccaccaccaccacatcacaccaccacatcacaccaccaccatcaccaccaccaccaccatcacaccaccaccatcacaccatcacaccaccaccaacaccactatcacaccaccaccatcaccaccaccatcacaccactatcacaccaccaccaccatcacaccaccatcacaccaccaccatcaccaccaccaccactaccaccatcaccaccaccaccatcaccaccaccaccaccaacaccatcaccaacaccatcacactaccatcatcaccaccaccatcacaccaccaccatcaccaccatcatcacaccaccaccatcaccactccttaaggtaatgacagggcttggtttcttacaacacctctctccttggcttgtacagacagctgtcttttccctctctcttcaaatggccttccctctgtacatatctgtgtccaaatttcctcttcttataaggacattagtcagccatattggattagggctcttcccagtgacctcattttcatttaatgacctctttaaagactcttctttccaaatccagtcacattctgagttactggaggttaggattttaacacatggattttggtggtgggaggtggtgcacaattcagcccataatacgtgctttgcagttactcctctgctgagtccaagctggtacccaccatgtggacacagcatcctctcagatgggcttggtcttggagctcagggcacagcccagcagcagagtgagccttgtccagagctgggtggatggggcaggccagagtatcgggctctgaggattagctgagggggtggtggatggacaaccagagtatgagagaaaacctgctcttcagatgcatagagactgatccttgaggctgggttaacttga

SEQ ID NO: 468045 - DNA, 997 bp, Homo sapiens
gggaacgctgttcacatgttttcacttgccctgataggaagaactactactgcagctgacacagtgtatggagaggtgggggacaaaatattacccaatctccacatcacttcctagtcatcgatgggaccccttttgcagttggtgcctcacctgcatttcctttgcccccggaggggctttgccaggccgtgttcttcaccaagggttagatctccaggagactcacaacttcctgggctccacaagttccctgtgcttgccaaaatcagagtgggttgtggggtatgtttgtgagtgttccggtggtgcagtagttcaagagcagaggatccccaggaaggagagttgcaccacggttacccaactggtatggagaagttctctgattgctactgatagtgctaccatggattgcaagggcagaggggcacccaacagtttagtagtcagcagcttggcagagggttccgggaggggagaagcactcccacctaccctttctgctgggctttgagtgtattaggggtcagtctagacttttgctgcttttttttctataccccagcttctttccatgggtgctctgatggatcctggctctcttctctccatcttctgtttaaaacttggccatgcactggtatctttgatctaatttctgaggagaaccagtatgtatgtccctagtctgctatgccatgttaaaaaaaaaaaagatataaccactttggaaaacattttggcagtatttaaaaaaatacacttcagcaatcatactccttggaattcatccaaataaattgaaaacgtatgtccacagaaaacatgcattagaatgtttctagaagctttattcataattgctaaagtgtcctttagttggtgagtggataaataaattgtagtacattcagacaatggaatattatttagcagtagcaagaaagctatcaagccaagaaaagaactggaggaaacttgatggcttatcact

SEQ ID NO: 468046 - DNA, 742 bp, Homo sapiens
atattctttgactacaccaacatgcaggtttgttatgatgtggagacaacatttaataaacaggatccgtgcaattggctggagctaacatatactgtcaatttctatagtgaagaagaaccggacaagactttggctttgttttggttgtcttctaccgtggtcaaggagtccaaggaaccacaaggttacgggtactcagtgtgcatgcctgcctttctagactatgctctgatcacccaggtctggaattctgccacgtgctccaaatacacttccaagtctcccgactgggagcggcaatggtcacctcactggatcaggagcacagcggacaccctgctggatccagagggatggaagtcagcagcgggcctgcaatggcagcaaatagcagtggtggatggcgagcaaaagctcagcttgagccgtaacaaacacggaccagaagagtgtgcagttgcaagatttaatagagtgaaaacagagctcccatacaaagggaggggacccaaaggaggtttgtcctctgctactgtttatggggagctgcctgttcctttggcagaacctcctgatgtctttcggccactatacctgtactgagcaggtatacctgtactgagcaggagatttctaagacaaaactcagatgtcatgtaattttacccataaatagttcaggaagtatttagaaaacattatgtaaagtaaaatttggaaaaaagtataaaccattatg

SEQ ID NO: 468047 - DNA, 789 bp, Homo sapiens
ctgactggtacagtgagggctactatggtgggaaaggccaattggaagccatcagaactgcctctacctagaaaaatggcccaccagaagctctttgccatcagctggcaaggccagcaatatgccattacagtcctccctcaggggtatatcaactctccagctttgcatcatagtttatttggaaagaccctgatcgctttttgcttctgtgagggatcagttgctgcatttggcctctcctacaaccaagaaagaggcacaacccctggtgggcctatttggatttttgaggcaacacattcctcatttgggtgtgataatatggcccgcttaatgaacaactactgtctttttgagaggcagctcttggcttgttattgggcttcggtggaaactgaatgtctgactatgggtcatcaagtcaccatgagacctgaactgcctgtcatgaactgggtgctttctgaccaatccagccataaagttgggagtgctctggagcattccatcatcaaatggaagtggtatatacatgactgggcttgagcaggtcctgaaggcacaaaaagtacaggtatgcagataaattaaaaacaattaaggtaaataaaagcaaactaaaccaaattataagacctattcgcagctgccaaagttaaattatctcttaatgttttggtttctgattaaatttacaaacttatgtatatatgcacacagataatgttacatatataagtatatgtaatgtatgtcatatattacatatttgtgcacatatgtgtg

SEQ ID NO: 468048 - DNA, 522 bp, Homo sapiens
acctgggaagtggaggttgcaatgagccgagatggtgccattgcaccacagtctgggcaacaaatattatattcttttgatgttattgcaaatggaattgctttcataattttgttttcatattgttcattgttaatatgtagaaacacaattttttattataatactttaagttctagggtacatgtgcacaatgtgcaggtttgttacatagatatagtattcctcattgataatttttttcttaccacttgcgatatatcatttcactaccttcggacctccaaggtttttgatggaaaatctgctcatgatggtattgagaattcttttcatgtgaagtcacttctgtcttgctgctttcaagattttgtgtttgcttttgtcattgaaaaactttattattttttaaataataataatagctacgattaaggctttacaaaatatcacaaattttttcatactctctccatatattacctcatctaatactataattctcttagaaagaaattatgt

SEQ ID NO: 468049 - DNA, 783 bp, Homo sapiens
tctggaactgcagctggctggcttcagctgtacccgggagcatggggctcccatcccaccaactcaggacatggtacaaaccgctggtggatttactattctgggatctggaggatggtggccctgatctcaatgctccactagaccgtgccccagtggggactctgtggggctccaaccccacatttctactctgcactgccctagtagatgttctcaatgtgggctccactcctgcagcagagttttgcttagacatccagggatttcctgcatcctctgaattgagagagaaggagtgccaccaggggaaatgccagatacttataaaaccatcagaattcatgagaactaatttactatcagagaaccgcatgggggaaaatgcccccatgattcaattacctccacctggtccttcccttgacacaaggaaattcttacaattcaagcattcttctgtgtccaaactgctgttaaatgtacacattatgatattaatttcagataaatcggaagattttaataactctaatttagcagaagctgaattaaaatagcattaaattggaaacgtataattctcctctgacataaggacattttaagcactgattagattttgccaacaggataatattttcaatgctacttcctttcacatggaaatatgcaaatatttcagcccaaatgttttcatggatactgaattttgccttcatgtaaaattccttttacatagattttcataagacaaaactcatcaaataagtactatttatg

SEQ ID NO: 468050 - DNA, 534 bp, Homo sapiens
cgaattaatgagagcagcaaaccaacatggcacggctggcccgggaagagtgtgacctatctcccaaccaagtcctgtgctcaaaggggccctgcagccaggaacacatgaaaaagaaatacagtcatagcgccagtgatcagagaagctctcccaaggcccaggagcaaactagtggaagacaatctcttaactcacacccgcagattacagctgtgaatgtgtggaagtacaaaatgattgagtacagcatggtcgagtacaaacctatgtgtcagcgattactcttaagcactgtccactggattgccaagtcagaatctggatggcaagaaagctcattgattccaaaaaatgttgaaacccagtccaagatatccaaggaattcagtaaaatgatccaagagctgaaagatgaaatgcacattttaagaaagagtcaaactaaacttctggaactgaaaaattcactgcaataattttataatacaattgaaagtattaacagcagaatagataagctaaggaaaaaaa

SEQ ID NO: 468051 - DNA, 1454 bp, Homo sapiens
tatacacatgccatggtggcttgctgcatccaccaacccatcatctatattagaaaaagcacatggagtactgggctgtcccttgtgtgctgtgatagtcagtgtaggactttcactcttgcagccgccgccaaattcctggatggccactcttcgtcctgctctgtttcaatcaccttgcaactggttgttaaaatgccctgctcactctgcttgagctctgaactccactgtcgacgactggcattgaagatgttcttttctgaggcagccttttcaccacattcaggcctttactttgaataccaggctgacacagttgccatcgcttcctcaaacagggtccatcttcactttaatacagctccaaacctcacccaacctgctgccttccctcctccatatggagagccaccatactcgacacccctaaggaataccttttagactgactttttcaggaaaagaggaaagaattaaggaaaaaaagaagatagcaaggtacagaaggaaggagggataggggaagaagatagtatgtttattttaaaaacattagcctagtcagttgctttaaacactcatgtaaacatttaagtcatattgaccaaagagctctgaagctaaaaataactacaatactctctcaagtacactgagtgtttattccatccattttccaaagaggtcctgaagtagtctctttgaatatttattctacatctccaataacacattaagatctgtaaaaaaatcttctttgtatccgtacaacctaacagagatacatcaaatacatgaagaagaagaaaaggagtacacagtattgttaagtagaaagaacactcaaacaatattatataaagttatttattgtgtcattgaacaagaaaatgtgaaaccacaaaaccactggaagggcagggatgtggtcacattctgacactatccataagcaaggattcaactgttgctgcatattttacctccattttcatatttccagctctcttcattttggcattaaatttttcttactaaagacaggttctttttcacatctcagaaaacctatattcctgaattattttttccatccaagaacccaaaccacaaagaagagaactcttaaactcattttctaatttgaaaaattaaaaggctaattgctccagctagattcaggtaattatttctgaccactgtggcctaggttttacaaacagattggcctctaaattaataagataaacaaagaaaacagaagttcccagaagaatacataggggtggatgcagaacaatcatttaaacctaaaagaccccaggacagaaagggatatctcatttccaaatgaggggcaaaaaataaagctctatgtaaacgtagaaggtgaagccaaacattaggttggaccactggacagaatcaatattttagctattattttctgc

SEQ ID NO: 468052 - DNA, 873 bp, Homo sapiens
ttatatcccgcgcctggctcggagggtcctacgcccacggagcctcactcactgccagcacagcagtctgagattgaactgcaaggtggcagtgaggctgggggaggagtgcctgccattgctgagccttgaataggtaaacaaagcggctgggaagctcgaactgggtggagcccagtgcagctcaaggaggcctgcctgtgtctgtagactccacctctgggggcaggacatagctgaaaaaaaggttgcagaaacttctgcagacttaaacgtccctgtctgacagctttgaagagagtactggttctcccagcagggagtttgagatctgagaacggacagactgcctcctcaagtgggtccccccaagtagcctaactgggaggcacctcccagtaggcgccaactgacacctcatatggccggatgcccctctgagacaaagcttccagaggaagaatcaggcagcaacatgtgccattctgcaatattcactgttctgcagcctccactggtggtgatacctaggcaaacagggtctcaagtggacctccagcaaactccaacagacctgcagttgagggtcctaactgttagaaggaaaactaaaaaacagaaaggacatccacaccaaaaccccatcttaataacaaacttctccaagctaaaggaggatgttcgaacccatcgcaaagaagctaaaaaccttgaaaaaagattagacgaatggctaactagaataaacagcatagagaagaccttaaacgacctgatggagctgaaaaccatggcacaagaactacgtgacacatgcacaagcttcagcagctgatttcatcaagtggaagaaagggtatcagtgattgaaga

SEQ ID NO: 468053 - DNA, 571 bp, Homo sapiens
ttccctatttaataaatgaagggtgcatctcacagatggagcaatggcaagagcacacctgaacaaagaaggagaagggggtcttatccctgatgcagcgcgagacaacgaacctcagttatttccccagacagacaacaccacttcattgtggggactcgcccaggatcagaatcagaacagaaggtatattcatcagaggggacctagccgtcgcgtggggctagaaaaggtcctgaagcaactgaagatttctcgccaggactacaccctggtgttatctgaaggcttctggactgaccccacctccaactgcccggctgggtgtccgcaacaggatctacagctgtcctatcgcaaaatttcctcatttcctatccgcaaaggccatctcatggttctgcaggcttggaagttcaaggacatggccaccctggcttctggtgagggtgtcataacatggcagacaaggtcaaaagagaagagaacaggtacaaagagagaaaacctgaagagcatctgggctttataacaacccactcttatgggaactaatccattcctgtgttgc

SEQ ID NO: 468054 - DNA, 650 bp, Homo sapiens
cagccagaggctctgatataataaagatgagctctgaagaggggctctctctccctcttgtattcagaagaactgaaagttttcataagtctctagagaagccaagaggctgtgctagccaaggggagaggcagggagggtcggcgctgaggtggtctccaggggcgtgcctgacggaggaggacctggcaacaagctcgggcatttcatttctgtgcatctccatatgccaacttgtctgccaggggcccgaattctgctggcagattgagtgcacgtgtttggcagcgactctgagctctaggaaagatttatgtcttcgtcctctggcactgcctagcgttagctcacttaaaacaactgaatatatgagttcactttatcctgtcaaagtagaacctagggcggcatggtacccagctggggtccacggggaccctgaggcaatgctcatgtctcagtcacttatgctgagctcagccatttttatgtctgtctgagatcattaaaatgaggagggaagggagcagaaagccctgtggaatgaatggtgtgatggaaacaccactagaatctagagggctccgccaaaaacatggatttaggggttcactttaaacgctgcatgtctcccatcgtcacccctccca

SEQ ID NO: 468055 - DNA, 544 bp, Homo sapiens
ctgccggggttgtgaatattaaataaaccctgactcatggagacatataccttgctttgctttgctgataggtggggtaacagacagcgttacgttactttagaagtgacagctctaacattctgcagacttctcaaaactgctctggctttttctgaacaaagaacaatccacaaaaacgcccatggtttgcaatgcataggagtctgtttacaggatcacagactcaggccctctcaaaagggaccgggtgagatcatccatttaatcaccttccacctccagagaattatttgctcatttggtaaacattacctcatccgcttcttcaccttcttcatcataaacatcatcatcaacttcaatagcttctccagtaaacaccggtaaacatactagatctaatcattacttggaactgttctacttctgaaatggtaaactctggttattaccaaagacttcttggttctttcttactcaatcctgtaacaacagctctttaatgtcatacatatctccttttctttaatttgtaattttt

SEQ ID NO: 468056 - DNA, 1320 bp, Homo sapiens
ctggctaggtcaaaaaggtttccttattagacaaacagtgcgggctgggggtggggggtgcattggtgtctaagcttagaaccgatagcttccagaaaaagaggcagagccagaggaaatacttcctgtggactttgattttcatggcagtatcaaaatgcgtgttttatatgtacatcagcaactagggatctatactcttcatatgtggtccacttcctggcccctttgtcaaggccaacgagagagtagagtttctgagcgttggactgttatcgaggcgctgaaccttgcactggctgttgtccggtttctctccaaaacctggttgagaccaccggtatttgaaaaagttggggcctgccctgatgtgcttactcacatgcactgtgacggttgtttttgtttgtttgttgccccagtgtatgcagctgtgctggtaattaagaacattctgtggttacgatggaggacaatcccatgtgacgcctttagcacagagaccagcatggagtcaaccctccatgcatactattactgcactggatctcccaacagtttaatgagccaggtggaagtgaggaaccaagacctgagtgtttatcctttggtagattgaaattttcaagcacatagtttaaagacaccaagagttctgcaagacttgataagaaacgcaacagccccctccatcactccccctctccccaccaattcttgctcctcaggactcccgcccccactcagctggccatttcccgagtataattagatcgtaattttcattagatcaacattcaatatttactttatcatgaatacataaacgctacccacagccaagtctgccaattttgcccctctcctttctagaagaatcttatatcgctcattcctgagtctttgaggcttctgagatataatgtaggatgttcctgtctgagttaggattgaactttctcaggcctgcttagacaggtccaacttattaatatggtacttgtcaaatgtgcttcctagcctccagaattgtgttgctcttatctcctttcccgtagtttttgaaacaggagtgtggagaccagtgaggcggctgacacggtcctctatgcaacatgtgacggtggcttccactaagctgtcactccccattcccactcccagccgtagacaactgctaatctattttctggaaatagaaggattctcatttccctatagatttgcctattttagatgtttcatacaaacagaatgatagagtatgtgctcctttgccactggcttctttgagttagtgtcatgtgtccaaggttcctt

SEQ ID NO: 468057 - DNA, 590 bp, Homo sapiens
aaatgcacatgtcttcccccagtctgtctctcctgtgccccacaatgcagtgcttgaatttcctcccactcagactcccagaaagtccactctatcctatgcaagctccacacccctccctccttatacatccaaggatgtcgggatggtgtggggggcagtcctgctcattcaaaactgggactcagctgcctgtccccagaggcagagaccgccacaaccgtcaccaaaggctgtttacttacctcagggacattctagccctgagcaaaatctgcatgtgtctgaactggaggtgggttggcaagtgcgtggaggtggtttggaacttctgtgggagcccagaaagtagctgccactgtcttctccattccccttccctgcctggtggtcgggtgtgcatcatttgctagaagcccacccagtggcctggaagcctggggacttggcctgcttgctggggagaatcttgctccactaagctgtatcttccacagtcctcagccctagtggaagtgtcttcagatttatatggtgctatttactggcgctctgccaattagtgacactttgaaattcccttatatgac

SEQ ID NO: 468058 - DNA, 682 bp, Homo sapiens
acacagacagctcacgtcttgatgtgtccagaggccctgggcctctctcagcctccagagctggtgggcccagctcctcctgggcagaggcctgagactctcaacgtgtccccaagcacaagcatgggaaaggccctgtgtcctaggcaaggtacttcagatttctgggcctctcctccaaaccatgatcatccaccatccttcagcccatggtcctcatcggaatcaaagggtgaccccagtggggccagcaaatgtcagtggagtttccccagcacagggctctgtgctgggcactgcggagacctgccgcctgatgaccccgtcatcctggggggccctgtgatcagcctgcgtgcgggggaccctctcaacctcacctgccacgcagacaatgccaagcctgcagcctccatcatctggttgcgaaagggagaggtcatcaatggggccacctactccaagacaacaaatctgcgttgatcttggacttcccggcctccagaacagtgagaaataaatgtctgtggtttataagccgcccagtttatatatcttgttatagcagcccagctgggctaagacagatgcccagttaaatttgagtttcagaaaaataataactttttaatgctccaccatctccaaggtgcctggctcaggggccagggagggctgaaat

SEQ ID NO: 468059 - DNA, 2298 bp, Homo sapiens
gaggtctggggcagcccccctcacccacagcagcctgcatcttctactctgcccccagctggccccgcctgggcaaacacatggtgacagggcagtcgctggcccagagctgcttcattcctacttctcccttccttcaaggctggttctgggtcccggaaccatcctttcctggttcaggctgggtgcaggccgtccagcaccacctctctgactcaaggctggaattagtggggagagagggaagctgcctctctatcctgtccttggtggggataaaatggaaaaggatccctcctcgggccctgggacccacctggggcatgttcaggcctgaaactgttttggggcgggccccgggcctgagggatgcgggtggcgtgggacggggagaagcgggaactcccagtggctttcccttgtttgcagagtgcagtgtgacccatcagcttgacttccgggccctctgtaccctggcccaagcctctcttgccctctgagccccagagatcctctacatgaacctccctctctgcgccctacctccagcaccctctgacctccctgcctgaccccaggtggttctgctttctccccaaagcctccctcgactgtctgtgttcctcatcatcctttctcagtatctgcactgctactaccccagcgctccagcccctagctgtttgcatctgcatagcccaggcaacagacatgtgaccccagcccctcctatgtctgattgcagagatccagaaccattcagctaagccaggctcagtttcttgacctgcagaaactgtgagagctaagaaatgattcctgtaattttaagccactgagcttggaggtgatttgttatgcagaaattgacaaccagacagattttgcagaactagccagtcaactttcaaaggtactttgtgctcggaacattgagaggcactgtgctgtttgcaaaatgctttctatacacgttcatctttctctttaccagaaccctgaacactgctgctaaaatcctacccattctaccaagggagagttcggtagttactgaagtcttgttactgaagtcttgtgaagtcatcccagattttctgagttgaaatgaacacttcctcagtattgtgcttatatattcgagggcttcttttatcctgcctgggatggtagtgagttgtttatgtcttctccctcctttggcagtaaactccttgagggcacagagggcattttgctatttctgcatcttcccattgggtctgatacaatgcttttgcacatcgtaagcatttaataaagatgtgaaggataaacgagtgaatgtattaatgggaagcttctacccactgactgcactatgatttcaatgtaaatgcttctgggaagccgacctctagttccccaggtccagatccttgaacctgtctttattattagatgctgttgggttgtcggattcaacccccacccacattgtgagctccctgaaggcaggtccatgtctggggtgggccaggtgaggggtggaaaacatcgataccagtgacttacatgcacccaggtgccaagtcaataaataagtgggaaataaagtatttgcaagaaaatagaatgcagtcgaaagatgcccctaggggatccaggcagggacgaatgggtttcatttgttgagggggaggggttctgattatgcagcactaggcaagtctccagtgtggtataaaaaacatttgggtagccctagctttacaactagttagctgggtggccatggggaaggaacccaacccttctgagccatagtttcctaaaaacaaagaggtggtttgctgtggactgaatgtttgtgatggcctccggctgcagttaatatattgcaactctaacctccattgtgatgatgtgggaggctccagacacagtctggagaaataaatgcttgttgtttaagccacccagtctatagtatttgttatagcagcctgagctaagacattggtctggattatcttaaattttaaactttaaacttttggggacttactgaatgactcctttgagaatgtgaaaccactccccagaaatgtgcacatatattctgaatattgcgtccaagctttgtagggataaaaggccccacaccaaaaaccttggcatcatctgtgacccctctctttctctcatagtaactgtccactatctctgctgctgctattccagcctgagtccctcatctcttctctgtattactgcaagagcctcttaacagaggctcttgtcttcccttgtcctctt

SEQ ID NO: 468060 - DNA, 862 bp, Homo sapiens
ctcgccaagggccttatgagccatgcgatgtggtttgagccaccctttcggtactgtggcgcctctgtggattccagctgtggtgtgttgatcagcaacgtttggggatcacgtggaggatggcagagagctctgtcccagctccttcttgcaatgcagcagagcccccaagacacgaaagctcacagacaggcagccagacacaggcagatggcccttcatcaaggaattggccctcgtcatcctggagcaggagtcaatgcagctgactcacaaaggtttcaggacaaggacacaccggtgtctctagaagtatttgctgagcctggagagacagcggtgtgtgtggctgtgaacgtgggtgtgcgaatcgacaccctgcttttaatgtttctggatgtctactcagaagtggaactgctgcatcagatgtggctatcgtaatgggtgtgaggtgatacctcactatcatttcgatttgcaaatctctgatgattagtgatgtttaacatctttccatatgcttcttggccatttgtaaatcatctttggagaaatgtctattcaagtccttttcccattttttttaaatctggttatttgattttttattgctgtatttatgtatttctcttcagtactataataaacattctttaaattaccaaacaaacaagaaaactagagtagcaacatcaatcttcaatgcatcctttctcttcctctacccaaagtaactaagcactttctcgaatcttatgttcatcattgacttgctttcccttttttcaaacaaagttttactactgctacatatattttttttaaaaaaagaagaattttcagtttggatttattttaa

SEQ ID NO: 468061 - DNA, 513 bp, Homo sapiens
cagcgcccctctagttcacagccgtctccacagctcttacccaggaccccccccccccatatgaccacatttaaccttaatcgcctcctaaaagccctagctccaaatacagtcacattggagatgtctgtggcaaaaactgacacttgcacggagcatgatttgatagcaatatctgcgaagtgtcagaaaggggaggggatcaatacccttaatttacttggaataattcattgcctaactggagttttcagaacaatcaagtctttggtgatgattcactcagtcctgggagaacacaagaaaatcactactcagggcttctctggaaaccagcatagggtatgtgcttatggagccagtttaaaaatttggaatgattctcatcatgtggaagggtttaacgcaagtctggagcaaaagcctcggtggccatgtcagtctgattcctggcataaaataaggtgtgctcagatgagattctgaataacatttcataaggtgactctttat

SEQ ID NO: 468062 - DNA, 617 bp, Homo sapiens
acccccttaatgttagctctttggggtgccacacgggggaaaaactgtgctgtattttccatttataatcaaatgcactcaattagtccctcttcttcccacctgcatgcccaggcagtaatggcaaagaggcaagctgaagaaatggaaatcagcctgccctggcatctgtcccccagtttatatcatccgctccatcatttcagttatcatctgtgtgctgagatatccccagtctacatctccagaccaaacttgtcttcaatgttccagactcaaatatccacaggcacatcaaattcaacatgttctcagctgtaccgatcagcaagcctgaaagaacaaaaagaagagaggaaagcaagaaggaaagaaagaactcgctttttcatccctcaccttagatcaggtccctgtaggtgaaagtttaccacacaaattcccctctgacttatttctggtcagcagggagctaggagagatgagcgattgtttagaagaggttaatgagcccatgggctggctgtttcagaccattgtttctcaccctttctttgtgcctctcatccttctgcctgggaacacttctcatgtaaatctttctagtccatgaaatg

SEQ ID NO: 468063 - DNA, 637 bp, Homo sapiens
aggacaaagctttgcagtatggacatatgaggaagtggtccttgaaagatgcggcctcagttgcatgctcaccacaaattcaaaataattttggaattaggctggaatactttaggcccaagcatataattcaccctgggtttggcagtgctggtaacccagaattttttggaaagttgtcagagaagatttgggtttggtgtgacagacacaacaagctgaagagggcagccagaaggggaggagctgcagagatgcaaccatccaccctgtggtttcccattctcgtgctctgtttcttgccagccttggacttctaccatagcactcagactgagcttagtgtctgtgatgaggtcaggaaggaatgcaaggtcagcagaggcgccatctactcctggaagacttccctggccttcctttctggaacaagtgctccaagtcccggagaatctgagcacactgtattgtaacctcttgctgacatgtctgtctctctggtcagaacgtgagttactcaaacagcaggtcttgtcattctgcttaagtttctctgtgcctagcggagagcatcaaagctaaaatgaagtcttcctctaagacctagtactgaaccttgagttcttgaaacgtcagg

SEQ ID NO: 468064 - DNA, 602 bp, Homo sapiens
acatctttgatactttctttaagtactcctccccatgtggccacataagttgaaaactacttttctccttgataacaccacttccttcctatatatcctttccaataacatgaagaagaagaggaagaaggaggagaggaagaagaagaagaagaagaagaagaagaagaagaagaagaagaagaagaagaagaagaagaagaagaagaagaagaagaagaaaaagaaaaagaagaagaagaaggggaggaggaggaagaggaagaaaaaggagaaaaaggagaagaaggaggaggagggggaggagggggaggagggggaagaagagaaggaggaggagggggaagaggagggggagggggaaggagaaagagaaggagaaatagaagaagaagaaatagaagaagcagcagaagcagcagcaagctatttttcactgagtacataacatatggtgggttttatgctactctcttttaataattattttaatcaatcatcacagcaatcccatgagacatctgctactacttgaatcccataccataatgtcctcaccgtcaacctagctccaggacattcacagcttctcccttgacatc

SEQ ID NO: 468065 - DNA, 834 bp, Homo sapiens
gcgtagtatctttaggttcatccaggaggcaccgactcccttcgtggagcactacttacagctgattccatgactgctggccacaccagggaagccaacacctcttccttccctgataattccagtcagtgctgcagtttggacttgactgttcataagaaacccaaacagaagtggctcctctgtggtcccctaccagcttggtatctcatgatagacactgcctatatctttgtgccttttctaatcttcattccctgggatttgaagagcttgggaatccaaggacactgctcaccagagtttccaagagcagcagcttctgtgggctccaggcctccggccttgggaatgagtgaacacggagccatggaggcaccaagctgtgctctcaggcagcttcctttcctcgccacagctgcctttgaaaggtgccaccttgcagaagaatctgacaagcccttgcacacagtgtggccttgtgtccccccagccagccatgctcccttccatcttcaagggttgtcttcttatgtgtgtggaaaccaagactcttctgcccagaagtcagctgacaccaaagctgcaaagaaaggggagccgctgcgcaggagaatagaatgtggagctgccgagggcatccatgagggaagagaggaaggaggaaagacagggaggttgaggaagggcaggagggcccatcctccagcgtttaacacacagacacgtcctccagatcttgagtaaattctactagcatccacggtgtgggtaatttcttatggaaacttgtaaagaagccaaactttgtacccagcagataagaggcaaaat

SEQ ID NO: 468066 - DNA, 577 bp, Homo sapiens
gaaaatgtgctaatgaaggaagccagacgcgaaaggtcacatattatacgattccgcttatctgaaatggtcagaacagagtggagcttccctgcagagtcaggcaggatgggaacggcagatgtcagccaaatggggctctgtttgagtcacatcctggtaaatgcgtgtcagaagcaggtgagcgatgttaaatttcacacaaacaacaatccagatgaaagggactgtgctgcacactggtggtacacatgccttgcgcacttccgctttagtggaataactaatgctgtcattcatgttgatgacctggctgaaaccctgacaccgaattcctgcaggaggtatacgattgcaatttgtccctttactaataaggttgacttcgatcactaggttgagatggtgtctctcagaggggaaaagttacttttcccttctttgtaattaatgaatattttatggaaagttactttgaggtattgtaagtatcctgttcatcatcaagctttccatttatttccctatttatttatatcagtatggattcatgggttcctgttttattcaacaagtt

SEQ ID NO: 468067 - DNA, 622 bp, Homo sapiens
gacccagagatggtcaccttgcccctccaacctagcaggaccatggggcaggtgggacggcagctcgccatcaccaggacgacatcaaccggcactatgacttcggagttccagaccatgctgcagcacctgcagcccacggcagagaacgcctacgagtacttcaccaagatcgcctccagcctgtttgagagtggcatcaaccggggccgtgtggtggctctcctgggcttcagctaccgtctggtcctacatgtctaccagcacggcttgactggcttcctgggcctggtgacccgcttcgtggtcttcatgctgcaacacggcatcgcccggtggatctcgcagaggggcggctgggtggcagccctggacttgggcaatagtcccatcctgaacgtgctggtggttgtgggtgtggttctgctgggccagtttgtggtgaaggccctcacccccatccctgggggccttgggccactccctatcctctgagtgtttggaaataaactgtgcaatcccatcaaaaaaaaaggagaaaaaaatgtaaaaaacattcttagctgtaagctacttatagggggataaagacaggactgttaatggacacaaacatacagtt

SEQ ID NO: 468068 - DNA, 1061 bp, Homo sapiens
ttaatcttccctgacggcttgatgagattcttagggagggggctgaagacaaaatgtcctctaactcctgtgaggcctacagatggaggctcaccctgctttactactcaccctacattatgaagggccacacaacccaaagtgttgacacctggtctgactatctgaaatccatccccaagccccacaaacagccatccctgggctatgccttagaaggcattcagcaacaaataaagtttcactggcttataaaaatcaggaattccactactactaccactactacaactaccagtactactactaccaatgatgtgaccacatatttagcacttacagaattccagagcccattgagtgtggatgatgggttaggagtgggggtacgagatggcagcgtggatgcttgtttatcaaggaggagttgtccgttgttcctggagctggtgaaaggaaagacgccagaatctgatggctggggtagcattgatgtgaggtaatggggtgtcctcgtaggtattaatatttttttcacaagtagaactgaagagtggagaaataaatatcaggtcatgcccatatccctaatgaccaacttttttttccacttgagaaaggttttttggcgggtcactttcagtttgtctcccaaacttgtcatattgtacacaaatcaccttgtatgggatggctataggtgaacactacatgttaactaacccatccattctcaatagggggtcgacttttccctctacgggacatttggcaatgtctggagatgtttttggttgtcacaaattgggcaagttgggggaaatgcagaggatggtattggtatttagtggtagaagctagggctgctgctagtcaatgtgcaagacagcccctcaaataattatttagctcaaaataccagtagtgccaaaggacacttgccattggatttagggcccaccaagataatctaggatgatctcatctcaagatccttaatttaattacatctgtaaatgcctttaactaaataaagtaacataggttcaacagatttgatg

SEQ ID NO: 468069 - DNA, 721 bp, Homo sapiens
ttcatgacttgccatggcatttgtaaactgcattggcgctgttgggagtgtagcagtgaggatgaccagaaagagagagagagagagagagagagagagagaagccagaaatctgactggtaagaaatgcttaccctttggccggcatgccaggcttctgaatggccctagtgatccgatgggccctgtcatctttaatccaacctctgacttggagtttcgacacgacacgtggtctctgggcaagatggctgccctgagtaatagaaaagataagaaagggaaaggagagagagaaaagcattgcctgtggcagtgtggggaaggcgaaatgctcagggggtatagtcgcttccttggtcgccagaaagacgttacaggaccccgacacttacccaaaggagagttcatggattttaacaactacaaagatgatcaacttgacatctctgaattctcagtgtcatttgctgtgacagagttactggaattggaaagatagagtggggtgcatacttgatttgtctacttgtattattttttgtgcaatctaatataatttatctggggagagaactaatgaggaggaggaaatgttgtatgaaaaggtgaaattcatgcaacctctctggaacagaggcctgatttgaatgttattaacatagctggacttccaggccttctgaaatggtctttcatttccatatgaatatcggaaaac

SEQ ID NO: 468070 - DNA, 627 bp, Homo sapiens
gcctcttcagagcctctttcagtgatatgaagttaaagccagccctattctcatcactgtggtgagtgcggccatgtcatgttatatgaacatgacttcccggcaggggacagaggaggagacactgccaaagacagggagatggtggtcgggtgtgcagagtcggggaatgaagtggttaactgtgtcaggtcagcatctttctaaaaagatgcctcctgcaaccaaaataaataaacccataagaagagcggaaagcagaccagagcctctgggagttggccctcacctgcagaagaaagcacagagattcttcctggggactgatggtcctcctgcacaaggtctaacactctgcatagccatcttgaaattcttaataatttttgaacaagatatcccacattctcagtttgcatcgggcccagcaaattatgcagccagtcctggtttagaaagacaaagagctgtcactttatacagtcccagacaccaggtctttgctgtgtcagaattgtatgaggagttaagaatataatttacattgtataaaccttcaaactgcacagatacatctgtttttgtttatttgttttgtttgcattttcatttcatgtcttgttcctg

SEQ ID NO: 468071 - DNA, 742 bp, Homo sapiens
cggcccagaactggtgggccccagagggtgtcaggaggagaggaaacgggtctagttatctatgtgcaacaagaaaatccccatagtcatagcaggagagaggcaagtgttaacagaaaaaatgaactccttgcatccaaggaacatctgctcagagaagccagtcaatattgtggaaaagttcaaagaatgtagatcattactagtgtcagctttacaaacaggagaagtcaagaacatttttacagaggaggctagcaaggagaaagttcagcgaaagacatttctggaagaagcagcagcacagaaaaacagagatgtgacaaatttgctcttctttcccagacctggatctcaggagttctcaaagctacaggctacccaagggccacgtttttcttcactctttgctggttccagtcctcatctccgggctttgcaaaacccagccctgctgatgaataaacatcgttgtgtctgtggcgccccatacactttggagacaatgttcagcttcaaagttttcagaattgcccagtccggttttgttaacgacattagtgggaccgcattgtcggggtgaggggtgagacaatggtgcatctcttacatcatcaaacacaaggagctctgtctccagctgtacaaacaacacaggaaatggattttttcttcgtgttattttttgtctattaaaattatgcaaacccagcaaatacaacaattgctttgttaagtctcc

SEQ ID NO: 468072 - DNA, 617 bp, Homo sapiens
ttcaagtgactgaggggctggggtggaaaaaggtctggcagagatggacagaagaatggaggagcttgataaatgttggagtttccctttcaaacatttggactctcggcaactggctgcttttgggtcccttttaccacttttatgcaatttgctgttaagagagagcaatgaaggggagaaaatcttgagtgcaggggaggaagcagtcaggattccagtgtggacaaagacactattatcggctaagagccttctaaaacctccatttaaatttaaaactagcgggcaaactcaactgttgaagtggaagaggaaagattgggtgggaggaaggcagattggtctaagcacagtgaaactcagacctgtgtttgaaggatgcgtaaagcatcctcttttccaggatgtgaaggagaaagcccagtcttctgctgtcagctatcttaagactatgcctgaagcccacctaatgataagttcacccacactgaagagcagggtggagaggtgtgtggagaaaagaggtgaagcctaaaccatctcatggcttatcaagtatgaaagccaacacattttctgcatatttaagctactttgaaatggattttctctta

SEQ ID NO: 468073 - DNA, 915 bp, Homo sapiens
gggcgcacacaaagtttcttttctgcttttgtctagacaatctctcccggaatggtggtggtagcacgtagcgtgtttataataattgctgctagcacagtcatatttgagaccccctcacacttggactgaaggtgccccatgaaatgtggagctgagaggggagctgaggagtgtctgaatgtgtcacctagataaggaagagggccagaagttggtgcctggaactgggaaaggaatccagggaatcccagagctaggaaaagcagcacaagaggaatggctgtcctttgaggagtcagcagcattcagacatgtgctacataatgtgaaggatgttgcatggcctgaaaagttaagtggcataagtcagaaaagggaggaacctggaggccaaatgctggcgaaggcttggagaaggaggaagagccacagatgggtgctgaataagggacaagtgaaaagcataagccccactttgtcaaagagctttcacatcacaagaaatctatgcaaacttggaactccatcaggaaatcagtctcccaaggcaatactgaatttcatcaatgtcatcagcatacagccagacatgagcctttctttgccaaacatgatttggtcatgctgatgctgcagcccaaacgggagggtctggaatgtcactgacaaacatgtgggttttcctcttggaggcgatgctcataccaccatagggtaacctcctgaaattgccatggcatttgtaaactgtcatggcactggtggcagtgtcttttagcatgctaattagcatataatgagcagtgaggacaaccagaggtcacttttatcgccatctttgttttggtgcgttttggctggcttctttacttcatcctgttatatcagcaaggtctttatgagctgtatccc

SEQ ID NO: 468074 - DNA, 667 bp, Homo sapiens
ggagatcttttcgaactttaaggtttaatgactgccttattggatgtcagacctacatgggacctattatatcattgagacaaatgcaaattatgagagctcagatcctggagcacaagacaaggtgatagacagctggaagaacaggcagctggatactaggagacccagggtaactaaaggagtagaatacggtgagctcttgaagaaaacagatgcaaggccccaggagggagaatgtaagcacctatgttggccagggagcctcttatggagtccctgctgggtcttaaaggtagatgaagtggactccaacctgggcaatggagcaagaccctgtctcaaggaggaggaggaggaaggaggaggaggaggagggagaagaagaaggagaaggagaaagaaaaaggaggaaggaggagaaagaaaaagaaagaagaaggaggaggaggaggaagaggaagaagaagaagaagaaagaggaggaggaggggagggggagggaggaagagggaggaggaggaggaggaaaggaggaggagaagaggaggaggaagaggaagaggaagaaggaggaagagaagaggaagaagaattggagaaataaatgaataccattgggaaagttgttgatgtgtcgtatgctgaaaatatcaaactctttttc

SEQ ID NO: 468075 - DNA, 817 bp, Homo sapiens
tcccttgcacttcccggccactgtgagggctggtagaggggcggtggttctcaggccaatggggttatgtttcagaggggattatggctgcctcttctgtgtcatatagttcaccagggaagtgggggatagctggtagtgaaaggtctcacccaacacccacgcagttggtgaggctggtcttgctcctgcagtgccccctgttcagatcttgcccaggtcataaagttcccactgagaaagaaaacatggctttcaggccttgccccctccctgtctgcccacattgtggtcagcagctcctgtgctcatatctgcagcagttcctggccaccccccagattttactcaagaaaatttgtgtccagttgaaattattacagatttcatttggaagcttggttcaccttgtgacccctccccagttctactcattgccttctttaaggatgcctataattataataagggatggcttccctggatttcagctggagattgggagtgcctagaaggctcttcctgctgctgcttctattttttattttgtgcagctccctaaatttgtttcagctctagatatgaaagtatagttggaaaataagcaaatatgtaaaagattattaatattatactgttaaattagcagctaacagtattgtgcttgtctaagagacacctgttgtatcttagagatcttaacagtccatggagaagcatcagtgagcctgtaaactgcctgaaattgcatgtaaattttgtgtgtgtatgcattttactggggaaagggtctatttttgcatcatattcccaaaga

SEQ ID NO: 468076 - DNA, 785 bp, Homo sapiens
tgcagctattctagggctgggagggaagaagctgtggtacccggcagtaagatgtgcgggaagtatgatagggggcgctgttacttagagggctgctctcacctgagtgctcaggtaaaaacccagctcattttgactgaagcaggcagaaaactagctgagagaatgctgccaatcaccagcatcctggatccagttgtagtcgcctatttgggagctgctgctggaagtaatgaagagctgagagaaattgctccttcactgaatgttagaaccaagcctctcatttcattatctccatggactgaaaatggctgtatttgtacattacacggaaggaaagagaagggactgtttttatgccaaaagtgctctgccgagccacagcgagggctgagggactcatactacagtgacacctgtaactcaggccctggcaggccagctgagaagcaccagggtgggttcttggtcttgctgacttcaagaatgaagctgcggaccttcgcggtgagtgtaacagctcttaaaggtgacatggacccaaagagtgagcagcagcaagatttattgtgaagagcgaaagaacaaagcttccacagcatggaaggggagctgagtgggttgctgctgctggctggggtggccagcttttatttccttatttgtccccacccacgtcctgctgattagttcattttacagattgctcattggttcattttacagagtgctgatggttgtgtttacaatcctttagctagacacggagcactgattgggac

SEQ ID NO: 468077 - DNA, 778 bp, Homo sapiens
aatagtattggtagttgaggtacatgcgtaggatggttacacgggtatgttggaccgaggtaatgagcatagtacccaattacacgggtatgttggaccgagctaccgcaagtgctcacacgggaagagcacaatctccaggagcttctgcagcaacttcgcattcttcagtaaggtgttctcctacagcacatgctgccttcagaatttcaagtaaacataccttgtatgatgggccgacatgcaatgcctcatttctgggaaagcagaaagcacctagagccttcctccattgtgatatcagtggaggtcaacagaacacagatcagagactaaatacaggaataattacaactttccttcattgccaaaagaaattggtaatatgcttgtttgactatagccctgggctcaacacagaggctcaagaactggatagtattctcatcaccttagagtttacaaagggagtttgcatcctcaatgtctttgttctcccattgagaaaatggagggagagctcccaggtaaaacagaagccctcctatacctttttgtatgtcttcccataggtactgagaggtaatgaacactaagccacatttttcatctcccatcttttacttgacactgtgtatccagttcctgttctagatgcaaagtctcactgaagtagcatgatgactacttgtattttctttctttccatccattcgctagatttgcaacctaaacccatataatctctgctgtgctctgaatgtttttgtccctccct

SEQ ID NO: 468078 - DNA, 1075 bp, Homo sapiens
tctttttggcttagcagctgaagactgacgctgcctgattgcctcggaagccccgtagaccatcatggacgctgagctttaggtaactctcacagttgaggcataattcttataaaaacacacgtgctctccctgccaatcgtgtctgactaatctctcaaaccccaaccccttccacaaaacaacaactcctttccttcctgggcatggttggatactttcacatttggatacctggttttgccatcctaacaaaaccattatataaactcacaaaaggaaacctagctgaccccatagatcctaaatcctttccccactcttttttccattccttgaagacagctttagagactgcccccaccccagctctccctgacttatcccaacccttttcattacacacagctgaagtgcagggctgtgctgtcggaattcttacacaagaaccgggattgtgtcctgtagcctttttgtccaaacaacttgaccttactgttttaggctggccatcatgtctccatgcagaggctgctgccgccctaatacttttagaggcccttaaaatcacaaactatgctcaactcactctctacagctctcataatttccaaaatctgttttcttcctcacacctgacgcatatactttctgctccccggctccttcagctgtactcactcttcgttgagtctcccacaattaccattgttcctggcccggacttcaatccggcctcccacattattcctgataccacacctgaccctcatgactgcatctctctgatccacctgacattcaccccatttccccacattcccttcttccctgtttctcactctgatcacacttggtttattgatggcagttccaccaggcctaatcgccacacaccagcaaagaaaggctatgctatagtacaagccactagcccgacctcttagaacctctcatttcctttccatcatggaaatctattctcaaggaaataacttctcagtgttccatctgctattctatgactcctcagggattattcaggccccctcccttccctacacatcaagctcac

SEQ ID NO: 468079 - DNA, 548 bp, Homo sapiens
cgccattctaactggtgcctcacactggtctatccctgtgaaggaatgcatcaccagactgctccatctggaccgtccaactggcaaacatgcctggctgtgtggacagactctccagtggacaatgtaacgtgtgagagcagctctctggggcttctgacccaatgggctgagcaggtgtgttcctcgtggaattttgaggtgaaatcagcctatagagctctgcactttggaggcaaacaaattgacccacagagaacaaagaaaggcagggagtgggggtggggcaacagcccatccagaagcaatacggagccaaaggaaccttccccccacagccaagggaagcgcccatgccaccagggctttgggtccaatacacaaagctatatggagtttcagcagagcagctgctcactaactccagtcccaggatctggcaaagtggaaaattcatctgtacatattcctaggaagagggctgaatccagggagccgaacagcacccctctgcaggccccacttccatggcacctcacaacttaata

SEQ ID NO: 468080 - DNA, 617 bp, Homo sapiens
tgttgtaaaaccatggcagacaattccatgggcacccaagggaatgacagactcagcaagccataatgagggctgtgactggaactggaaattcaagagccaaggatgttctctctatcactcaagagccccagaatctctttctttgctcctgattcctttctatttcaagagaaatcatgtcctgtctgaagctgtctctgagtccagggatccacggatatggagcactggacacgtgagcctgtggctcagcctgctcctgacttgcctcagggcctatcaggttacactctcatcctactcctgcatgtctgccttgcccaccacattctccaaagactgtgagctctgtaaagattatatgagccccatattaagtcctggaatttctgcagacccctggaaaagtccatctgctctactgcctgcctctactattaactctccctcgttgatgcgtatggccgtcacctctctgtgccccatgcagtgtgggatgaaaagcactagcgatgctggtggtccccacggttagttaacaataggtctgaaacttcaattcatttctttttaattaaagcccagactccttcccttcccttctttcctgcccc

SEQ ID NO: 468081 - DNA, 680 bp, Homo sapiens
ccagactacacctacaccttcccagaccagcaccagctaatagtcttctccagttccttgtacacgtgatgagaaatggctcttgccaagagatctcagtttatatctcaaagagaatagattattctgagttggaatatcttagtctctattccaaacacaaggaagtgcagcagcctgttgaaagttcatatgattatctgaaggagaaggaagcagaagcagagataatgatacacattaccccagcaattgtgatttctactcacagtcaggaattccctatctatgaatatatttatgcaaacacagggtcatgtggtgtcatcaaagctctcacttctggggtccacacggggtcctccagcggattccgtcagcgtttgcttgtagtcttcatgcatgatgacctcagagtccagtgctttatgtttgcactgcatctctacccaggcaagctcattaccattcaaaatccctttgtgttacttcgggaaaaacagattagaattcaaaagtctctggttgttcattgactgttaacatacataaccatatagatataataatacttcagagagtgctgaaagtataatttggaataagtaaataaaacaaacaaaaagactttagacttgagcgaaatgcttgcttgcatgtagaaagggttatttattaaa

SEQ ID NO: 468082 - DNA, 992 bp, Homo sapiens
cgttcagatgtccctgacaccccatccttacccaacagtcgttgagacaccttatctctttccaccagatcctgaagcctgtgtgtttagttcccttctcatgtctctcaaattccggatcaacctgagtaaggccagttctttagcttttcattgctttgccaattactactttagtgcttaccaggtattcagaatcaagaatggggaaaactgtctccacctcctaatgcgaggagctgaaagaagtggccattctaaaccacaggggaatggcagagggaacattccaaacttagtgattagcaggaacaatgggtggtgcaatatttgtgaaactgcaagtaaatgtacgtggatgaatatagaatgcatcatatcctctggggagcagctctggacaatgggagatgtattggaaagcctccccctgcccatagatgttgtcataaactgtatgcaatggatcaacagcagctgtgaggaagattgagtcccttgtcagctgttggcagggagatctatgtctacttttcaagcctttaattttactcattgaaaaaaaatgtgctctggagagtgacagtcatgaacatagatggaacagaatattaaattacagaataaaatattgaaataagacaattattggataattagggcaaaaactcaatgtatttataactttcaggtaatcagagctaaaaaagcataatacaatcaaatcagtttttaacatatagatagtacctcttatttttgttatagtttccaataaaatctcccagtagcacaaattattgatagtaaaatcattgattagtgacagtagataaataactcgtaattttcatctgacagctatttgatacaaccatgcaggaatatcattttatcataagaatatcaaattatttgacatattaatagtaatataacatagtcatataataatataataggattaatttatcacaatacacttatgtctt

SEQ ID NO: 468083 - DNA, 849 bp, Homo sapiens
gcgcctgcctgtctgaatggtccccctcctgtggagctgcctgccagtcccgcgccatgcgctctcactcttcagcccttgggtggtggatgggactgggcgcgtggagcacggggcggcgctcattggagaggctccggccgcacaggagcccacggagtcgggggagtctcaggcatggtgggctgcaggtcccgagacctgccccgtgggaaggcagctaaggcccggcgagaacttgagcacagcagctgctggcccaggtgctaagcccggccggccggctgctccgagcgcggggtccgcccagcccacgcccacccggaactcacgctggcccgcaagcaccgcgcgcagccccggttcccgcctgcgcctctccctccacacctccccgcaagctgagggagccggctccggcctttgccagcccagaaaggggctcccagagtgcagcggcgggctgaagggctcctcaagtgccgccaaagtgggagcccaggcagaggaggcgcggagagccagcgagagctggcagcagagttgtcccggacagagaagcccaaaggtccagagtgccctgaacattctgcacagctacctctctgggctcggaccaactggcttctttcggtggctgtctggagatgtgctccttggagaccaaaactttgggatccgatacctaccctgattatatttccatgcacatatttgggggaaattaagttttcattagcaaagtcatttgaatgacctctgacatgctcagcatcctaatcatggtggagaatagtattactagattttgttctaggacttttatagttttgggttgtaaatttaaga

SEQ ID NO: 468084 - DNA, 658 bp, Homo sapiens
caccatccaactcaaactagaaacatttcaaaatctttcctcgcctgcaacccaagctgaagtcattctccccagaaataacaaaagttggaagagaagccggagacaggataggtgcaggaagcccacactttgagggcagcactcagacaccctctcctgtgtgcaggacgtgccgaatgttcaggtgcaatgagaatgagccatgcttggcttacgagggcaatctggcccatcaagtggccttcgcctctgggagtaacaaaaatgcacttcaaaatagcttctgtaatcaagctgcatgggtggagtactccccagctgactccaggaagattcttaatgtaaaaacagttcagtatggaaagcgtacttatgacagagctgttgcagaatgtgaaatcacccatgtgcctaagtgtctccctactacctggaacactagaccacatgcagcaggcccgcctccacaggtgaaggcctctgttcaattgaagaggagctttgacaccttggaaacagaggtggagccaagaggctggaaaagcctacctgtcactactgaattttcagaacacaactgtaaataccctctgggtttatttgggagaagaatgtgtattataaagtatagtttgtaaatcaaagcaaagcacat

SEQ ID NO: 468085 - DNA, 602 bp, Homo sapiens
aggaacttgggtgtagtgtgtttgtctacaattagggagctggaggagctcatggaaaaaagaggaagggtgggctggagctccagggaggctttgtggagtggagagggagaagaggaaccgaacaaagaaaagcaacagtctacctggaacatcagcattccaccatcaaaagctgttcttgaagagcagccccagtcccccattgttcccaagtcaggaaaatcagtcaaaacatttatcagaaatcggtatgaaccagccaagcgctgtgaagagctaatctgtgcagagctaataagaatgaacaaagtcaccacagactccgccatgggcatcgctgataaggatttgtcagaagaattgcagtgccgatcctgttcttccatcatcctggttgtcatcttcttttccagagactctaagttaattgaggccaagaatgaggcttttgtctcatggggtcttataactttagcatctaacacaatgcctcatgcttctcggtgctcaagaaatgcttagcaaatgaaattaataatgattcaagtcttggcaatacagatgaagtggaatatttgtttgtcactgcaaaagggacc

SEQ ID NO: 468086 - DNA, 1338 bp, Homo sapiens
gcctccacagagatggtaacaccagtcacatggatggataatcctatagaagtatatgttaatgatagtgtacgggtacctggccccacagatgatcgctgccctatcaaacctgaggaagaagggataatgataaatatttccactgggtatcgttatcctatttgcctagggagagcaccaggatgtttaatacatgcagtccaaaattggttggtagaagtacctactgtcagtcctaacggtagattcacttatcacatggtaagcgggatgtcactcaggccacgagtaaattatttacaggacttttcttatcaaagatcattaaaatttagacctaaaggaaaaccttgccccaaggaaattcccaaagaatcaaaaaatacagaagttttagtttgggaagaatgtgtggccaatagtgcggtgatattacaaaacaatgaattcggaactattatagattgggcacctcgaggtcaattcgatcacaattgctcaggacaaactcagttgtgtccaagtgcacaagtgagtccagctgttgatagcgacttaacagaaagtctagacaaacataagcataaaaaattacagtctttgtacccttgggaatggggagaaaaaggaatctctaccccaagaccaaaaataataagtcctgtttctggtcctgaacatccagaattatggaggcttattgtggcctcacaccacattagaatttggtctggaaatcaaacttcagaaacaagagatcgtaagccattttatactatcgacctaaattccagtctaacggttcctttacagagttgcgtaaagcccccttatatgctagttgtaggaaatatagttattaaaccagactcccaaactataacctgtgaaaattgtagattgtttacttgcattgattcaacttttaattggcagcagcgtattctgctggtgagagcaagagaaggcgtgtggatccctgtgtccatggacagaccgtgggaggcctcgccatccatccatattttgactgaagtattaaaaggcattttaaatagatccaaaagattcatttttactttaattgcagtgattatgggattaattgcagtcacagctacggctgctgtggcaggagttgcattgcactcttctgttcagtcggtaaactttgttaatgattggcaaaagaattctacaagattgtggaattcacaatctagtattgatcaaaaattggcaaatcaaattaatcatcttagacaaactcatttggataggagacagactcatgagcttagaacgtcgtttccagttacagtgtgactgcaatac

SEQ ID NO: 468087 - DNA, 1144 bp, Homo sapiens
cccctagagaaaaaacccaaccctgataaggatggtccagattatgagcccaacctctggatgtgggtaaatcccaacattgtgtatccccctggaaagctggaggtctcaggacgtaggaagagggaggacctgacaagcacactcccctcctctcagccaccccagaaggaggaagatgccagctgctcagaggccgcaggggtggaatcactgtcccagtcctccagcaagcggtctccccctcggaagcggtttgccttttcccccagcacctgggagctcacagaagaggaggaggctgaggaccaggaagacagctcctctatggctctcccatcccctcacaaaagggcccccctccagagtcggaggcttcggcaagccagcagccaggcggggaggctctggtcccggccccctctcaattacttccacctaattgccctggcattaagaaacagttccccctgtggcctcaacgtgcaacagatctacagtttcactcggtatgtgccgggggccctgcgaggagggggaagtgggggccagggccccgggctgatgccttccaatccatcccaggccctgggttgctgacctggtttccctatctgggtctgagaggacaagtatgttcccagttcccttttcccaggtgcatttgtgcccacattgtgcccacattttatggctttagttttttttttctttttaacaagttttcagtgttctttgggtatagttctcctttaaaacatacattcacttgggtcaggtaacagtttccccaccatcctctgaagatcagccagtctaaagtcaggtttccccaacggttcccacctgcttctgctaggactggactgcctggcacagctccctgcacccccaggggtgcagagaacccagttgagaaggattttccatttagctcagatagtcctgctcacaggagggtgaggaagggagtttcttgggccctttcccagtgttaggagaagtgcctaatgtctcaggacaggaattttcaagtggtgtccgtcctcaaccaagattcctcttacaggagctgcttggcctgattctgctttgttcatgctgtggtccaagccctgggccctcagagggagggagggttcag

SEQ ID NO: 468088 - DNA, 893 bp, Homo sapiens
ttgagtctactttgaagagcagttcacagccatgttcatgtgcaaggccttcctgcactggtacgtaggttggggcatggatgagatggagttgactgaggctgagagcaacgtgaaggacctgatgtctgagtcccaacaatatcaggatgctatgggcaagcaggagggagagtttggggagtgggccgaggaggaggtggcctggagcattctgttactgagtgaagggtggaagagtgtgactgacagacctggtgatgaaaagggactttactgtgtagcatcagggagtggtgtaagagatgtggttctgctgaatggaggtggtcagaggttctgggaggcccacctttgccaagataaagagcttcctcacaggactaagagcctgactggattgatgggattgactggaaaggagagagacttcctggctctaattgaggcctgttaccaaaaatttgctgaagagatcagatatttcccatgataaggaaaagataaagtacaaacgcagttgcttcttagttattcagagaaacttacatgggggtatctattacctgtagcatagtcaagacccagaagcaggtcaccgcattctcttagcaacccgaagtttgcccagagttaatattagagttaatgttacattttgtttggcaagtttgattatctttcaattttgtctagtttttaatttgtgtttttagctcatggaacataagaaggtaaatacaatgcaagcactaactatttgtaagattggtaagaacaggtgatagctgatgtgaagtttagagaggtactaaaatgagcagacatagcaagtgtgaaagccagggctaagccactgagaatatcaggagagaaacctttacatccccttc

SEQ ID NO: 468089 - DNA, 1424 bp, Homo sapiens
tcgccacactgacttccatgatggttgaactagtttacagtcccaccaacagtgtaaaagtagagtttccactaagccaatgcctagcagagcctggggcagagccaccccagaaaccccagaccagtggagccactgacttgcaatttcagcccagtatcgttattgacaccagactccaatgcgtaagagacgtggcttacggtgtacccagcaaagccatgatgatggggcctcctaaagccttgggagcccaatttctgtcccactatgtctggaaagcaggctatcaagtcaaaaaatgttattctagagtgtggaaatttaatgttgcttgtcctaatggatgcttagaggatagagaggacatatgtggcctcctgggaggagaagtcagcatggagcacactcctccaagtcagttgaggagcaatgaaggttcgtgagctgattagcagtcatttcctcacgttttctttctgtgcacctcagaggctgtgcttgttaggagcatcttttccctacaggggggttatggcactgtgaaaaattcgcactttgcagataattaaaataatacatgtttttctagctcaagatcaatgcttcatctcattcccttgaatagttacctgcataccaggattgggaaggcctgaaagaaaaagatctagctatttaaatagagattctttacagatgcacatttgctcccacaaaggatggctttgcaggaccatttcaaactatgacaaagaaacatgttttggggtaaaatattttgattttcttctttgtcatgttatgttatgccagagtcagattggaaaataagtcataatataaagatttcaataaaacccatctgatgagaatttatgatccacacacataacaactgtttctaaatgctagaaggttgagacaatttgaagaagagggctaaagtctcagacctagcaacctgtatgtctatacaaatctgaggcctgcatttgttattcctctgggcaacaaaatacacgcatacatctctgtatagatactttctggtgaagagaatcttaagtattccctatacaactatgaataatggagactgaaaatgtttatgctttattaaaatgtattttcataggaaagatgtataatcttctcttacaggaaatcccaattgttacaaacaagatataataacaacagatcaaatgcgaacgagtaaataatttacatttctaagtagcagagcctggaaatattcaggtttacattagaaatccttcaagatctcacatacggaaactgcataaattaccagtggctttgtagaagcggatgcatgatgccatgacagcattaaagacaaaagaggagtaagttggcctctactgctgaggtctgggtagaacaggagtattctcctg

SEQ ID NO: 468090 - DNA, 522 bp, Homo sapiens
gcggtgatgcctcactcaaattcacacgggcaggaaatggaaaagtacggaatgcaattcaggtcccctgactcctgctctaatactctgctccctgtacaaggaatggggcttcctgagagccgaactgtagtgattgtttctgctcttctggatctagccacccagtggagctactgggctctgggctggtactggggagtgtcttcagagtcctgtgatgtgatctgtcttcaggtcttgcagccacggatagtagcacctgctccagcggagcttccatcaagagatggaagcttcctgggagatttcttgaagtttgtcttccaacactctattgattattatggaaatatgttttactttgttaattatgacaataataaatgtgaagatttacaatctgttacactacttataacacctagtgctacctggaagatgtctgtgaagatgtaaataaagacatagctaatctctgaacatggcctctgtaatgaccaattattttctccatcatga

SEQ ID NO: 468091 - DNA, 1646 bp, Homo sapiens
gcccacagtcaatggtgaccggtctatgaagtagttcacgcaaatgcagcaaatgagctcattctggaagactcgcagggcatcagaatccatgtttctgaaaattaaaaaaaaaaaaagccaaatggcatctcgtgtcctgtccctggatggcttaacccaggaaaactcctggatccaagaggagtcagacaaaggaatggtggccttgtgcgtgctgatattctcacagatgagtgagtccgtgctgctgcacatgccccagcctgtgaatccagagttccctacagggcccatcacaggaccggtggacaggctcaaccacttccgaggccattggtccaacaaagacatcttgaggttactggaatgcatggagaataatcgcccatctgatgacaacagcacgtttagctcaactcagtcatacatggactggggaaaagtagcttttaaaaacttttctggtgaaatgtgcagactcaaatggttagagatttcttgcaacttgagaaaattcggcactttgaaagaattagtcctggaagctaagaaatgtgttaaaaagatgaacaaaagccaaaaatacaggaactgtccagactttccaaaaaggccccttactgcttataatcgcttcttcaaggagagttggccccagtactcccaaatgtaccctgggatgagaagccaggaactgaccaaaatcctgtcaaagaaatacagggaactcccagagcagatgaaacagaaatatattcaggatttccagaaggaaaagcaagaatttgaggaaaaacttgctcgattcagggaagaacaccctgatttagtccagaaggccaagaaatctagtgtctccaagaggactcaaaacaaagtgcaaaagaagtttcagaaaaatattgaagaagtgaggtctcttccaaaaacggatcgatttttcaagaaggtaaaatttcatggagagcctcagaaaccccccatgaatggataccacaagtttcaccaagattcctggtcaagtaaagagctgcaacatttgtcagtgagggagcgcatggtagagattggcagacgctggcagcgcatcccgcagagccagaaggatcattttaagagccaggctgaggaactgcagaagcaatacaaggtgaaattggatctctggctcaagactttgtcacctgaaaattatgctgcatacaaagaatcgacctatgctaagggtaagaatatggccatgacaggaggcccggaccccaggttgaaacaagcagatccacagtcctcatcagcaaagggtctgcaagaagggtttggggaggggcaagggctccaggctgcaggaacagattcatcacagactatttgggtaaactgtcatgtctccatggaaccagaagagaacaggaagaaagatagagaaaaggaagaaagcagtaactcttcagactgcagcagtggagaagaaatagaagttgataattcatgcaccagtgtcacattgttttaattttttggtttactaatatgtttgaaaatctacctaaagttagtgccttctcagtatacctttattctattaaacatttctggctattttcatactttgttctcatgaatattagcatcacagaactagt

SEQ ID NO: 468092 - DNA, 2191 bp, Homo sapiens
tttttgtctgagttttctgctctctgaaatatttccaggatttctgcataccctcaaggggactgatttggcacagatgcaaaagccccagccagtgaacccagagctcacttcatggtgcataactggagtcctagacatgctcaacaacttcagagtggataatgctctgagtacggaaatgactccttgctatataagcctttctgaggatgtgagatatgtgatatttggagatgaccatctcagtgctcccacggatccccagggagtggacagctttgctgtgtggggagcacaagcattcacctccggcaagcattactgggaggtggatgtgaccctctcctccaactggattctgggagtctgtcgagattccagaacagcagataccaatatcgttattgattctgatgaaagattttttttaatttcctcaaagaggagcaatcactatagtctctccaccaactctccacctttaattcagtatgtgcaaaggcctctgggtcgggttggggtgtttctggattatgataatggatctgtgagtttttttgatgtttctaaaggttctcttatctatggttttcctccttcctccttctcgtcccctctgaggcctttcttttgctttggttgtacatgaaaagttggtttcatgatgatttattgtgacctcccatatataaggcaaatactgtcctaagacactatgtgtgagagcctgtgagcgcactgtaacttcatggaatgtaattactttatggttataaatgggataaccaccttgaatgtatacattcattaattaagttattttaattaataaattattgtggaatctttactagaacatcaataatggctttttttgtacaagttttttgagattcattcacttactgtgaaagtcatgttctaatgtatttaattcagagattgttagtatatcacacttgagcagccatcagagctctcttctgcctgggcacttttatcacttccagaagaatcccaataccccttaacatttattctgcattcaccctcccccattccttcagaacacttaatctactttttatgtttttgcattcgggtaaataaaatcatacaacataagttctttttttaatctgatttatttttcagagagtatgttttcagtttgtgcacactgtaaaccatttgtcttacttgtatatttgaaccaggctggggtagaaaaatgaagtggtggatatctcatcttacaaagaataaagaagtgtgcttattttctttctaagtctgaccaagttaagttgacctcacagactttattatttctcaacatcctagttattaatcgcatttcagctcatacaaaagtttttcagtgctgggttgctctgctattacatcttctcaagtatattatatcagattataacattcagaaaactcttatacttattactaccagattgaaaagtccaagggggcaatggcagtatttgtcttctttgctaatatattaccattatcgaatgcgatttttagaatagattatacaataaataagatgaataaatggattaagtagaggagttagtatgtataaatattattctaacattgagaaacttttccaaaatgtacgtaacaaaataggatagaacatactaatgaatatctatcaaaagataagacataaattgattttcagattgatatcaaagataatactattatgttagggtttaaaataattgtagcataatttttatagggttgatttcaattgtcttaggttttttaatataaacctttgaaagatgaaggttcctatataagatgatggggtagaggagcaggacttagaatagtggagactggccttaaactgacatataaatttaattacttgctaagcataaagtggtataaaccttcctatgcagtagaaagaacaaaattagtttacactttaaataagaatccagatgatagagaatggaaaattctataatagaatgtaatagctacatctcctagggcaccggcttacctgctctaacaaagaccacaaatttgaaatgattcagaagatgcatttctctcacatgtttgtaccaatataggagttggtcaagaagaaaactgacatcttcaaccagtgaattttacctctgtgtgcaggaaa

SEQ ID NO: 468093 - DNA, 816 bp, Homo sapiens
tctacaactcagtgtctgagaggttttgtctgatttgattgtggtgtgtcgtcagctggtgaaggacctcggatgatggcccccaagaacaaccagactggggcctcagggaaatccagcagacaggggaacactcagatcagattggcccattttcatgagcaagatcacacagtcaccaaagaccaaaaccaccaagaggggcatgggcaattgcagcttgctggaggtgtagataaagcactcaggatctttgctccttcctcagtccaaggacagaaacggcagttccactgcagaggcagcgtcagagggctttttgtcgcccctgggagcgctacttccaataaattaggagccactgctactgggcgtgttcagccaggggacagggcagctctactgctggctcaagctaggggttctgcttgttgggaagcaggggttaagggctcacagagaggagagactgggatcctgttggtaggtggctgtggcatgctgttcgcttggatgaagccctccggtgccttgtttctttcccaggctgagtgcatcaggggcagaaccactcctgtggcagtggctgaggggctgtttattgcctctgggagcctctctccagggaaactcagagcctctaccagttgttgtgttcatccgtgggtggggcagctgttctgtggtcctgagcttgttgccctgcctggtgacgagttggggggtgggggttccagggaagaggagttggattcctctccatttggtggctgctgcatgggggtgccaggatagtgactaggccttttgttcttt

SEQ ID NO: 468094 - DNA, 521 bp, Homo sapiens
ggagggtatcactccgttggggggcatgagaagttggatccgattaatgaagcattttgtcccttggtggagggggtatgttttgctggggggaaagccacttgtctgggatgccgggattcctcagaactaccaggatgagaggctaagtctgctgctttgcagactgtggccacctcttcccctaggggttcaggcccaggtatattcaaattctgtccctgagcctctggctggagttattggagagactgcaaggaagccccacacactgaggaaagatgtgtcagggtatgactacactaccagtagaaagacaagaaaaccaaacagacaaaaatctgacaatagcaaatattatcaagaatatggagtaattcagattatcatattttttggtgtgtaaaatactacaaccactttgaaaaattcttctgcaggttttttaaaattaggttcaggtatacacatacaggtttgttatgtagtttgattgattgcaactttctgagctcaagcaa

SEQ ID NO: 468095 - DNA, 521 bp, Homo sapiens
agagccaattttctgtgctagcatggtaactcctgtcatttctatcccttcaatcctatggggagctctagagctggaacagccctatagaattgttctctatcaaggcaaggacctgcacctttttactgccccatcaatcacttattgcatgatgatggctttcccagcaaaagattcaaaattaatgcatcagcaggcactgcccttgaaaggtgaaaaatggagtcactcagtcctgaagtggtatttgggtggctctcttcaacatccactaccaacagggcatatcagaaatcttcacaacagtccctcccatcacaagcatggaggcctagggggaaaaaattgtttcatgggccaggtccaagctcgtcctgctgtgtacaacctagggacttggtgccctgcattccagtcactccagccatgactaaaaggggccaagataataggaaaatgttatatgaaagtataataaagcacatattaaaaacttaaagtccattagcatgtgcttt

SEQ ID NO: 468096 - DNA, 1070 bp, Homo sapiens
gataagaaatcccctagtgtggtagtagagcagcagcatgaaaatggacgaatacagtaaattggtaacagtagagtggggtgctgctgaaaagttacctgaaaatgtggaagcaactttggaactgggtaacaggcagagattgaaacagtttggagggcgtagaagacaggaaatgtgggaaagtttgaaacttcctagagacttgctgaatggctttgaccaaaaacctgacaatgatatggacaataaaatccagctgaagtggtctcagatggagatgaactttttgggagctgaagcaaaggtacagcttcggctgttgcttcagagggtggaagcccccaggccttggcagcttccatgtggtgttgaccctgcaggtgcacagaagtcaagaattgaggtttgggcacctctgcctagtcttcagaagatgtatgggaacccctggatgcccaggcagaagtttgctgcaggagtgaggccctcatggagaccctctgctagggcagtgcagaaggaaaatgtggggacagagcccccacacagagtccctactggggtaccacctagtggagctatgagaagaggactactgtcctccagaccccagaaaggtagatccactgacagcttgcccttgcacctggaaaagccaccagcactcaatgccaacccatgaaagcagccaggagggaggctgtaccctgcaaagccacagtggtagagctgcccaagaccatgatactttgacatttctagcttcttctatttgatattcaactccacttacttttctttaagatgtttatcatgtgtttgatttaatatttcctggttattttgtctctctgtaaatttatttttaaaaaaaaaaacccataagtaatatcagatgacatagcatactcctttcagggtggtaaacaaatacttttgttctttgtcttggagatacatcaaaccaggcctctgtcctaaacatccattaattcagtaaatacttttaagaactatattcaagatgaggtcagagagatcagttatttataacataagttgaatta

SEQ ID NO: 468097 - DNA, 773 bp, Homo sapiens
cgttcctgcctgacgactctgaagagagcagcggatctcccagcacagcattcgagctctaataagggtcagactgcctcctcaagtaggtccctgacccccatgtattctgattgagagacacctcccagaaggcaccaacgaacacctcatgcagaagagctccggctggcatctggtgggtgccccactgggacaaagcttccagaagaaggaacaggcagcaatctttgctgttctgcaggctctgccagtgatatccaggcaaacagggtttggagtagacctcaagcaaactccagcagacctgcagcagaaggtcctgactattagaagaaaaactaaaaaacaggaacagtatcaacatcaacaaaaaggatgtccactcagagaccccactggaaggtcaccaacttcaaagaccaaagcaacacaacaaaactggatggagaatgagtttgacaaattgacagaagtaggattcagaaggtgggtaataaactcctcagagctaaaggagcatgttctaacccaatgcaaggaagctaagaaccttgaaaaaaggttagacaaatcagtaaccacaataaccaatttagagaaggacataaatgacctgatggagctgaaatacacagcatgggaacttcatgaagcatacacaagtacagatagctgaatcaatcaagtgagaaaaaggatatcagagattggagatcactcagtgaaataaagagagaagacaagattagagaaaaaagagtgaaaagaac

SEQ ID NO: 468098 - DNA, 456 bp, Homo sapiens
tatcataagttagttatatgaactgcttgcttgcttggtggttgggagaaatccccatatttggtcaccgaaatcttatgtttgttaaagatgtatacatgtgccatgttgttgttggcggaataggaacagctccagtctacagctcccagcgtgagcgacgcagaagacgggtgatttctgcatttccaactgagtcagagaaaggtgacagacggcacctggaaaatctggtcactcacactctaatactgagcttttccaatggtcttagcaaacagcacaccaggagatcatatcctgtgccttgctcagatgctcctacgcccacggagcctcgcacattgctagcacagcagtctgagatcaaactgcaaggcggcagcgaggctgggggaggggcacccgccattgcccaggcttgagtaggtactgactttgattttgcctgcatca

SEQ ID NO: 468099 - DNA, 510 bp, Homo sapiens
aatttcacgtctcaccataaaaaatgatggcaagagaaaatgaggaagaaacaaaagtagaaagctgcgataaacccatcggatctcatgagacttattcatatcacaagaatagcacaagaaagaccagcccccatgattcaattacctccttctgggtcccttccacaacagcaggaattctaggagatagaattcaagttgagatttggatggggacacagccaaatcatatcattccacccctggcctctccaaaactcaattcttcacttctgtgcaactgcaggctcaacaccacatggaagcttgccccactctactggtaccaatttactgtattagtccgttttcatgctgctgataaagatatacctgagactggaaaaaaaaagaggtttaattggacttacacttccatgtgactggggaggtctcagaatcatggcaagaggtggaaagcacttcttacatggcagcagcaagagaaaatgaggaggaagcaaaagc

SEQ ID NO: 468100 - DNA, 1577 bp, Homo sapiens
tcccagccagcagcaccatgccggaggcgtgggcgggggatcgcggcaccagccaaatggcatctcgtgtcctgtccctggatggcttaacccaggaaaactcctggatccaagaggagtcagacaaaggaatggtggccttgtgcgtgctgatattctcacagatgagtgagtccgtgctgctgcacatgctccagcctgtgaatccagagctccctacagggcccatcacaggaccggtggacaggctcaaccacttccgaggccattggtccaacaaagacatcttgaggttactggaatgcatggagaataatcgcccatctgatgacaacagcacgtttagctcaactcagtcacacatggactggggaaaagtagcttttaaaaacttttctggtgaaatgtgcagactcaaatggttagagatttcttgcaacttgagaaaattcggcactttgaaagaattagtcctggaagctaagaaatgtgttaaaaagatgaacaaaagccaaaaatacaggaacggtccagactttccaaagaggccccttactgcttacaatcgcttcttcaaggagagttggccccagtactcccaaatgtaccctgggatgagaagccaggaactgaccaaaatcctgtcaaagaaatacagggaactcccagagcagatgaaacagaaatatattcaggatttccggaaggaaaagcaagaatttgaggaaaaacttgctcgattcagggaagaacaccctgatttagtccagaaggccaagaaatctagtgtctccaagaggactcaaaacaaagtgcaaaagaagtttcagaaaaatattgaagaagtgaggtctcttccaaaaacggatcgatttttcaagaaggtaaaatttcatggagagcctcagaaaccccccatgaatggataccacaagtttcaccaagattcctggtcaagtaaagagatgcaacatttgtcagtgagggagcgcatggtagagattggcagacgctggcagcgcatcccgcagagccagaaggatcattttaagagccaggctgaggagctgcagaagcaatacaaggtgaaattggatctctggctcaagactttgtcacctgaaaattatgctgcatacaaagaatcgacctatgctaagggtaagaatatggccatgacaggaggcccggaccccaggttgaaacaagcagatccacagtcctcatcagcaaagggtctgcaagaagggtttggggaggggcaagggctccaggctgcaggaacagattcatcacagactatttgggtaaactgtcatgtctccatggaaccagaagagaacaggaagaaagatagagaaaaggaagaaagcagtaactcttcagactgcagcagtggagaagaaatagaagttgataattcatgcaccagtgtcacattgttttaattttttggtttactaatatgtttgaaaatctacctaaagttagtgccttctcagtatacctttattctattaaacatttctggctattttcatacttcgttctcatgaatattagcatcacagaactag

SEQ ID NO: 468101 - DNA, 1165 bp, Homo sapiens
ccaggatctcacatttgcttaagcagcccccacaattggaaacatgaattctggaatcttacaggtctttcagggggaactcatctgccccctgtgcatgaactacttcatagacccggtcaccatagactgtgggcacagcttttgcaggccttgtttctacctcaactggcaagacatcccatttcttgtccagtgctctgaatgcacaaagtcaacagagcagataaacctcaaaaccaacattcatttgaagaagatggcttctcttgccagaaaagtcagtctctggctattcctgagctctgaggagcaaatgtgtggcactcacagggagacaaagaagatattctgtgaagtggacaggagcctgctctgtttgctgtgctccagctctcaggagcaccggtatcacagacaccgtcccattgagtgggctgctgaggaacaccggaagatgcctgcatttcatcatgaagaagaaaaacataatttggagatgctgaaaaagaaggggaaagaaatttttcatcgacttcatttaagtaaagccaaaatggctcataggatggagattttaagaggaatgtatgaggagctgaacgaaatgtgccataaaccagatgtggagctacttcagggcaaaggtccctcctactttatccaccagccacaaaactttgtggaatggtcaaggagtgagtccgtgctgctgcacatgccccagcctctgaatccagagctcagtgcagggcccatcactggactgagggacaggctcaaccaattccgagaatggtgaattatttaatgttaaatacaaaattgtgcatttctttagtgtattcatttgaactgctaagaactgttctttaggggaatatagttttctggagattcttgggggttttgtatttttttaatgtgtatatattattcatatattgcaaacatttgaattaataggcctatcttttgctgtattcacttctgaccagagacaaatcagaaatgtgttcacatgctgtgggaacccctttatcccaggaagtcctcttccttgtgccttaacatacaggacaaataggctctattttatgtcttgaattgccttctaatgttatcaaaactcatttattgtgttactattaaatatgctgaaaac

SEQ ID NO: 468102 - DNA, 587 bp, Homo sapiens
atccagaagagagagtagagaaacatggattcagacacactgcaaaccttccagagggagctctgttgctttatctgcaggaactacttaacggacacagtcaccattgactgtgggcatagcttttgcaggccctgcctttgtctacgctgggaggaaggccaagctccaaagggctgtcctgtgtgtgggaaaatcccccagaagactgacttcaacaccaatattgttctcaagaagttggcttctcttgcaaggcagcgcagacctcacaacatcaacagctcagagaagcagatctgtgtgctacatgaagaggaaaaggggctcttctgtgaggcagaggagagactcctctgtgggccctgctctgagtcacaagagcatgaggcttatggccacagcccaataggatgggctgctgaggagtgcagggtaagtgacacctccaatgcaaccgggaatccacatgatcctaaatgagagagaaaatgagagcttatgataataaaggtggagagaatggagatggtgaggttctgaattttcaatataaatctctagatataaatgtgtcctaggaacac

SEQ ID NO: 468103 - DNA, 513 bp, Homo sapiens
ctcctgctgtggtctcccagcaacatggaagagaagcccactttcctccctgacaccaccactgggcatgggattccacctgtctccatgagagaagatgggaaataccagtggggaagcagagaggctccccattctccagatttcagaccacaggcccctcaagggaagcatcctggacagcaaagccaggttccatcccaccccctggaagaggtggaagacacagaattgaagtttcgttatggtgatgtcactcaaggatttgaacactcgccaagcaatggtgattggatgctgccagtgctctcaacgagcactttccatggggagggcacgaagatgaaggacagaaccactgcagtcaaggtgctgcaagagtgtcaccattttaagtgtgcaattgagtgcgttgaggacttccacaacctgtaaccatcaccattatctactttcagtacctttccatcttcccaaactgagactgtctcaccatcaaacactaactcccca

SEQ ID NO: 468104 - DNA, 821 bp, Homo sapiens
aggaactgaggcctcctgcccatagacatggaaagttcaactggcttcccctttgaaatacacaaaggctgcacaggtaatgggcttgagccctggtgtttgaagtggcagtccttccagggaacatctggagggctgtgcccctgcacaacaaacgctcggagcacggctggccctcagaggctgcttgcgccaaacatcggggcaggttctgcttttttctttgattttgatgcgtcccaaattctaggatgctcacttgtgtctttctttggtgatggctgccagcccacgagcaagccggtcaaggcggtctctgatttcgacggccgaggaggggacctttcaggaaggggtggccgtaggcgagggttgatcgctgggcctggaatctgctcccacagggcctgtggggcctcacggggctgctgctggcttcagcctctgggtgctgggctggcagggaagattcacctttctcggaaggtgtgaacatgacaaggcgctcgcagttcgtttcttttggtggcagcttagatgtgtaagcagagatatgcgtcccttctaattttgtcatgagttgaacactatacacctttgcaagaaacaaatatgcaactatgccaaaagggaatgatgttatccccttatgccactgccatccccagagggaccccatgtgggctgcctggggacacacactaccctccactccatgttcattcagatgcacacatgctcatgtgtcgagtttttgtggctcctggtttttatatttatttgttctatgtatttatgtttttatttatttatttattttt

SEQ ID NO: 468105 - DNA, 965 bp, Homo sapiens
gatggtgtgacatggcggcctggggggctcaaccaaagggtagagtatgcctgagattttccaggacagaagaaggaaaaagtatgcaaggagagaccataaaaaggtagccatgcctatctctggaaggtgcggcattccacggggtgatggccctcgggccccaggagagggagaggaacctggaggaaaagtggacgcagacaagaccccagtggaacgggccggacagcaggcaccccaggacattgcctgcagcaaagggggtttaggtttcagagcgcacgcacatcagagggaccacatcaagcgcctgcagcttccaggtgtgaataaacctatggggagcgctggcgctgggcgtgggccctgggaacggtttagattccgagggctgcttgagattgggctccggctcacagatctgtggggtcctggaggccttgtaagaacactggcttttgctctgagcaagagggtcccagagtacaaaagcacaaaggcagctgcactgagcgggaaggggcgcaggcccgcctcacctccacctgtcctgaccaccacagagatcctgctgagcacagacccatggcaaacctgtggcaggaactggcgacctccagctaggaatggctgtggggggccctggatctggccacctggaccccctgaaccgaggggctgctgcctcaagggtgcccctccgtccttgggccacacgtccactgtggccagttggcctctggttacacccttgtctcctcacgaggccatggggacctcgatgactgccccccacctgggctgggtgctggcctggccctcagaggcgcttcactaagtgcttgctgggcagtgttaaaatgtgagaatcagcaagtactagcaggttgtgagggggacactggcatgagttgagagttttccattcccaatcagaaggatgaaggagaaggaaaagggaa

SEQ ID NO: 468106 - DNA, 1225 bp, Homo sapiens
gcagctgagggctctggcgaataagacacaggcaggtaccaggcaggccatgcacttggcctctcggagtctgctcatggtccccttacccactggtggatcctacagccaggcaggcttcgtgggcctctcacctgtaaaacggaacaacacctggctctccgccttgctgcagggataactgcaggccactccccggggtgaggccttgatacctccaagttgaggcgaacagactgaatgtgactcaactggaagtctctgtcttgactccccgccaccagatactggcgggtgacttcctcccctatgagccgcgggatactggcgggtgacttcctctcctatgagccgccactggatactggcgggtgacttcctctcctatgagccgccgctggatactggcaggtgacttcctctcctatgagctgccaccggatactggcgggtgacttcctctcctatgagctgccaccggatactggcaggacaccagggtcatgcccgcaaactgcgcacttgtatcctcacttccacagagctttgtctgaagaggagacatgtagggtcaatttccaccccaagacatgacgtccaggacagttctgggcacttggtgtcagccatcactaccaccaccaccatggccagaggatttcaagcactcagcaaatggtgctggccaggcctgtcctgggatttcctaaccatctcggacagaagaaagaaaaaagacattgtggaaaggtggctgagcttttggagagaaaagaccctccctttgggcatgaagtttgaagagccatccacttgtggagtctgggactcatccttctccacgaaaggtttatgaagcagacagaggccagggcttctgagaatttccaacctcgatattttcactttatggtttttcacgaagtcagcatgaacacggttaatgttttctcattaagctactttttgttttctttcagtagctgacattcaaagcctgggcgcattctttcacgacgttgctactctgacagctcaacacattcgcgatgggaactcatatctgttttgatgagggagaccagagggaaaagagcattcacgtacagaaataccctttgtggctacttctgtcagctcctgtcctcacagctctctcggtcccacgctaccctgcagttcttattttctgataaagacttttaccacacccagaagtttctcc

SEQ ID NO: 468107 - DNA, 3727 bp, Homo sapiens
cagcctgtaacttgggtgcaagggatcaggcacagttaatgtgataaccttgcaaacctctgctttgtaccccgcaaccctgatgcaccagatggacattgatggggagtgtctgcagatctaacgggagctcagcttcacgttcgacttgggtggcagctatgccatgtggaactgtaaagattctggccactcggtctgtgggccttgttatgacatcctgagcaggggactgcatcctgtgggccagtcattcccctcctacttgtgggggctggtaaacctgcaggttggagctgccctttggagagaggcgtcccctggggacagaggatgggatgctagcctgtccatagagagaaaccccggtgctcctggggttcccaccccgtcgcactgccagggctacgggaaggatgcttgcttgccccctcccatggcaggtactccatgcgcctttggtttgcagcagcagaaatcaggggtgaccaggggcaggcccgatgtcaccaccctcttcacatcatcactggcagggccaactgggcacagcctggacaggttctcagagcccctcagcttcttcctgcagggaccccctaggaaggagaagaccccttccacacttgatgccaggcttcttattacacagaccctactgcctcaaaggcctcaagtgaccccggactcactcacgccctgcaagcaggggaactgtcagcatctggctagggccatgtcagctgcgatgggctggggcgagctacagtccctggagctggcagagctggccttcaaggccaaaacctcatcctccctgtgcagcctcttggtgcagcctccaatcaggccctggggagggcaacagcttggagatgcggcctctgccttcagcggtttacacctggctggggagacaaagcaacgacacaggaaacaaagagttaaaagagggctggcccagaaaggggaccccagcagcaagaaggtggctccctggctgtcctcctgtcaccccgatgactggcctacgcacggccaatggggactgagcagggggcgtcggggaggttttggaggaagtcacttactgtgcatggaactgggccggaccggtggttctcacctggccacacagaagactcacctgggacagttttgcaagaagacgaaggccacccactgccactttggcggaatccatctgggaagcaacgcgtgcggcccgctaagcccccgtgggccctcggagcagacgtggcctcctctggccctctgcgtgcagcacagtccagctcaataggaagagagggttttcctggctatcttatttatttttccacatgaattttaccattgctttgtctggttagagaaaaagaagctatttgtattttcaatggggtcaagttgactttgaaaattaacagtgagaattggcttctagaatttgggttgtttttccaattgtttattttcctttgtgttcttcaatagttcttaagagttttaaaagatagagatcttaaaaattccttttatgcttattcctatcattttatcttttaaaaaaattaactgagaagcagattctggattgtgtgtggtgtgtgtgtgtgcacgtgtgtgtgtgtgaaagctactgattttttaatatagtctgctcccttagtgatgcatttgattgcttataatagcctttcaatgtattttggggggttttccaggaatataaggatatcacctgcaaatactaagactttttcttcttttccatttttatactttgaatttatttgccttttctggttgtatttgctagtaattctgcaacaattaaataacagtgttgataatgattgttgctgtcttagtggcaatacctttcatgtttcttgtattaagaggaagctggctgagatggaaatattttgttagattaaagatagttccatctattcttttttattgagtgtttaaccaggaatttttcaaatgtttttcaactatggaaacaatcatttgattacctcccctgaagtcaattaatacaatcaattttattaacatatttcccagtgtgaatgtagtcttcttttcatgtgcttctgaattctatttgtttatattttactttggattttccccttgatatttataagaaattttatccaaagctcccatcaagttttggtatcaatgttatacttgctttataaaaataattaaaaaaattttcttccttgttgtatgctcaagttttaaacagcattgggatgaaaggtttaggagctattccctgtgaacctcctgggcctggttcctttttggggttgaaggtcctaaaatttgccattaaaaacaatgccataatgaatatccttcctatctatgcttgtacacttacacgggtttttcagttaagctaattcatagatgcatagttgctatcaaagatcagccacaatttaaaatgtgatcaataggtccttatagtccctatccctcccatggaggctgaatcaatttgtgctctctccaatagtgacattgggtattttcaaccttttttgtcttcgccaatctgacagacaaagcaaaaacaaaactcaaaattattatattattggtttaaaaaatgcacagtttttaaaccagttatgaggttgggcgcttttttatatttttactggtaactgaatttccttctctttgaattgcctgctcatgtctttcccatagttttccaacaggtttctctccttttcttcattgcttttcaagagctttttatatagtagggatccacaaacattccactgggtccataatcctaggccagccatgcgttgtcctggtggatggactttattataaaaattatgtagctgctctacagtacctaagttcactctactgggcagaggccgaactgcagatgattcagccttgggtcatgcagagaacttgaactcgtcaatcgaagatccagaactgacttgaggaacttgactcaactatcctgtgtccagttccagcaagctctttataggactggaaaaagtgtccatggctagagaactcccacagatggggaaacataccacacatccacattcacggttttaagagcccattgtgacagcagccaggggggagaactgagggccacactatgtccttcataactcaccatctgggccccatttggaaaagcctaggcgaagtacagtcattggttcattgtcatggttcacatcccagcgaatcccagtggagtgggtgctgagtgtgtgatacttggaggaagagttgttgcaacggatgtcaacgtgcaggctgaacacggcgacatgggcccgatgttcagcaataacaaatgcaggctactggggagcttaggggcaggaatcctgcttctcttaacagagaatgtggccaagcctcttccatgtcagacttctcatctaacgacattgagcttttgatatatgaacattatttttaaggctaaaaccagatgtcacaatttttcagagtatttgctaggaatatcaccctgacttgttgcaagggaagtttcctcattgtgagactgagagattaaattctattttatgtgtctggaggaagccatctgccttcggcttttgttaagggcttctttctgcctcctttactttcagcatttcatgtttatgtgcatatgttaaaatttcaagatgac

SEQ ID NO: 468108 - DNA, 928 bp, Homo sapiens
accacaccttccatggatattagagggcttcctggaggaggtgtcagttgaggagaccctaggaaggtaggactcagtccagtgatgaagaggagccatgaaatccaagggggagaaattggcacccaaggctactggagatcttatgagaccatttctttcattgaaggtcctccaaaagaatgctgcagcttcagacacagcctatgctctgtccatgcaatacaaccaaacttaccaggccctcaatggattggatggtgcccactcacactgcgtgacggtcaatcttctttacacaatccactgattccaacgccaatgtcttctggaaacaccttcacagacacacccaggaataatgctttactactgtctgagtatcccttaacctggtcaagaacttgtagcaataacagcgaggcattctgccctgtctctgactctagtggaaatgtgtttagtggtcggtcactgagtacaaaggtggttgctagtttcaaatggatattttcatcatggcaaggaagtatcctgctggtcttcacttactaagaatttccttttcttttcaaatcagaaataaatattgaattttataaaatgtctctttggaaattattcaaatgatagcagggatttttcctccttttggcccattaatgagaggaattattagtagattgtctaatactgagccctgctccctttctttgaataaaacctgactgtttatgctctatgccttcaaatattctgttggactttgcattattttatttgaaatcttatgttgtgaatttatgaatctatgtttacaaattaggtatgtctgcagttttctgtggtgtgaatagtgaaactcttcatcctgtttttcagtaagagtggtctacatcgtatagggatgactgataacttgagggct

SEQ ID NO: 468109 - DNA, 2043 bp, Homo sapiens
ccgctgcccagttagactccttcccattgccttctgccaaggaaattcagagacagaccccgcaggcatgtatggaacgagcacagaacaactggcagccctgaaggaggatctggggacagggaaggggctcgaacggtcctctgctcccatttttcagcccttcctcggacccagaacagcagaccagaatcacctttcacccatggaaaggggctggcactccagggatctgtcctgcttgctttgggcggtcactagatccctctgccacatttagggtcactcctcagagcacatgacccctctggaatcctgaagctgcccaggtgaggtggtagcaacacagcagtgcatagaggttgcgcccctgggagggccctgggcagggaaacgggagcctgggctctaggtcccgctcctccacttgcagtcccatcacattgggctcctcatctagaactgcgggatgaccctcactttcctgcttcccgactatggagaggcacaggaagcaaatcctaggcctgaaacacccgataccccaaatcctaggcctgaaacacccgataccccaaatcctaggcctgaaatccctgatgccccaaatcctaggtctgaaacccctgataccccgaatcctaggcctgaaatccctgatgccccaaatcctaggcctgaaacacccgataccccaaatcctaggtctgaaatccccgataccccaaatcctaggcctgaaatccccaatgccccaaatcctaggcctgaaatccctgatgccccaaatcctaggcctgaaacacccgataccccaaatcctaggcctgaaacccccgataccccaaatcctaggcctgaaatccccgatgccccaaatcctaggcctgaaatccccgatgccccaaatcctaggcctgaaatccccgatgccccaaatcctaggcctgaaatccccgatgccctaaatcctaggcctgaaacccacgatgccccaaatcctaggcctgacacaccccataccccaaatcctaggcctgaaacccctgatgccgcagtcctaactccgggaagcaaataaagacttcctgccagaggacttagaaagtgggagcgtttactgatgctctttctgctcattggtcattattgtgcttctcaacagtatcaaacagtgaaacttaagagtttgagcggccttgcctcctggatcttgtctttgcctttagaattgtaattataggatgtgtgtgatttttttcccacttaacatgtcgtgaatattttccatgtctatgtaatcctttaaaagctatttacaatgattacataatgtttgggacgtgtcatgatttgctttccattttacctcctgttagatgccaaggtcatagggtggagtctcagacccaccccagcctggtttatcatttcattgccctcagcaggagccacgccgaagtgtcagatgtacctcacctgcctcttcctcctgaaggatcttaggctttcagcacaggaggggggttagggatcttctgttcccatccttttattttctcagctgagaaaactcaagaccttgtccaagatcacagggcaatttatttacatatatgtatgcatcatatacctgtgtttgttgatgttgctgttgtaagtggcatctttttaagacttgtgtttgctagttgttgctgctttatagaaatgcaattgaggtttatatgctggttttgtacccacccactttatttaaatgtcttattgataattttccataggttcttttcaggtttctatgtagacagtattttcatttgtaactaagaagagttttctgtgtctttcttcctttatattttcttttcatgtcttactgcacagcagaatgtaatgcccctttttatgctggagcttttctttgctccaaagttgactttgtctgaaattaatgtagctactcaacacacagcgagtttttaattttagtaattacatttttcatttctagaaattctgccttttttcaaaacttgttgg

SEQ ID NO: 468110 - DNA, 800 bp, Homo sapiens
atacaaggcccaagggaatgctgccagctaagagtgggtgccgggctgcaaacatcacagttgcccctttcttcctgcccactgctgctcccggtgacgctcagcgatgtccgtcagcatgactgagacctacgtccagaaccccgcatcgcccccgcttcagcctcgctctgtggtgctgctggcctctccgtggctgctcttcctcctccccgcttgcccctcacctggctctccccatcttggccagggcaggcctggcacagactctgtccaggccacttctcttttaaggctcccccaagcccacagttcaactcccacgtccttagcatgctcgggaaagatgccctgctctgggacttggcagtggccgccctgcctgcttctcctcctccttcagtccctgcccagccaccactctgcctccttgctaggccttgggaaatcgggcacacttctcattcaagcccatggcactgactgctttctgtacccggagcagtcctcccctggggagtcccactacctccctgcagttgtaagctcctcacagcggccttcctgggctgccctgcagacaacggtgtccccatcaccctggagcctttgcccctgcttcattctctccatagagctgtgctccaccgggcgttctgttacctgcggactatggctttcaaatccatctcccttaccggaaatgcaaggtacgtgatggcagagactagaacagtgcctgctcctgcaacatgcttgtgctgggctggaaggtgaccccacagagtccatggcctttt

SEQ ID NO: 468111 - DNA, 734 bp, Homo sapiens
tcttaaaaagatgccacttacaacagcaacatcaacaaacacaggatttggggcatcagggatttcaggcctaggattcggggtatcaggggtttcagacctaggatttggggcatcagggatttcaggcctaggatttggggtatcgggtgtttcaggcctaggatttggggtatcgggtgtttcaggcctaggatttgcttcctgtcaaggaagaggccagccaggtcccagccatgtctccggccttgaccttgggctagtcctctgtatgccaggtccagaccctctgcttaagtccaagagaacgcaccaagtcattcatgaaggattcgcctccatgacccaaacaactcccaccaggaccctcctccaagcttgggggtctaattccaacatgggatttggagaagacatgggaactgtacccaaaacatggcagctggatgcttctgaacacactgacggtggctgctaccaagagggagagcgaagtcacaacaataccggcctgcaggttcacctccccataccaggcactttacagcaccatttccaattcccgggaaacagggccacaaacataggaggcaagactccattccagtatgaggatgctttttgatctaccggttacatgataagaataaagactttcctaaagcgactttatgtggtgccgttaaaagaacacaaacctaggctcacacataatgccacatctgggaaatgac

SEQ ID NO: 468112 - DNA, 745 bp, Homo sapiens
tccccggttgccagatcagtgctgtagccagaactactcgttcctctgccccctggtctgaagccatccctgacaatggtgtgggggcaaggagggagccaagctcttgttcttccagggcctgccccctgggcacagcacttactctcacagatgttctgcgggctttacacaaatcatggagctggcatcttcttggcttctggggagacctagggaagcttacgatcatggcagaagatctcacaagaactcactatcacaaagacagcaccaagccatgagggatctgcctccaggaccccgacacctcccagcaggcctgacctccagcattgaggattacagttcaacacgagatgtgggcaaggacaaatatctgaactatgtcaccacagaactcaggaagttcagccagggcctcgttgctgtttctcaggaacgccaagcaaaagtgcacccaggatgcctgcacctgcagatcctgctgcgggaactcgctgtccccgactcccctcagcctctgtgcggcatcaccttgctggggggagagcccatgcaggccacgccttgttccctgtcacacccgtgcctggaacagtgcctggcacaggcaaggcacactggggtgctgagctgagtgattgaatgaacaaataaatagatgtttccactcgcctttcctgagccctactgtgtgcatgactctgcactccaggctatggggcagccaggcaggggtgcc

SEQ ID NO: 468113 - DNA, 1044 bp, Homo sapiens
cagtctgagtaatgcgccttcaatgcttctcaggagccgctggctcggccgggataaagcagcccccacgctttctcaggccccggcccgggatgaaagctgcccgcgccgccgggcagccaccgcgccacctggtccacgggccggggccagttcggccggcagggctggtggccggccccttccctgctctcacccccaatcgtaggcccgggaggacctctgcggctgtcactcactgtgcccagaggaagaacaaggccagtcttccagatagctgggccctggagggacccaagaagagcctgtctccaagggcctgtgctgctccggcatccttttcctggggaaatcaagacgccacctcagggcctcttggccagtgtggagcctctgcctgggcaccaggacccaatattctcacaggccttcatgcctgcccccataagcctgagtatagacaaactggcaagatgggctctgaggctgtgtgccagctggagatgcaagattgggtcacccgaatcaagggtgatgataaaacctgtccctccaaattaggccagagcccccggagccccgctgattacagcctgtgcaccgaggacaaagggtccctctagggtcattaatatggattgaggcccattgttttctcaaattaggccacagggagcgcttcttggggaagcacatagcgggtcatgccgctgctccatagaaaacagaccgggggtgaggcaggatattgctgggggaccccttagtggatagaatgatcagaaaaatggaggctcccagaggacgagggtaccgagagggatcggagtccccacccctggggaggacttgcacccccgcctccacccctgtgctgagcccaagcctctgcaagtccctggggacctgcctcctgcaccctgaccgcctgctcctgtctttcctcactcacacctctgctcagggctgggctggcgtcttctctccccagatggatgtgttttaatatttcacaaaggaatatgttcctaaaaaatagcaatt

SEQ ID NO: 468114 - DNA, 2198 bp, Homo sapiens
atcccagatcacgtgtcccttccggggaagctgcctctgacttccctggctaaggccacccccatgtcccccaggggcctcttctataggagcagcaatgccacacagggctgtcttctaacatctgactgaggatttttaaaggctgcttgcaattccgtcatgcagaggtttgatgatttcaccagtatcaacagacatgcagaccattgccagttttctggtattacagcccctgacacccctggatgtatcatctttgcaccgggttggaacattccttcccatggacaaggagtacagccaccaagccttgagatgctgtgctgcaaatgcccggaaatgtgcatcagcctggctggggcaggcctgacggctcctaaccgcagctggcagcaggccctcactggcagcactggggcccctggaagcagcaagcccagtggaaaaaacctggactttgacaccagacagcctggattcaaatcttggcctttgcctctggtagctgtggacttctggcctagtcacttaacccctctgtccctcagtttcctcgtctatacatatgggggcaagaatagcacctacttaatgagggcataatgaatattacaggaaagacgtctgccttcagcgacatggaagtacagattagctctatgcctttcctctatgcaacgttcagaaatgttgtatacattttaactaacatccttttcagtgcatagctaaggggcacgagaaaacaagggaaatctctgcggtgtggaaataaagacagaattaaagcgaagggtgggaagtttgtggggtgaggccgcagaagacctgggagggatcgctggttgtggttccccggaggctgcagccgtgctcaacagccaggaaggggccagggatgaggctcctgtcccatgtggggcagagtcagagctgagcaccccatggggagccagtgttcacaaagtgcctccctctcaggacacgggtaaaggaggtaagtctgcccactggctcagggaaatgaaatgaagttgacaggggaagaaaaacctctctactaggaacccatcatcattggtctgtcttcagactgcattcagattgaaatgcctctatttaccttatggcctggtaactctcaagtcaagaaattaccatagagagtgagcctgaaccagtgacccatggggcatctagaagaatcaaacccaaaacctcaccagagagacttcaggaccatctgggatttctataaataaagtccatcggaagatgagctcacaataataaattacaaacacaaaggaactgatcaccaggagtagaatcagcatgcatgggtttaaaacctcaaaggcactgatgtttgcaggtgaagacgatagaataatacatttttaatgttcaaggaactacaaggaggagttgaaaacacggaaatggcaagtcatcatgaagatgaaatagacatgtttcaaaatgaaccaaatagaatttctaaaaattaaaagttaaattaaagctccatgtcttgagacttctttgtttgggccatggtcgtgaaaagggttgggttaattcacccattgaaacaactagaaaatgagataaaatggacgaaataacgatttttttaaacacaatgccaacaggtagagcaggactggggcccccgggagagggaaacacacaaagtgggtatgacaaccactctggcttccacctagtggcaagtttctggagaaagaaagaaggaggggcacaggagcaaagcatggtggccccagtgttgaggactcataaattcatctgatagaaaagtaaagcagatgacatgccaaggagcccaattaggctgacagtaaaaatagaaaccagaaaacaacagaaatgatacaaaggttgagaaaaaatgatgatcaaatggtgcttatatagctgatacactatccttcaagagcaagggtgacataaagacatgtttggacccaaaatattaatagaatttaccacttactttgacagatgagtgggtttttaaaaatgtggtgtatatatacgacatttattatatataatgtattatatatgtacaatatatgatatatactatattataatgatatgtactatattacatataatatataataaatacataatatattctaaatgcaatatacaatataaat

SEQ ID NO: 468115 - DNA, 1388 bp, Homo sapiens
tgctgacagctttaagtttacatagaattccggacggtatgtccagcaaaggctctatagttctggcctgcagtggcagcctggacaccttctgcatcctcgtgtggctgaaggaacaaggctatgacgtcattgcctacctggccagcattggccagaaggaagacttccaggaagccaggaagaaggcactgaagcctggggccaaaaagatgttaattgaggatgtcaacagggagtttgtggaggagttcatctggccggccatgcagtccagcacactgtatgaggaccgctacctcctgggaacctctctcgccaggccctgcatcacccacaaacaagtggaagtcgcccagcgggagggggccaaatatgtgtcccacggcaccacgggaaaggggaatgatcagggccacagtgacctgacggaatatgcaaagcaacgcgggattcccaccccggtcactcccaagaacccgtggagcatggacgagaacctcatgcacatcagctgcgaggctggaatcctggagaatcccgagaaccaagcgcctccagctctctacacgaagacccaggacccggccaaaacccccaacacccctgacattctcgagatcgagttcaaaaaaggggtccccgtgaaggtgaccaacgtcaaggatagtgccacccaccagacctccttggagctcttcatgtacctgaacgaagtcgcgggcaagcacagcgtgggcaatattgccatcgtggagaaccgtttcattggaacgaagtcccgaggtatctaccgggccccagcaggcaccatcctttgctacgctcatttagacatcgaggccttcaccatgtaccgggaagtgcacaaaatcaaacaatgccggggcttgaaatttgctgagctggtagcaaggtcactgcaaaatagacccccgtacaaggaggagctggggcctcctcaatttgcagatcgcccaagtaaaggcgctaattgttgtgataatttgtacttgtgactagttctccccggctggcagcatagtggggctgccaggccccagctttgttccctggtccccttgaagcctgcaaacgtcgtcatcgaagggaaggatggggggcagctgcggtggagagctgtaaaatgacaaaagatacactagtcaaaaaaatgaaattataccgtacatatcaacttattaactaagttaataataacccaatcatgtatttttatattgatgaatacatacataaacatgtctgcttcctcattttttatttttttacttacattaatgattttgttgtgtgaatactaccacagtttattgaaccaatcttctctcattggagagttaaattgtttttaagctttgactatt

SEQ ID NO: 468116 - DNA, 881 bp, Homo sapiens
ttaagtcaataggctaagaaggcagttacagtgttggctggggtgactgacccagactatcaagatgcaatcagtctactactccacaacggaggtcaatgggaaactacaacagcccaacagccttgccaatccaggcaggactacaaatgacccagacccctcaggaatgaaggtttgtgccactccaccaggaaaaaaaccacaacctgctgaggtgcttgctgaagataaaaggaatacagaatgggtagtagaagctccttccccaactaaccacgaccctcgcaacactcacctcacttcccccttaaatgttggccctactaagcaggaggcagttcctcgcgcagaaagatacaacttcctcttcaagggagatcagttggagacccaagtgtgtgttttggaagtgagaggaaggtgcctgcggagggagaggctaaagggagaagaaaggaggatgtgggtggaaaaaagattagaaggaggaacctcagtcaactggcctgttgtgcagaaagttctcaagcctggtgccaagagtactgggaaccacgaattcccttctcgcccctgcgtctttgaagctgacccctggaagagcagaaatccttggctcgggttctggagtggatgggagacagtttactgataaacttattaaaaattttgaagagggttgaagaatttggaaatttgtagagaaatctgttggttgctataatgtttgggaatacattggcatttagtaggcaaaagatgataaatattctataattctgggacaatttcccacaataaaaatggtctcatacctcacacaacttcaaatgacctgcaacactgtttagtaaaattccttgaaatgtgagataatc

SEQ ID NO: 468117 - DNA, 668 bp, Homo sapiens
ctgcagctggaatatatgctaatcaccttggaatcaattgcaatttctgccaaaagaatcattggcctcctacccaaggaggtacttttgaacaaactgaaggacctgaggcagttggaagagaaagtttcagttagacgaacagccaaagggcacccatatcaaagtccaggggctgagctgacttcagttgagaattctacccacagggacagaagtcctgggaagtttccacgtatactcaagaggcccaggctaatggtatgtgaacttcccacaaagactcctaggtctgagaaatgttatcttgcagtgcttgtttctggaatgcagctttacccatcatctacaaaagcagctctttacagagtcctcttaatcatcagtggggttgttagatttgttcctcttcatggaatgaaaaacgtgtaacagtttaccatagcagtgttgattctgaggcaggggtgggggtcagggagacaaagataatgagagaatagtggagaattacgtgagaaattttaaagaacacatgtgaaggggtaggctccaagctcttaaaaggatgctgcatcatgcttatatgtctttgtgcttttatcaaagttgaataaagctttaaaatgttttcagtgaattgctaatttatgatttctgaaatcatt

SEQ ID NO: 468118 - DNA, 1853 bp, Homo sapiens
acagatgtggagccagaaagggtatggagtgggaaggtggtcttcccctggaaatgggccgcccagtggctggcctctcctctgactgcccctggctgaccaaccctcagcgtctgcattgttccaccgtcgctggtcagccagcacctgctggtgtctgccgttttccacattattctatttattgcaaacagcctggtcagaggtgtttgggttgtggggtggattcctcatggcttggtgctatccttgcaatagtgagcaaaggcaataaagttgggtatacaaagcatcatcctgtcatcaaatggaaacgatatatacaatatctggcttcagcaggtcctcaaggtacacataagttgcatgagcaagtgactccaattcatatgtacactttttctgcaatatccctgcctctgtctcagtccacatctgtggtctcctgaggccttcagtggcttagataatgaccaccacactggggagggtaacctactttacttatttcaccaattcaaatgctaatcttatctgaaaatatcctcaagcagacatccagaaacaatgcctaatctgagacccctattactagttaacacataaaattaagcaacacaggacatcatagccaaaattttaatacattcagtttttactccaaatagtgttgactgttatctaacactgtataaaatcaatttcctcatttcagaaggatttatgatacactgtttgaactattatgtgttacattgacattttctaaccaaatttgtaatttgtattttaagcatgataataaagcatattattattagttatcacatcttttacttggtcttatcaattctgaaatgtcattactgtattcatccattcacagaagataaacactttcttccctttatgcttcttagttatttcacaatacttctagcctcattgtacataatgacttcgttaggaaactttgtgtgaaactttcctgctgttctgtagcctaaatcagaaaggtacaaaagcactgatcagagctgtaaatagaaattgcttgttgattacacattatgaaaaagcttagttatggtgtatttttacaatattattatatctgacttttatcactttaaaatgtttctggaactatttctatgtagctatataatcattaatttctcatatattgcatttaaattgcagaattcatgaggagctattctttccataataagataatggtgtttatgcattatatgccactctattatttttctctttcagtataatatgcatgaaaaacaatactaatattattaaaattttgacatttgaataaaacatgattttttgtgtgtttccaaacttatgaatgcatataacagagataattttatacacttttttaaatatgccacacgataatatatgtgagtgtgcatttactaccagtgtctctatatctctcattgtacagatgaagaaaatgagaccaggtatgtttgttgattgcttaatgtaccaatttggcctagaatcctcatatattggtaataaaactagtacgtcacagtcaatgaaatcaaaagtcaatttgtttaaatagggcaacacaaagacaaagatataaacctgttggctatcaattttaaaaataagtatgtggtagcttatttgtttacatatttcagtaaagaagaaatagtttactgtttctgaaacttctctataaaagacaaatggcagtttaggggaataatgtatttttaaaaatatatgtaaaaataaaatacggacaatagcaaaggggctgggagagagaacacagaagtacctgctctaatggtactggt

SEQ ID NO: 468119 - DNA, 1829 bp, Homo sapiens
ctgatgtggtttttattttctggagtaaccttaagtgaaacaccatgactaaatcagaggatcctcaccccgtgaccactgccacctcaggcctacaggaagcactgcaggctactgctgatgttcccttaaggctaagggttcctcactcagtttgtggtgaatacttcctggtttgggactcacccttcagggaaatggtctcccctctggcccggagcaggttcagaaatgacatccaagagccaagcacagaatcaagtgccccaaaagcccactttgttctccacacccctgtggctgagctgtttgcaggcaataaatcctgccaggactggttccttcccttcaaggcagctaatttctttatggcccagggagtgtctagaaatgttcaggaactagcagggtggaaagggggtctcatgactctgactggtgccttatactgctttggctgtgctggtatccaagatgcaagacaaagtcctcctcactcttccatctcctctcctcaagcagaagaaagaggtctcaaaaatgaaaagtgacagcatcataatttgtacccatgttgtacccatgaccacattccaaagaaaatgttattaagcaaatagccaaaatatcccctactgctcatatcatgttcaccaagttctagctatgtgcttattcctattctaaactaaaacaagtcaatttttcacattcagcagatgaccacattatttctccccttcctccctaatcccaatgcctcagttttcttcaattatctctcttatctccatattcagagtagaaattctgataagttcaatccaattaatgtacggcattttccagacaagtttttggtttaggtctcctgaactaaatggggtcaattgtgtcgaagggaaaaattttgttgctgttgtcttgtagtgttgcatatttaagagaatgctgtttagctatctctccagaagaacactatgcaaggaaatatgtcctccactagtcattttttttttaccgcaataggaaccaggtatagaagaacacagaaaactgtggaacaaagaaaaagaaagaactttgacctgatgacaatcctgaccctttaatcataacaaacctacagcctaccctaacactttttattgccattaatttttataaaccactttaagggttttctgccacctgcacctaaaagaatcctgatatcaagatttaacaacatgttaggttaatgtaaagatgccttctaattcctggtatgttttaactaccacttgttaatttgcactggcctctacatcccgatgttttttttttcttttcgtttcccatttgaacatgctaccttattgcactcccacatttctctatgtctgttatcatcagtctgcctggtgtctgttgtgcttcttgctgtgattctcactattaatctgtatccaaactcttgctcctcagggattctttgaactttactgatccttaagtttgattcagctatcctcaatctggctattgcgactcacaactcaacaggacacctctcataaaccttcctgctagccatcaaacatttcaaccattttaaagttaaataaaataaaaaaaaacaaaagcacatcatttctagatgatagaatggtaagctaactcagttgctattctttgatcattttagctatgctaagaacattttatgtttatggacctaaagtagaaatttggccagctggaagtacagacagtgcctccttataaatatttaaaattgcattatggattttaaaaatatatgtgtgataaacaatgctaataatgac

SEQ ID NO: 468120 - DNA, 532 bp, Homo sapiens
tcgaaaacttctcctgcaaacagaccttcaacttctccagtgggggggacttggaatggcagcttcattgtctgatgagggcacgcttacggggtttgtagatgatagtcttcttgtatcctcaaatggcagagaaaaaagagagagagaacaaatgctcatgtcttttaatagaggccgtctgcaagctgaggagcaaggaagccagtccaagtcccaaaacctcaaaagtagggaagctgacagtgcagccttcggtctgtggctgaaggcccgagaatccctggcaaaccactggtatgcccagactggtaccagtcacaagtctgggcttccagaacttctgaccacccagcttcaagttggggttcacatgacccccccacttcggacagaagctctatacccattaaacagtagttctccttcccactgtcctgctcacttccatttaccccagccccctggtcacctctttctgtctctgtgaatttgcctgttctaggtttttctttatgcagacatcaaaatg

SEQ ID NO: 468121 - DNA, 537 bp, Homo sapiens
taacgtaacaaggagcctaaaagtttgtcaaagatcagatggttgtggatgtgtggtgttatttctgaggcctcttcaggcccctctgctgcaggtctgctagagtttgctggaggtccactccagaccctgtttgcctgggtatcatcagcggaggctgcagaacagcaaagattgctgcctgctgggaggtgtctcccagtcaggaggcacggggagctggcaggcagggatggacgtttaagtctgctgaagctgctcccacagccgccccttcccccaggtgctctgtcccagggagatggaaattttatctataagcccctgccaggggctgctgtctttttttcagagatgccttgcccagagaggaggagtctagagaggcagtctggctacagcggctttgctgagctttggaggtctccactcagttggaacctccctgtgctttgtttaaactgcgaggggaaaactgcctactcaagcctcaataatggtggtcgtccctcccccgactaagctaaagtgtcccac

SEQ ID NO: 468122 - DNA, 752 bp, Homo sapiens
tgggtcatcaagtcaccatgcgacctgaactgcctatcataaactgggtgctttctggcccatctagccataaagtgggttatgcacagcagcattccatcatcaaatggaagtggtacatacatgatcagtttcgagcaggtcctgaaggcacaaccacccctgtcattgcccaatgggcccatgaacaaagtggccatggtggcaggcatggaggttatgcatggactcagcaacatggacttccactcaccaaggctgacctggctatggccactgctgagtgcccaatttgccagcagcagaaaccaacactgagccctcgatatggcaccattcctcagggtgatcagccagctacctggtggcaggttgattatattggacctcttgcatcacggaaagggcagaggatggtttcagagaataaaatcaaagaaaacagcgaccaaaatgctcagggcatgcttctcttgtcctgtgaggtggacccttcacttctgaaccttcacttcacctttcctgtggctgcctccgaccctggttcctctgtgcccctgtctacaactgtggactcgctcccacaatgtaccctgactcttcacatggggcaggtggttaacctgagatggttctaggttttctgatgtttttactggatgtgttttcttatcctctagacctgtttgctccagtgactaagtcaagctcacccctctcctttcctctgtcagtaaatagattttccagcc

SEQ ID NO: 468123 - DNA, 3508 bp, Homo sapiens
cgacgatctctctgagagacaagtctgtaagagagccgtacatcgtctgtgacattttccagagcgccatgcctcatacaccctacgctctcttcaccgcagaggatcctccgccagggcatgtgtcctgctgctcgcttgatagaaagccaatccctaagacaaggagtattgccaaggaagaaggctttaatcaggtgctgcagctgagtagacgggaaatcagtctcaaatccatctgcctaactgactataatgaaagagctaacattcatgttcttgacaccaacattgtcagctgccagggcattctgactgcctcggtgctgtgcctgctgctctgtgctccagtgagtgaaggcatttggcctgacctccacaggtgtatcactttcccttctacagggaaattctcagttaaagagaaatggcaggtaaatttagatttggatgttcagatttatggctcctccatgactatttctctgtcctgtaaaaatgagtgctttacattcaccggtaagccacacatggaggaaagttattcttatcctaagtgtagcaaacaaacatcaaaataacagtcaacttttcaaatattgctcattgctaatcagcaggaactgtgaattacaactcacagagtaaacagaatcttaattactcctttcatcttgcctgccaagtgatgtctctcatctagaaaatgtaaaaagaaatcatgaattgaaaataagaggactaatgaattgatcagattatatagatcagaaaacagaatatgtaattgtgtaaagagaacactcagatctcttccaggcccatttttaactcaatgtatgactttttaatcaattgggtattttcatatttgccaatttaaggtgaaataatgtctaaggaaggcttaattatgtctctttctttggaagaaaaaagagaagaaagtatttttggcattgttattttattagaggaaagtttttaaaataattgatttatattcatagaaataattatttgtctaactaattttccttacacctgcaaatgtaaaattatttcctgtaatgtgcacaaatataatttttctgggctaatattttaattttttcatgaaatgtattagaaatttgaagaaacatgaaatattttctctacttttcagagaatctattatatgaccaggtgcattaaaaacgcagttaatttttacaataaatatttaacaactgatacgttaaatgataaatcttttctacatctcaatacctgaattgtaatggtgcagaaacattcagtatagaaataatcacatagaccatatctaatattcttactaatttttctgtcaatgctgccagaaaatgctttctactccttttttctgaagtactgataatttcctgatgttacgttaaacaatggcttacaacgaaaattatttatttaggagtaattaaaaaaaatttctttataaagtgtatatattttttttcatttgaaaatgtataatcatggccaagggcatgtatcttttatatgcaactatatattttatgcctttatcaagtatataatttatgaaagcattttctaatgcttattaaaattaccttatacgttatcccagtgccaagaaaaataaaatgataatgggatcattgcggtgtaaatggagtagctgccatgccatctgctgcacatgtccagaatgagtataaaactggcctggtgccaccctcttgggtcccaaggctacgtccatttacttgccagaaaaaaagaattgatttatgttagatatggttttaattttgctgctattaggaacttgtattaaccattactatatttcattatctgaactatttcattttagtttgatttggggatgaaatgaaaataaatatttatatctcagttttaaggccacctttaaggcactaaacagaactgcatgtttgccttgaataaaaaaaacatttttggtcacactcttattatctacaaatattaaatttggtcatttcaactggcattttttcctatgtcctttgttgttgttgtcaccacttcttttccagttacaaacatggcccttgtttttagtactgatatgcttacgacctaacattagccttaaccagtatctttgcctaacaaactaagtctgcacttactccatactcacttcgtagaacaacactaatttctgacattttttttgttgtgcgtatctcaaactgaagatctgcagatacattctgcaggtctcataaaatattatgtacatgtgtgtataattttgcgattttattcaaatatattttttaaagtttgtttttaattggcatattacaattgtacatattaatcgcgtataatgtgatgtttccatacatttttacgttatgtaaaaaatcagattaaaaaaattacacaccttagttattagatttcagtggcagcatttgcctttgtgtatataattatataattccaacatcaacaaatgaaaccaaatgatgtttggcacaatgtatcaataaatgattcatattagtttgaatctagaaaaaaaagcggaaaacaaatataatgtggcacacggtaatatagttatgttgaattcaaaagaatgttctaagtatcagtgtttcagctgtgatccttcatgctagataaaaatctcaattcaaaaactaagaaaaccaaattaaaaaaacctataaaaaatgcaaattcttccttttaatacatccagtattggtgatataatttcagtaaaacaaacattatcatttgtcaaagtcgaatattttcaatttgtttttttctcactttttaatggtttattcattgagtaaaatgatatgttacaataaattatgcaacatcagccatcatgtttaacattcagctggttttaatagcttctctcaggagttattttatctgattatatttataaggtaaaatcttatcacatttctcatatatacacactgtgccagcggattcacactactgatatatgaataaaatcagcttgggatgtgcactggagacaaatcagtgaacacctgtcaaagattattttaataaaggatggtaaaagcatttgtaaaatgcatagaatctttttccataaatagattgatatctaaacatctgttgcataaattatgcttccaaagtttacagtggaacccatgttggcttatttactttattattgcagactgtcctttaacgtaaaatgcacaccattcatttcccttacaactggggttaggtggaagtctcacagagatggtgtgtgcactgtggttggcctgaaacagttaaatcagcttgtaaagacacttcagtgataacaaggttttaaaacatacttcatggaatcggcttcatgtatcatagcatctcatacctgtgatagaacaagcttttagtttttcctttgttttctttacattctttattctcagtgaaacaggttcac

SEQ ID NO: 468124 - DNA, 657 bp, Homo sapiens
gcttattaaactgctctatcctcatgtttggagtgtccttgtccttagtgtccttggctgctcaagactgcttgcttcaattttcatttattttccttatgctgttattcatagcagaagaaaaaaaatctcgtaagcaaagaccattaaataaaagtaacttcactgaaaaacctgtgcttaagaaaggattatctgatctacaatttgggattctgcatgcttttagaagaataagctccaaatctcaggaaagtgacattttactaaatgcaaatagtaatgtaaaggcattaaggaaaatagagaataccatcattggcaatattgaaggcagtagtacagtacagtttgcaacagtaacaggacaatcattgcataaggcagaagggcactacaatgtagtgaattctacattaaatccggtatatattaaaatgattttacactaacatatgttttggtcaaaaatagaatttcagattttaaatcttttccttcaaattttgaagaaactacacctgaaaattatattttcaatcttgctatgaaaataaagtcatctttattatgttattacatatagattatgtgtcccaatttgtccaagagtgtcctttaatgcctgtttttacagcataattattgctagtaccc

SEQ ID NO: 468125 - DNA, 1888 bp, Homo sapiens
tttaataagcaaaaggaatagagctctctggagcagaaaggggtcccagaaagatgggctgccattctacagtgaagtgcaagggtttttgtagacaagctggaggctgcaagctgacagtggagcctcagtggggacaggatccaagcaggtgtgagccaagcacagcctactgggccaagcaagcggagcgaggccagtgggcctccagtgcggcctggacagaggtagtggcagctgcagagatttctggctggcaaagcaacactggaggagtcctgactaaaccaaatgaaggctttgtgcgggcttttgtgatggatagcaaaccaatttcaaatataaaaatatgtagtgataaggacattaacctagccaagaatgatatcagaggaatcatacacattagtttaggcttgtcaaaaggggtctgtattatgaagcaatgcttgaataagagaagtgatttatccatagtctgagttctatgctatctgtgccagcttctgagtagaaaacctctgagagcagtactggttcatcaatgttaagggggggggggaggggagagagagacagcgagtgagcgagcgagcgagcaagcatgtacattatgtttaatgagacaatggttacccaggaaagaatttgtgccatcttctctgctcccagtaaaaataggggcacagtcagttcgggttttataaaagcgttactaactactaattgctatcactcagcatgtcaagtatataggcaatgatgtcaagtatttccatcctttaccaccttattttttccaaactctaagcaatgtccttcaaaattaaacactgaaaacaaaagaaatttctattcaataatattcaagtttaatttcagctttgttatttcaagaacaattgcatctataaatatcgcctaagtgttcactaaaagtcaagtactatctcatactttctttttcactcgtcttcctcactaaaagcagcctaagatgatatttcttctcaattaaaggcaaatccttcttaagagaagctctggttccaactactaaaataatttgttcacctcaatgcacaaataatcattttagatataaaaagagaaaaatttacactggcatgtgggtaagatttcatgaatatgaaaacagtgtttatcattattacttttaaggatatcaatacatttttgaggaaaatatataatttgaatatcttagtacatgtaaaaatgttaagaagcttggaaagttatatattattattgaaatctagtatgtataagtatagttattattaacggatttaaaaaattagaaaaagagaattaaagaactcataataaatggatttatatagttttagcccattttccatgtaggggttagattttgagtttctcattctgtcatctcactgatgttaatctagtacaaacatttttaactattggttctattactttgatactcaagtattctttttatttgtaaataacttttgattccacttactaattacctctatagctttgttcagaattctatttaatccctccaatgagtttttattttcagtgataacggtttgttgctttttaaaaaaatattttaaatctgaattagatttttaaaattatagttatattttaactattattttatttgttaatgttttcaacacagtattcatatcatcataaattatattcaatatcagtgtttaattctgctacttgttttaatgcaaagcctagctcacagtgttttggttttggtttatgtttagaaaattttgattggaaatgcatacaaataaagtaaaaatcaataataatgcatatttagaaataagacatttttcatttgcctgatgtattt

SEQ ID NO: 468126 - DNA, 827 bp, Homo sapiens
gtcccggactcaatcccaagcttcgggtcaaagccctaggaaagaaaactggatctgagggcttcagaggcagatgataacggaagttaaaaggcagcagcgcagattttctggtcagattaagccaagtaaaatgaacttaactcaaagccttgaagacagaaaaacttataaaagtacagcctgcagtattctcattcagaaagaacaacagggcaaaagacctgaagaaggagcatactgcggttttcagaataccatcgaggaggagagagaattcaatcccaggttgaattattctaccataaatgggctgtgttatgttctacaagtttgcctctgtggaaactgctcctgtaaaattgaaggcagagtcggaacagaatattcactacctgtggaaaattcagttcaggagacaggaaagcgaaaggttcctgtaagcatgcacactttttccttgcaaattgaccaaatgactgtcaccctggaaagaatggaacaatacaggattaaaaacaatggcaacaacactggaagaacagtaaatatgacatccccagtagaaatttcagatcaatctaccatcaatggatacaaaataaattagatagaaggaataaaatctagtatttcgtagcacaatgtgatgactgtatttaacaataatttaatgtgtattttaaaatagctaaaaaagtgaaattggaatgttcctaaacaaagaaatgataaatgctttaagtgatgaatatctcagactgatttgatcattacacattgtatgcttgtatcaaaatatcacatatacctctgcataagtacaa

SEQ ID NO: 468127 - DNA, 645 bp, Homo sapiens
cattacttatgcaaataagcaccctctcagacatgctagtggtggcagagattcgagttaccctgagttactggtggtggatccatacaggtctgcagcaacttcagttttgcctcttcagaagaaatgattatactgaggggcatatagcagaaaaagagaccaaggcaagttccaaggcaggagacaaagtttattttaaaaggcttttgaacaggaaagaaaggaaaatttgcttgcaagagacccaagtggacaaaaatgggcatttaaccttgatcctaggactttataggcttgccccttttccaggattcttcttttcagaaaggagatctaacaagagactgcatgaatgctgtagtttgtggaagtggagtctggggagcataaaacaaagaagaatgaaaaataacgcaagtgtcccagaatcttttgaaacaatgtggataacgtgtctcagtactttctacctgagtaaccgaagacgtgagcacacattcacctttttctctactgtggaatgactaacttatgatgtgttcacttctccatgcttctaggctgcacatacatgagtgccacgtgtgttcctagaagcatcctgcacagtggatcagagaagccctggtgtagaaaataggc

SEQ ID NO: 468128 - DNA, 1136 bp, Homo sapiens
tctgcagcttcagccttgaagccagcgagatcatgaatccccaggggaggaatgagcaactccaggcgcgccacgtgcagtgttgtgtcaaaaaaccagttgaagtaaatcccagtagcctcagtcagaagaatggcacctatggacctgcgtcaggcagtggaagcaacaacagtaagcaccacgttaatctcaatagcagagtgcccatagactctgacttctgcagtaactatagcagtaaaagctttgggcaatttgaggctgccaggcctgccttgcctaatgggactatagacttgtggctcctgcaaagcttcagcaatggtgattccaatagatacaacaccacagatactccagaagcctcactggcatatggatcattggctttgggcagtgttccctgttatttttcctggcgtgatgaaaggtggtgtttactatagtttctcctctcttggtaaccacactttttctttctcgcttttttttttttcagcttttattttgggtgcatgggtacatgtagaagcttgttatataggttatatagtgcacgccatgtgggtttggtatacagtttatttcgtcaaccaggtattaagcatagtactcaacaggtattttttctgacactctccaacctcccaccctccaccctcaagtacgccctggtgtctgttgttgctctttatgtcatgtgttctcactgtttaattcccactaataagtgaaaacatgaagtatttggttgttttctgttcctgcattactttccttaggataatgacctccggctccatctaagttactgcaaacgacatgatcccattgttttttatggctgcataatatttcatggtgtatatttgctcaaagttatgcaaagattatttcactttctgacatatattctgaattcacttcactgtacatgtacgaaatatagaagacaatgacctcactttatcggccacagaataaatgcctcaaagatgtattcttaagtgttttgttttgttttgttttgttttcatggctgttgtaaaagagattgctttcttgatttcactctcagtttgaatgtcatcattgtatagaaatagtattcacttctgtacattgatttgata

SEQ ID NO: 468129 - DNA, 2197 bp, Homo sapiens
tcaggaggacaggagccctcctcagtgtgagcccttccccagctccccctgcatcgggagccaggctgatggtggcatgcgaagcggagcagggcatgggtgagtcacctcctcaccagcatctgagccaatacctccttgtccatggctctgctgtggccctggtgtggcccagggactccaatgtccatttccttcagagaggcgagtggaaccttctggttggaggccttgtcagagcagccctgatagacttggggatcccagaggctaaagggagccctggcaaacaacagacccagcttggagtcatggagcctctccaaaggttctgctggatcttaggcatcttctggtcctcccttcctgctctaatgatgaggaacttgagtccagagaagggaagggatgttattcaagtccacacagggactcagaggcagagctggtgtcctgcaccttactccaaggctctcagcagctttgaagcagaggactatgggaggccttgaagactccattatgcgtgggtgcccaggcatttggtcagacattattctggatactgtattggttgaaggtgtgggccctggagccagagtgcctgggttgaagtctcacctctgcctttactgactgtattgaccctgagcaagttccggaatccagccccctcctgtatagagtggaaataatggtagtacccagccctaggtgattgtgtaaccagccatgcgaggtggttttattatccttgcatttcgatggaagcagcagaggttcagagggttaagtgacttactcagagtgacacagccagcagtggccagaaaagtgactacgatctcaggtctctgcccttgacaccacctcggggctgctgaatcctgcctcctggaatcttcctctttccctccacttcctcccgccgctggcacctgattgataaaggcaggaccgaagccttctgctcgccatcctctctcctgacaaggctgcctcttgtcaggtctgaaaggcaagtttacaaggtatatctaaaagcctcctggacaggggagctggtttacatgccttcagggccggttcagtgttctgcttctaatgaaaacagactcccggttcctgagtgagctcagaagagactgtgggctgagagcaggcagagacggttgctgcaaggaggcaccagcctgtccttaatcttgggtgcccacgactcccctgcaagagccccctcctctttatctgctgtctcacctttccagaaacgttacaacacagggtctcaaactggtaggctgtgagtagcccccggccagtagatgagtctgggatgacccaagtggtgacttttttcttttaaagaattgagctaatgtttaaaagtcagatatgtcttaaggaaaaaaattgacttttcagcttctctttaaaaatatttgaagaattgtcagcaactctaatactcatcctaccctgctccacggcaatagccccctctttggagttttctccagggacccacacctcccacctttcccaatgcctctcttttcttagttacatttcctgctggttccctgggggccatctgaatttgagagccccatgctgctgcaggaactggcagcatggacttagtccagtgtgctcattatacagatgagggtgcgtggagacccagagagggaaagtgacttgcccaaggtcacccagaaagttaactgcacataagggactagcaccaggatgtcaactctcagggaagcatctgctcctcaccaaggcctgaacactggggtttccgggtttcccttctttgtggtcccaaggcagccccagcctccttcccgcagccccagcctcctcccggcagcttcattcccacccccaagtcatttgccaaagagagccttgcaaatttacatctgatctcattatgtcactcacttcccagctttgagaggaaagaacattattcctagtctaagcataaagtcagcctccttaggatgacactctgggctggcgctatgtggtccccacctacctatcccacctcatcctgtccctctgtcctaccctgcctgccagcctgtcttgtccattctgtgggaccatttgctcttccccaaacacaaagctgtgcctgttcctctggctggcccatactgctaccttctgcaaatgaaat

SEQ ID NO: 468130 - DNA, 1060 bp, Homo sapiens
ctgcctgtcataaaaccatcagaccttgtgaaatttactcactgtcacgagaacagcacaggaaaacctgccccgtctttcaattacctcccactgggtccctcccatgagacgtggggattatgggagctacaattcaagatgagatttgggtggggggaacagccaaaccgtatcacctgtggagatttataaactacacgtgctgggtcccaatgcccagatctctcctgggatcacagcatctctgtctgcacaggacaggaatcactgtacaaggcactgaagaagcagaggcccagctgaaggccttactcgagtttacttggaaaatagaagcaattggaagagatcttccaccagctccccaggaaatgctactgacccaatcttcaaaatgcgcccaggattccaccaatcctcctcacctccgctgctgctacctggtccaagccagtatctcccatctgggttgctgcagttgcctcctcactggtctccataaggcagctaacattctctgttacatcaacctctctgctcaaaaccatccctccaatggctttcatcttggtcagaggaacagtgcccatgaggtcctctgtgatccaagtcccaccactgccttcctccctctcttccccatgctcagttctttccaggcatgctccttcctgtaggcttttatacttgctattttcctctccctgggacacttttcatgctgatacttatgtggctttttctgtggccaccttcatgtctttgctcaaatgtttactttcacagtgaggccttccctgaatgccccatttagaactgcagtgcttgcccccatagattctttcttccctcttttccccttctttggaacagcattctttaccatttcacatgctatatatttatttgttgtccattttcctccattacaaagtaggctggtgtccattttcctccattagaatgtagtgggttgaattggactctggcccaaaattatgtccaagtcctagcctctggtacctatgatttcgtcttatttggaaataagctcttt

SEQ ID NO: 468131 - DNA, 1208 bp, Homo sapiens
cactattataaggaattattattttttcaatttttcactattatgaggagtactgtactaagcatcatcgacgtgcttccccacctggacctcctcccacccgcttcaccgcccccgccggtgctcctgccttgtgaagacgaggctcctgctccaatgggggcctcacttattgcggacttagagcagctgcacctgcccccgtccccacccccaccacaggcccctgcggagagaccttcagtccagcctgggccggatcccctctggcccgtggaaaaagagctgccgcctcccccagcagagcctgttgagagagaggcgtccacagacatccgtgccttctgccataagactgtgtccccccaggagctggctgtggaggccatgaagaggcagtaccatgtccagttcttcacgtgccgtacctgccgccgccagctggctgggcagagcttctatcagaaggatatgcgacccctctgcgaaccctgctgccaggacacgctgcagaagtgcagcaagtgtggcgaggtggtccgggaccacatcatcagggccccgggccaggccttccaccccgcctgcttcacgtgtgtgacctgcgcccggtgcagcggggatgagagctttgccccgggcagccagaaggaggtgtactgcctggacgacttctacaggaaatttgcccccgtctgcagcatctgtgagaatcccatcattcctcgggatgggaaagatgccttcaaaatcgagtgcactggaagaaacttccatgaaaattgctacaggtatgaggactgcaggatcctcctgtctattgagcccacggaccaaggctgctacccgctcaacaaccatctcttctgcaaggcgtgccacctgaagcagagtgctgcggggtgctgctgagagtgcccgccgggtgtcaggcagtgagcggactactagtcccggctggggccctttcctgacttggtttcccttcctgacctgctcttgcacactttccttctgagcctccatggggaccagcctgcaagtcggcccagcctttccaggacacagtggggctgagcgccgtcagaacttccactcctcctttaccctctgggtctatccagaaggttcctggaccatgagcgtcgcccccagaattccttgctggccccaccccacttccaggggaaagctggggggagtctgcc

SEQ ID NO: 468132 - DNA, 1102 bp, Homo sapiens
ttccttttgtcccccggaggcgggagaaaccagggaacctaagaacgcgcctaagcacacccagcctggagcctttgttcccacatctgcaaaatgtggataacaccacacgtttttttttcccacttggtagggatgcctcttacaattgatggtgtctcccaacgatatctggcagtgtttttctctttcctattgttgaagaaaacagtgataggactgatccgggtcagactggcccagagggcaaaaaagcatttgcttcgaaagccccatcaagaggaaaatctttctactgccagaggggctcttctgggaagcctgagtggagaggtacaggattccaagtgggaactgcagactcagagaatgggcaaggggtcatcgatggaccggagatgggatggtagggacagaaactgcagggtccgcagaaggaactgctcaccgaaagccaacaagcttgccctgtggaatcccagaaaggcccaggaacttcgggacatcactgaaggcagagtgaagagaggaagagaagacagagaaatggaggggagaaaactattaaaataagtaataagaaaactttccccagaagtgcagaatctgaatttccagtataaaagggtccattgagcgccaagaacaatgaaggaaaaaaggtcccactcaggcctacgtatcattgtgaaatttcagaactagagggataaagaaaagatcctaaaagcttcccgagagataaaaaagaagatttttacaaaggatcagcaatcagaattgcctcagactgctcaataaaaacatcagaagctagaagaaaatagaatgaggcatcaaaatcctgagggaaatgattcccacctataatttcatattctgctcaattatcaattgagtattgaagggaaataaagacatttttagacatgcaatactcattcatttaattcttataatgactctgtgtgggaagtgttaggttctatggaaaacagatatttaggaagagatttgcatgcaggaagtggggatgctctcaggaacaaaatctgtggagggcaaaggacaccagattaggcagagggagctgaactgttcc

SEQ ID NO: 468133 - DNA, 794 bp, Homo sapiens
gtgttttgaattccttgtgacttttcagacacacacacacacagtgactaaaatagcatccggcacattgtaagccggcaacaaagattcatcaaagaacgaatgagcttatgttacataaatacctcaactcccaagactctgaaccctcatcggcttggctggcagcaggtctagtcttttacaaatttcccgcgctctcacactgccaaggttcctctagaagtttccgtaagtttgtccctgccattgctctgcactgctgccagcaggtggagggagacattcagtcatgtcccctgagaccagattccacatcccctggtctccctggcagcctccaaggagccattcctgccatgccacctgcacctgctggcatctgcagccacaagtgctgctgcctctttgagctatcatgttgttgctggtcatgccaggagcttagctcaccccttgcagaggcagtttcagtccacaagttgccttggtttcaacctctgcccgtttgtacaggcattttggggctgtcataaataaagctgctatgaatattcgtgtactcatgttttggtggacatgtttttttttttttttgctttgaataaatatctgaggcttgaattgccaattatatggaaagtgtacatatttaactttatagtaaccgacaaactgttttccaaagtggctttaccattttgcattcctgccagcaatgtatgagcatttgtttgctctacatcctcaccagtatttggtatggtcagctaaaacctgtttttatatacaga

SEQ ID NO: 468134 - DNA, 1660 bp, Homo sapiens
ttgtagttttcagctcctcccacgagagattttatggagtgcctaactgtgctacccgggtgctgctcctggttgctgggaagattaaacacaaggtgaagtaaataaagccccagggacataagcaaaaaataatggcttctcacagcaatgctccagaacatacaacaagggaatactgggcccagtcccaggactatccaagtgtgaagccaacaccttttcacatcaactccaagctggtcctgggcacagaggaggctgtgttccatgctgaagacaagaacatatggtggacgtaccatcctaactatctgggaagggagcttcgtggctacatgggagttatcatctgccagtgccggctgcatcctggctgtgcccacctctggactctgaatctctgcacctcagtacccccaaccccaacacgactctgccttcctctggctaactgggacctgcagctgcagctccaagacaatggggcatcccacctggctgcttcggtgcaggcccagtgtgcaaggaacctgggccccaaggaagaggagctaagggccctgtcctaacttgctacatggcctttggcagattgcctccactctctgaggcttcttctggggaaaaacaacagggtggaaattgcagtacatgatgctgttgttctccacttggttgccccagcaatggcccttcttcctcgtggcagaagctggctctagtttctagctcctttcaacgctcccagaaccagcctccctatgccaccttagagtgttcgtgtttagatttttcctctccctctaatacgttttattgaaagtaacttcttttattaaatgacacctctgaaatatgtagtgcagttcctgttctcctggctggaccctgactgatgccatggggaaagccctcgggctcgtggaccttaaattccagcctttgctccccctatttcccatgaccataacccaattctgtctttttcctattttgaactttccagactcagaaatttggctcttcatgttccctgcccttgaaccgtcccagccctctctccaaaacaggcttcatgctggctgcatgggagggaggggtagcaaagtggaaagtgttccagaattagtgctaattctggctttgtcacttactcattgtacttcacctctctgttcttaacttttctctcatacataaaccacacggggttcttgggaagattaaataagaaaacatggtgaaaatgtattgcacagtacttgactcatttaattggtgacagacagtgttttaggtaatggagatacagtggtgctcaaggcaggcaagattcctgctcccaaagaatttaatttccaggagacaagaagcaagctagcaaatgtataagataatagttagggaacagtactcagcaaaaataaaaaatgtatggagagggactgaggggagtgaggaactctttgaggaggtgccactctgagacccaaatgacaagaggaattaaccacatgacattctagaaagagggaaaagagttgctgttaagaagatgtgggtgtgttaaaaaaaaattgcaaagtcccttaggtacgattgagctgctaatgatcaatctgaggcttctgctctgtgtcttataggtaaacggggt

SEQ ID NO: 468135 - DNA, 1575 bp, Homo sapiens
agtgaaagaagcatctcagctgcctcaaatggctgccatggcaaacatagtgctgcgaggagcaggggtggcctgacttgggggtgggcttcaatgcagagctgctcctgctttcggggcaaaattgtgatggaggaaagctgagaggtgagtcatatatgcaggaatgaatgaatgaaggtgatggcagcagcagcccacatggagtggtcactgtgaagatgccagctgcagaaggggaggtgcagttggggctgtgtgctccatggagctactccagcttcctgctggtagcccctccccggaagctgaggaacgagtgggagaaggcctgtagcatcacactggggactaggatttcgacctatggatttgcgggggatgcagacattcagtccataacagggacccttggtgcctgctctagcaactccagcaacaaagaagattgctgttgctcatatcctgtgcaaagacccttgccattcacagcagttcccctggtgtccatgctgcttctgactgctcacttgttgcctctcaccaccctcatgcttgtcatgggcctgtggtcatgtctgtcttaatactttataggtctttgctatagatccagcttagaaattagtcccagtctttctgtagatggtttttgatggacaaggactacatctctcacttcaaagttcctggcacttagcactggctgagcacaaaaaacacactcaaaaccatgagtgttcttggcttcccttcttcactcagccccctttccttcccactcttggtcactgaagatctggccttgtctcctggagcatattctcaggaggcaggggaaagacacgtgaggaatgtgggccttggaatcagatctgggttcaaatcctgtctctactgcttcaggctctggaagcttgggcagctgacctaccatctgtgcccctggaagacagggatgatggaatcaaccttagagagccagtgccaggatgacagaagacaatagatgcagagaaggttgcaccctgcttggccaagtcggtggtgactgctgcagccttcatagttggttagagaagaaaaggcagatgaagtagggggagggtggaatctctgctgttcagtcctgtttccaggtgaacttcaattttatgcattccatttaaaatagaagggatttgtgaaatatataaccataggtgatttgaaatggataaatttgtgaggctttgcctataaatgtgttatacataagactaaaaagatcctcatatctcctctctctctttttttttttttttgcaagtagggttcctgtgttttccatgttatgcccagggtgctctgagccccaggactcagagacccccagatgccttgttgagtgcccctcctatgagcatccttatgcctctgcctccttggcccacaggaaagcaagcagcggcagcctggcatagcttccttccctgactggaagaaaaagcctgatgtattaatgaccacacttaacaggcctcaattttaatctctgctttaaatttggcacaattgtttttacaataaagcctg

SEQ ID NO: 468136 - DNA, 625 bp, Homo sapiens
aaggttaagtttgatggcacaatgaaccatgctcatgagcaaaggagatacatgccatatgtgtgtccgtcattcttgccatcccatttgcatacagaattttcagtgccccatgaacacaaaattctggtggacccacagtacaatacatgggaaaagatactgactatagttgaagaaacagctcctatagaaattaaggatgccaaagacagaataactgagctgggatgtgttaatgcagcaggcacatatacttgtaaacttactgtgatagatggtgaaatagttgaaatggttctgaatcaaggtgattctgatagtagagacgatgaagatgttgttaatgctgcagaaaaaatgcctatagatgacatggtgaaaatgtgtgatgggcttattgaaaaactagaacagcatacatttataacagaacaagaaatcatgtcagtttataaagtcaaaaggaatccctaagacaaaaaccattaataagacatgactccagaggaaacattttaaaagtatccagggaattacttctcattcttagaagactcatttcctagttgctcaactgcttctgatgtttctttttcatctacaaaaataaaatccagtttac

SEQ ID NO: 468137 - DNA, 523 bp, Homo sapiens
tggagatatatccatatccatatccatattcatatccatatccatgtccctttgtcttagaaggttgcagtggataaactctaagtgtcctgagaacactaccatcagccctccgtatctgtgggttccgcatttgtggattcagccactcacagattgggagaaatgggaaattacaaaacccaggttcctggaagagcctgaaagggaaggagaagaggtttatagttcacctgatacagaaaaagataccaccagcttcttgggcatccagcaagaagcagtaaagggaaactttgaccaagacatcttggtaggatttttaaaaaaaatgaataatagagtagaatctgttaccaattcatgtacctggagttgcacaccaaagtgtggtctagcaaaaagactctccaagcttgaaggctgtaggcctgagtgtcctggctcccttcctaaccagcagtttgcctttgggccagtcatttaaactgtctggccctggttgcctccctggggagcagta

SEQ ID NO: 468138 - DNA, 601 bp, Homo sapiens
acttcttttgtggatcttcagttacttcaggccatctggatgtatacgtgcaagtcacaggggatgcgatggcctggcctgggctcagaggcctgacagcacttgctctgtcctgcttcactgtgggcatgacactggacaagattacccttaacaaggcaactttggactccggggaccaaattgctgatcaggccatgagcctcaactccccttctgactgcgggtacaatctgcttctgtctttggaggtgctgtacccaaactacagaatccataacagttccttgctttcctggattccattccacctttcccctaacaagtcccaattccgatgcctcactgacagactgagcttaataaataattgcttaagtctccttttgtcttacctcttggaaaagggcactattccacggcttcaggacttggagatgctaaatcgtcaaccttccattgatcctggagcctctaaggaaccatgtttcacccgaaaagctgaggatgatcacaatggatgtcagctctgttccccggagacaaccagctggggttaaataacaaggcataataattgccttcaggaatgctttcttcc

SEQ ID NO: 468139 - DNA, 783 bp, Homo sapiens
cgagcacacaacctagatccctcacatgtgcagttcacaataaggtttgcactcctatgagaatctaatgccacagctgatctcataggaggcagagcttagacggtgatgcaagtgttagggaatggctgtaaatatagatgaaacttcgcttgctcacccactgttcacctcctgctgtgtggaccagtactggtccatggccctggggttggagacccctgctttagagcttcagaattaccctctgcatagaatgccagtgctgctgtgggatggtggaggggtggtgttgctcattcaagattggttttcctatgtttttagtacctcttttagtgatatgaagttaagaccaggtactatcgatgaccccaacagcaaccttgaggaggcgattaatgaggcagaggccatcacctctgtgaacagcctgggaagcaagcaagccttgaatacagattaccttgattctgattaccaaagaggacagctttacccattctcccttagcagtgatgtccaggtggccacatttactctcacaaattcagccccaatgactcagtccttccaggaacggtgggaagcctttacagagggtgtgacaaaactcaatttgacattttcaagctatgtacaatgatgtgcaccttgcagatgctcaataaagtaattactgacaactcgttagcagttctgtaaaatatctaaaaggggagaatcctaatagttgaaatgaggcttggggactgtgaattgttgccattttcttcttgatcc

SEQ ID NO: 468140 - DNA, 1919 bp, Homo sapiens
cacgagtcataccatcatgacgttttacccaaccatggaagaatttgcagatttcaacacatatgttgcttacatggagtcccaaggcgcacaccgagctggcctcgccaaggtaattccacccaaggaatggaaagccagacagatgtatgatgatattgaagacatcttaatagccactcccctccagcaggtgacctctgggcagggaggtgtgtttactcaataccataaaaagaagaaagccatgagggtggggcagtatcgccacttggcaaacagtaaaaaatatcagactccgccacaccagaattttgcagatttggagcaacgatactggaagagccaccccggtaatccaccaatttatggtgctgatatcagcggctccttatttgaagaaagcactaaacaatggaacctaggacacctgggaacaattctggacctgttggagcaggaatgtggggttgtcatcgagggtgtcaacacaccctacctgtactttggcatgtggaagaccacgtttgcttggcacacggaggacatggacctttacagcatcaactacctgcactttggggagcccaaaacttggtacgtggtgcccccagaacatggtcagcgcctggaatgcctggccagggagctcttcccaggcaattcccggggctgtgagggcttcctgcggcacaaggtggccctcatctcgcctacagttctcaaaaagaatgggatccccttcaatcgcatgactcaggaggctggggagttcatggtgacttttccctatggctaccatgctggcttcaatcacggcttcaactgcgcagaggccatcaactttgccactccacgatggattgattatggtaaagtggcttcacagtgtagctgtggcgaggcgagagtgaccttttccatggatgccttcgtgcgcatcctgcaacccgagagctatgagctctggaaacacaggcaagacttgactgttgtggattacatggagcccagggttgcagaaagccaagagccgagcaactggagggaggacatagcacttaggagagctgctctgggcctgaggcatctccggaaccacataaccagctgtcccacacggactgtggccccaaggctctgttacaacccaaagggcggtggtaccgatgctgtgcctggatctgcaatccaagccctggagacgtcagcctgggttcttcccccttccactggaaggtggggtccttgtcgtggctgtggtcgtggtcgaggtcgtggtcgaggccgtggtcgtcgtcctcgagaactggggactgaggagacaactgttcagtctgcagctaagaggcgcctctcagtggggacagggagcagagctccaggccgcaaacctcagctccagttcgccgatgaagctttgacagacaaacccgcacctttgagcggtggccttccgcattttgcaaaggcttctggctgctgttgtgcccctgatcttcaacccctggggcccccactggatcctgatgaacccatgcaccctggcccctgcctgctatccctcgacagcactgctagtagtcttcctcttgttgtccctatgactcctcccagtgtcactgtgcctttgattacattgtccagggacactggtggagactggaaatccccggtgaatctggccaaggttgtagcaatggaccattcttatgcctctagggtaattgttacaaagatttctgaaaatgtagaagtggctttggaattgggtaatcagcagacgttggaagagtgtggagggcccagaagactataggaggttgagggaaagtttggaacttcctagacacttgttacattgttgtgaccaaaatcatgatagtgatatggaaaatgaattccagtgatctgtggaa

SEQ ID NO: 468141 - DNA, 1982 bp, Homo sapiens
cacgagtcataccatcatgacgttttacccaaccatggaagaatttgcagatttcaacacatatgttgcttacatggagtcccaaggcgcacatcaagctggccttgccaaggtaattccacccaaggaatggaaagccagacagatgtatgatgatatcgaagacatcttaatagccactcccctccagcaggtgacctctgggcagggaggtgtgtttactcaataccataaaaagaagaaagccatgagggtggggcagtatcgccgcttggcaaacagtaaaaaatatcagactccgccacaccagaattttgcagatttggagcaacgatactggaagagccaccccggtaatccaccaatttatggtgctgatatcagcggctccttatttgaagaaagcactaaacaatggaacctaggacacctgggaacaattctggacctgttggagcaggaatgtggggttgtcatcgagggtgtcaacacaccctacctgtactttggcatgtggaagaccacgtttgcctggcacacagaggacatggacctttacagcatcaactacctgcactttggggagcccaaaacttggtacgtggtgcccccagaacatggtcagcacctggaacgcctggccagggagctcttcccagacatttctcggggctgtgaggccttcctgcggcacaaagtggccctcatctcgcctacagttctcaaggaaaatgggattcccttcaattgcatgactcaggaggctggggagttcatggtgacctttccctatggctaccatgctggcttcaatcacggcttcaactgcgcagaagccattaattttgccactccacgatggattgattatggcaaaatggcctctcagtgtagctgtggggagtcgacagtgaccttttccatggacccctttgtgcgcattgtgcaacccgagagttatgagctctggaaacacaggcaagacttggccattgtggaacacacagagcccagggttgcagaaagccaagagctgagcaactggagagatgatatagtacttagaagagctgctctgggcctgaggcttctcccaaacctcacagcccagtgtcccacacagcctgtgtcctcagggcactgttacaacccaaaaggctgtggcactgatgctgtgcctggatccgcattccaaagctctgcatatcatacccagacccagtcacttaccctggggatgtcagccagggttcttctcccttccactggaagctggggttctggtcgtggtcgtggtcgtggtcaaggtcaaggtcgaggttgcagtcgtggtcgtggtcatggttgttgtactcgagaactggggactgaggagccaactgttcagcctgcatccaagaggcgccttttaatgggtacaaggatggtggccttcagcatcttgccaaggcttctggctgctgctgtgtccctgatcttcaactcctggggcccccactggatcgtgatgaaaccatgcaccctggcctgtgcctgctatccctcaacagcactactaggacactggtggggactggaactgattaagttcaccagggacacttgcctggtgaacatgggcaaggctgtagcaatggaccacttttacggctctagggttctgactccaactaagttttccagaatctcctgggctcctgactcatctgctgggtctaaagacactgagtttagggatattttcctccaatacatgatcaatcctctggatccacggctatggaatatggtgacaaatgtcagtgtctctcttattccaaccccaggatcagagaagattctttacctgcagtggggcctggtgggagatgactggatcatgggggtggtttgtcatgaatgatttagcactatctccatagtgctattcttgtgatacagttctaggaggatctggttgtttaaaagtgtgtacgaccgtc

SEQ ID NO: 468142 - DNA, 570 bp, Homo sapiens
ccttctcctcttttccatggaatatctagggcagggaagacagcattgttatgggagatgacagctccatgcatggtactgcccctgaagaccttccaatgggacatgatgtggaggtggaagacagtgatattgacctgacgcctctctctgaggaagacatgacactggacgacccagatcccacatcaaggaaggacttgctgccgagtcatgaggaaagcgtcaggaggcagcatgtggctgtggctgtcagctccacatccagcgactggcaccaaagcctaatccagagcaatgctctaactttcttcaattctgtggaggctgaaagaggtgaagaagctgaaggagaaaaatttgaagcaagcagatgttggttcatgaagtttaaggaaagaagccaccttcctaacatgaaagtgcaaggcaaagcagcaagtgctgatgtagaagctgcagaagttatccgggatatctaagataactgatgaagtcatctacactaaacaacatattttcaatgtaaacaaaacagccttctataagaggaagatgccatctaggact

SEQ ID NO: 468143 - DNA, 737 bp, Homo sapiens
gagataggacattccatcctcatgcctgtcatgtatggtcaaagctttctgaaagatttggcatataagttaaataatactgtcacttatctcctcttccctatcctgtttcagaaggatgggttgagattcaagacttttgaacaaatctgttctaagacaaataaacaccatattgagacccgtgaacaccgtgataattgctccatgccctctcttctccacttgacactggctgttgctgctgctgcccctactcacaccagaacttggaggcttggcctttgcttacttgagagcctgactggtttcccagggtcctactctctcctggctgcagggatgagaatgctactctcctgtgcactctctgagtgggcccaggtcctcctgattgcgacacaagcctacacctgtcctaggttttgggattgggtgggctacgtgtgcgtagccttgagctggcctccaactgacaggggctatggcttcttaccctgaagtccattttgtttctactctcttaattcatttgctgacattgaaaaaagatagaaaaagaaaataaattacaaatagctttattaaatgcattataataaaaagagctaatatttattgagtgcttttcatgtgttagattataacattatgtcagtcatcttaaaacaatcctgtaagacaggtactattacttccctcatctttcagatggagaactgaagctaagacaagtt

SEQ ID NO: 468144 - DNA, 1039 bp, Homo sapiens
cagtctacaattacccaatccttttagaatctcataattatgggctacattttaacgcactgttctttgctctctgccctgacaaacacacaatattcaaataggaatgatggtgagaagaataagccagaggaacagagtagtttccagccttcctgcagcaccttcttgactgcatctctggagagcagactgggtttctccaaggttcctctgcaccgggaggccccaggagggagggttgggctgaagcacctccatacttgtgcttggtggaccacacactctcctccccagagacctcatcaagaagttacagaactactgcctcctgggaagaaatttttatattgtgagccacataagagaattaaggaagtactggaagaagaacgtcatattaagagagatgaatgccacattaaaaatccagctgcagtggccctggaagggatttggagcattaaaaggaatctgcctgtgggaggcttgaagccaggactgccgagcagaaacagtttattgccacaagccaagtactactccaggcacggaggactcagaagataagatgaattagattttccattaagaaggaacctctttctgctgatgtctgaagaacggagaagaaactcaagcttgtttcaggatttaagatgtgtgcaaaaaaatgatagcctgtaattactattattggtattaatacctatctataaattaatccaaagtaatgaaagactattggtaatgttcagtaagtacctgaaaacaataaaggaaaatatacttatttttagttgtcacagttataattcatttggcttctaattcaggttattttattaaatatgtgaaacaatgatgaagcaaaggcacgtttaccgagtatttacttcaaggcaaacattataaaccttaaccctttactacagcataatgtgttagcccatttttaaaaaacagaactaaatccagatacagataatggaaaaaaaattaaaacatacttagcaggccaatgttcagacacagaaat

SEQ ID NO: 468145 - DNA, 582 bp, Homo sapiens
ttatgctagcattcacttcaataaggctttattctattattcaaagactgaaaggcacatcaaggatgagtctatcacttttttttcaaccctgtgtggcttttggtggtaaagatcagcttaaatttttatccaaatccaacgaagggaagaaagaatggtaccagttcctccttgtacctctggtagaattcggctgtgaatccatctggtcctggactctggttggtaagctattgattattgccacaatttcagatcctgttattggtctattcagagattcaacttcttcctggtttagtcttgggagagtccgctactatgtgccaggaaatgttccatatactggggatacagcagtaaataagacaggtgaggttctcccctcatggagcctgctttctaagagtgagcttccaacaccagcctggaacaccaaaataatcttcatttctgggtcttccaacagacaaagcaacaggacattgggaagcaactaaggaagcagtcctttttgtggaggagttcagtaggggtggggtgggagaggaatggcaggggtgctcagtgctcctccat

SEQ ID NO: 468146 - DNA, 966 bp, Homo sapiens
ttgctagcacagcagtctgagatcaaactgcaaggtggcagtgaggctgggggaggggcgcccaccattgctaaggcttgagtaggtaaacaaagcggctgggaagctcgaactgggtggagcccaccgcagctcgaggaggcctgcctgcctctgtagactccacccctgggggcaaggcatagccgaacaaaaggcagcagaaacctctgcagacgtaaatgtccctgtctgacagctttgaagagagtagtggttctcccagcacagagtttgagatctgagaatggtcagactgcctcctcaagtgggtccctgacacccaagtagcctaactgggagtcaccctccagtaggggcagactgacacctcacacggccaggcacccctctgagatgaagcttccagaagaaggatcaggcagcaacatttgctgttcagaaatattcgctgttctgcagcctccgctgctgatatccaggcaaacagggtccagagtggacctccagcaaactccaacagacctgcagctgagggccctgactgttagaaggaaaactaacaaacagagagcaaatccacaccaaaaccccatctgtacatcaccatcatcaaagaccaaagcaacagaacaaagctggatggagaatgactttgacgagttgagagaagaaggcttcagacgatcagacttctccaagctaaaggaggatgttcgaacccatcgcaaagaagctaaaaaccttgaaaaaagattagatgaatggctaactagaataaccagtgtagagaagtccttaaatgacctgatagagctgaaaaccatggcacgagaactacataatgaatgcacaagcttcagtagccgattcgatcaactggaagaaagggtatcagtgattgaagatcaaatgaatgaaatgaagtgagaagagaagtttagagaaaaaagagtaaaaagaaac

SEQ ID NO: 468147 - DNA, 798 bp, Homo sapiens
atgtaaaaagttcttatcatcccgtaccgctgctcagaagggtccctgttgtcacagctgctgacctcatagatctgacccatgcctctcgagagagaagaaagaaatgaatacataaaaggtacagcttggaggaattcacagaattgctttccttcaaagttcacacaaaatattaataagtcagggcagatcaacatcagcccaagagttcgcaggtcatttttaaataaagatactgaatgttgctctgatgaatttattccccactcagaaaatttgtctttcttgttacatccgtcctccaaggaaatcagcccctgcttagaaggctttctactcttttggcctctgttgccaggctggtcctcaaggactttttctccttaccctgacctgccagccctggcccagcttctctctctgacttcatttccctgtactcacctcctagcttgctccagacaccctggccttttgcccttccacgaacacaccaacctcattcctgcctcagggtctttccatgtgttgtggaacatgaattgaagaactcccttcctcaattcacttttctgcatgtcatttcctcagagtggtcttccctaaccatccttctaaacttatctccatcttctgcccagaaactcactcactttaccctattttattcttcacagcacttatctccacctgaaactattttatttatgaagttattttttttaactttttcctactgcaatgtgagtttcatgaggataggaacactttggattcctctctgtacctgcatca

SEQ ID NO: 468148 - DNA, 1909 bp, Homo sapiens
gaccttactctctgcatccacatggcgttttctacaacaaagattcagaaggtaggagcagaaggaagacactgttactcattggggctgtggcccagttggcttgaggaagtacaggcagggtgggtccttactggggcagctggaggggcacagactgctctgccggaagaggtaggcatttatgattatcaccacctaacagataagaagctaagagtcatagaagagaaggaaattgcccaagctgcatacctaacaagtgatggagatggaacatctggaaggaacaaaaatgatgacatggttcctcctgggaaaaactacacctacgtctggccggtgagagaagaatatgcacctactccagccgatgccaactgcctgacctgggtgtaccattcgcacatcgacgccccaaaggacatctgctctgggctaattgggcccctgctggtctgcaaggaagggacacggaatgatgtggatcgagagtttgttataatgtttactcttgtggatgagaatcaaagctggtacctcaatgaaaatatcaaacatttctgcaccaaccctgattcagttgacaagaaagatgctgttttccagaggagtaacaaaatgcatgcccgtattaccaacatttctggtcccagtcgcctctgcaggggagtctcttccactagcgtgtttctgtttccagccctcaatggatacctcttcggaaacttcccggagcctgatatgtgtgttggagaatctgtgtcctggcacctatttggaatggggaatgaaatagacatccattctatctatttctatggtaacaccttcatcagcagagggcatcggactgatgtcgtcaacctgttcccagccaccttccttacaacagaaatgatagccgagaatcctgggaagtggatgataacctgccaggtcagcgaccacctacaagctggtatgctggggcaatacaatgttgataactgcaaaagtgatattttctaccccaagatgaagggtcaacagaggcgctactttatagcagctgaaaaaattctttgggattatgctcctcaaggctataacaaattcagtggtcttcctctaaacgcctctggcagtgactctgatctctacttcacacaaggggacaacagaataggaggaaaatactggaaggttcggtatactgaatttgttgatgcaacttttactaaaagaaagagactctctgctgaagaagcccatcttggaattcttggcccagtcatcaaggcagaggtgggtgataccctgttagtgacctttgccaacaaagccgacaaggtctatagcattttaccccatggtgtgatctatgacaaggcatctgatgcagccccaaacctagatggatttgtgaaaccaggggcgcatgttaaaccaggtgaaaccttcacatacaagtggacagtgcctgagagcgtaagcccaactgctggtgatcctccctgtctgacctatctttacttctcagcagttgatccaattaaggacaccagctctggcctggtagggcctttgctagtctgtaaaaagggcgtcctcaatgctgatgggacacagctatgtctacatgatattaaacatattaatgaaaagagaaaaacagtcatttaagcatctattttaccaatcagaaatagcaaggacatttatttaaatggtatattttataatttttggcattgtgtggctccacttctggactcaaaggaatttccagatttaaaaaacacaaaatatcttgatcctatttggattttcctttctctacatgaaggaacaatcccggaaatgtctattgcatgtgttataagactgaatgtttatgctgtgcctcaacaagcacacaaggcaaagc

SEQ ID NO: 468149 - DNA, 561 bp, Homo sapiens
ctaacggatatgaagatgattatatggggagcactgagcagactatatgaaagggagtctataattaaagaactgaggggctttgcctccgttctggcttctctgaaatctccaggctcagtacactcaatcgatgaagagaggaagtttcacatgtgctctgacaatggctccaggtgcgtgggcatactgagcttggccttggctaccgcagtcatcattgccaacctcctgctatactttcccagtgggcaggtgctggagcctgccaagatcacagacttgatgaagtgtgtccctaaggacttgtccagtcacaaagcaataatttcatctgggggccaccttacctatgcccccagagcatggccggctgctcttcctctgtatccagtggtcacttacgaaaagacaatttatttgtgtgaaatcccagtgccaagcactgagtgctcagcaaatgggtgaataaatggatagggcataaggaattctctcaaaaacaaggtgaccacctcccctctgggtttttcttcaccctagtaggcacagtgatgttgc

SEQ ID NO: 468150 - DNA, 715 bp, Homo sapiens
gggtctttgtggaggtaattagttaaaatgagatcattctggattagggacggccccaagtctaatatgactggcatcgttataagaagaggaaaagaaatacacacaggcacaaaagaaggtcctgtgaaaacaaaggcagagattaaagtgctgctgccacaaccaaggaatgctaaagatttctggcataggtcaagcctggcacagtctggatctcagtccctgactcagaccctggatgctcgctgccttgtacagaaacaacctgctcaaccaaacagggtgaccctgctgaagccgcaaatgtccaacagtcctgccaaccgtggatgcttctgtagcttccctttagctctcactcctggcatgaaaccagacacagactacccagaagatgaactgagcactctgcaatgggcccagcacactgctgcatctgagaccatcttctcggccctaacaaccctggcgggctcttctctctggtggggaaattgggcttagggaaaggacatctttaggacagtcatcccaccaagtagaatgactctatgcagcctgaatactgtttccctgggaggaaaaaaatccaaagcataaacttttataagctgttttaattaaaacactctttgtaaagtgatggatttgaagcaagggaggagaaaggttttctggcaaaagtgtcttttgtggtgtttctttggtgagc

SEQ ID NO: 468151 - DNA, 711 bp, Homo sapiens
gcctaaggtttgcagggtttttttatgatacagcctagcaggctgtcctttggaatggaagacagggaatttcccataacggaggaatgggatcaaatggcttggaggtgtccccctaagaccagattatcagcaagtgcctggcacatgctggaaccttcttggaccaacgttggatttttgtactggagaaaccaagagaggctatgcaggtttctgttaaccaggctcgcaggatacttaccagtaggcaatatcagtgaccgatgtgcgtgcacagagaggcgactggaggctgaggaccttcctttgtccaactgctgtggcctgctctccagggtggaggactcatccagggacctgatggtaatgccaggccctgatgcccaactagctcacagtgccagataaatcaggaaaactgtctttctcatttttatgtttgactgagaaatctcttgctgaccatattctcagcacatgcatggtgggaaggagataagcaacatggaatagtccaagtaaaaaaaaaaaaaagacttgctcaagtttgcatggctttatttagctccagttcagaactattgacttcagtctgttctctttacctgacccacatttgcctcaccacctggcacctttgaaggtgtgggtttttgtagtgcttcgtgcagtgttttgtagtgccggatcagattaatatttggggag

SEQ ID NO: 468152 - DNA, 615 bp, Homo sapiens
tcaattatcaattgaccataaacataatggcttacttctggactcaattatattccattgatctttcactgatgtataatgcgagtgcgtttgacagtgaaggcttttccacattagctgcatatataagatttttctcctgtacgggagcactgatgtacaatgagattgctcttcacagtaaagccttttccacattcactgcatatatggggtctctctccagtatgagtttgctgatgtacaacaagaaaatgatgatatccaaggccagcaacctccttcttcttccgtcattgcttcacttgagttatcttgcttttgggagccaggacctgagggctgcacccgaatctctccagacactactggcagtgacaaaacatggcatccatgtccgaaaccgcttcctattcagatgcactcctgcgcggcctacgggacgctgagcggtgacgatgatggaatgtaattattactattactggctgcattgtcaagcaaagcaaacgacaagcaaagaaaatttttaagatgtgaaaatgtaaattaaagttatatatgaaatcaacaaacatattacatttgccatagtcttcttatgtgaattaatgc

SEQ ID NO: 468153 - DNA, 1401 bp, Homo sapiens
tgcctaacgtagatgacgcattgatgggtgcagcaaaccaccatggcacatgtatacctatatccaaccaagatattgccattcagttactcacgctcattcctgcatcatacattatcttttttagaggtgtttttaactgcaggaatggaaagaaattcatcggatgccaaaaataacacgaaagaaaaaatccctatgggcttgccccctgtgggctgcacccactgtccaaccagtcccaatgagatgaaccaggtacctcagttggaaatgcagaaatcacccatcttctatgtcaatctcactggcagctgtagaccagagctgttcctatttgatgatcttggaagtgactcctctggacttccagagctcagggcttttgcagcctccatacttgcattggccccctggatccactttctctctcaaactgtcttttctcattcctttgactccgctggacttcattgcccccatgacctggtgttgagtctgatcaccccaacaagtggtgtctttgctttaactattttttgcatactcacaaaccaatcagcatgcactccccattctgagtccataaaagatcctgcactcagatccctcaactgtgtaacttgcaccccttacttggggtatatgtgtgaaaaggcataccttcaagcttcaggacggctgggagcctgctggcttcgggttgatgtggagacagtttcacagcgtgtcatcgctagacctcggtgctggaaatctcagcatttcatgatccctccgccctgaattgaaaacgagcatggagagcagcagaaagcactccaggttagttacatatgtatacatgtgccatgtttgtgtgctgcacccattaacttttttatgatgacttaagtattaccaagtaagggtaaactttacaaacctaactggttgaaaagcttactggtttgctggcttacaacgtagtaatgcatgcaagttcatctctttcactgaaatgttgacgatattgaaaatgtagaatcaagtataattacttgcaaatactctcatatagattaactgtaaaattctgaactgttaattatatcaattgtgaatttaataaatacttattataaatcattctttaccaaatacaagcaagatatagactttttgtcttaaaaatgcaaagattccttatctatggaatacttttagaaagatgtacctgatctatctagttattttcatagtaaacaaatctggaatccatggatttcttgaatatggctttctgcaacatatcacatatgctgtgtaactctctgaacataaaatggaagggtttactgatcaaaacagatctcttttttgagagagaatgcatctccctactttttattacgctgtatt

SEQ ID NO: 468154 - DNA, 708 bp, Homo sapiens
ctgtgggcacagcttcagcaaatttaaatgtccctgcctgacagctgtgaagagagctgcggttctcccagtacagtgtttgagcactgatgaggtacagactgcctcctgaagtgggtccctgacccccggtgtatgcagactggaagacacctcccagcaggggccgacagaccaaagttagaaaaatccatgaagatggtgagaaaccagcacaaaaaagctgaaaattccaaaatacagaacgtctcttcttgtgcaaaggatcacaactcctcactagcaaaggaacaaaactggatggagaatgagcttgacgaattagcagaagtcggcttcagaaggtgcataacaacaaacttctccaagctaaaggatcaagttctaacccaatgcaaggaagctaagaacgtggaaaaaattttagatgaattgctaactagaataaccagcttagagaagaacatcagtgacctgatggagctaaaaacacagcatgagaacttcgtgaagcatacacaagtatcaatagctgaatcgatcgagcagaagaaaggatatcagggattgaagatcaactcaatgaaataaagacagaagacaagattaggaaaaaaagagttaaaagaaatgaacaaagcctccaagaaatatgggactatgagaaaagaccaaatctatgtttgattggtgtacctgaacgtgatc

SEQ ID NO: 468155 - DNA, 712 bp, Homo sapiens
gcataatacccctttggaattcgaagcattactttgtttggatgtgcatatttgaatacaaaaagagggttaccacctgtgagaagggtgaatatgaagaagcagatattccctttgtgaatcaaagaacaaggaggccaatctatccagggcaaagtgggccagatggagagtggcaggagataaattcagagaagtggtatctggtggtggaaatttctaaggagcaaaacattcaagagctgactttggtactgttaaaagcattcagttttatgtattcacaaatacatggtttggaactggaacttacacttaaaagggaaggagagcataaaagtttggaaaatctgcagcctgatgatgcaagagaaaaaccattttctgaggagaaattcaagcctgcttcagaaatttgtcagtgtgagaatggactagagcaatacctattttccactggcaaatttattgtggatatgaccaaaatctaaattctgtgctcatagtaaaatcaaaaagttccgtaagttgtaaacttaggttgtgatttgagaattttcttattttttaaggacaagcttaatttcaaagtattaaataaaacttttcttgcagcattatgcacatagtcttttgtacataaattacttgaatacaagttatgttttccttattggactatatattccctgaaagtgagggaagtacaagg

SEQ ID NO: 468156 - DNA, 1555 bp, Homo sapiens
aagatatgaatgtcccaatttccacatacatgacttgctcctccttgccttctgccatgagtgtgaggcttccccagccatgtggaactatctcagaggatgtatggaaatgcctggttgttgaggcaaaagtttgctgcagatacttgttgaatggttgtgaccaaaatgctgatagtgatatggacaatgaagtccaagttgaggtggtcacagagggaaatgagaaacttactgagaactggagtaaaaatcactcttgctatgctttagcaagggaactggtttcaaaggatgtgtggaaattccttaatgtccagacagaagtctgctgcaggggcagagcattcatggagatcctcaaccacagcagtgcagagaggaaatgtggggttggagccccagacagagtccccactggaggactgcctaatgtaactgtgagaagcgggccactgtccttcagaccccagaatggagcccagttcttgcagcagcatgaccaggatgtgagacttggagtcaaaggagattattttaaagctttgagctgtgatgattatgctgcagggtttcagacttgcatgaggccttgaaggtgattttctctggtggtatgttttaattttttgctttttttgtatgtgtatctgttacaatttttatgatttgaggttatgaggcttgcaaataacatcttataatccacaattttaaactgatgacaagttaacatggattgcaaatataaactctcaaataagcaaataaaaatgaataaaaactatgttttaacttcattctacccacttttaaactttttgttgtttctatttataacttattatactgtctaaatcctgaaaagttttagttcttagttttgacagtttcatctttgagtctttcttctcaggatatgattagtttacaaaacacaattatagagttacaatattatgtatttttctgtgtagttactattaccagtaagttttgtcccttcaggtgagttattattgattgtcaccatccttttatttcaggttaaataagtcccttcagcattttttgtaggacaagactggtgttgatgacataccctcagcttttgtttgcctgagaaagtctttacttcatttaatgtgtgaagaatatttttactagatatactattctaggataaaggttttttttttttttcagcactttaaatatgtcttaccactctctcctggcttgtaaggttttcgctgagaagtctgctgccagacatattggagctgctttgtattttatttgtttcttttctcttgctgcctttagaataggctttttatccttgacctttggaaatttgattattaaatgtcttgaggttgtcttactttagttaagattgcttggtgttctatgaccttcttgtactttaatattgatatctttctctaggtatagagaaaataacattctctgttattttccctttgaataaactttctttgtctatctctctctacttcatttttaatgccagtaactcttagatttatcc

SEQ ID NO: 468157 - DNA, 2747 bp, Homo sapiens
ttcttaccctgtggaaaataagtgttgcttcgtgggtaaccactgttacccagtggacaataagtgttgcctcgtgggtaaccactgttacatgatggatagtaagtattgcctcgtgggtaaccattgttacccggtggacactaagtattgccttgtgggtaaccactgttacctggtggataataagtgttgcctcttgggtaaccactgttacctggtaaataataagtatttccttgtggataaccactgttacctggtggatgataaatatttcctcatgggtaaccaccattacccaccggatactaagtattgccttgtgggtaaccgctgttacccggtggataataaatattgcctcgtgggtaaccacagttacctggtggagaataaggtaaccactgttacccagtggataataagcattgcctcacagcccgttgatactaagtattgcctcgtgggtaaccactgttatccggtggataataagtgttgcctcttgggtaaccactgttacctggtggataatatgtatttcctcgtgggaaaccactgttacctggtggatgataaatattgcctcatgggtgaacaccattaccggctggatactaagttttgcctggtgggtaaccactgttacccggtagataataagtattgcctcgtgggtaaccacagttacccagtggataataagtcatgcctcgtggataataagtactgcctcgtgggtaaccactgttacccaatggataataagtactgcctcatggataaccacggttaccctgtggaaaataagtgttgcctcgtgggtaagcactgttacctggtggataataagtgttgccttgtgggtaaccactcttacccggtggataccaagtattgcctcgtgggtaaccactgttacccaatggataagtactgcctcgtgggtaaccactgttaccctgtggaaaataagtgttgcctcgtgggtaaccactgttgccaggtggataataagtgttgccttgtgggtaaccactcttacctggtggatactaagtattgcctcgtgggtaaccactgttatccggtggataataagtgttgcctcatgggtagctactgttacccggtggataataagtattgcctcgtgggtaaccactgttacctggtggatgataaatattgcctcatgggtagccaccattacccaccagatactgagttttgcttcgtgggtaaccactcttacccagtgggtaaccattgttacctggtggataataagtactgcttcgtgggtaaccactgttacccaatggataatgagtattgcctcctgggtaaccactgttaccatgtggataataagtgttgcctcgtgggtaggcatgcttacccgatggataataagtgtggcctcgtgggtaacgactattacccagtggataataagtatttcctcatgggtaaccactgttacccggtggataataagtattgcctcatggataaccactgttacccggtggacaataagtattgcctcgcgggtaaccacagttacctgatggataataagcattgcctggtggattaccatggtaacccgatggataataactattgcctcgcgggtaaccactgttacctggtggatagtaagtactgcctcgtgggtaaccacagttacccgatggacaataagtattgcctcatgtctaaccactgttacccggtggataataagtgttgcctcgtgggtcaccactgctacctgatggataagtgttgcctcatgggaaaccactgttacctgctggataataagtgtttcctcgggggtaaccactgttaccctgtgtctaataagtgttgcctcatgggtaaccactgttacccaatggataataagtattgcctcacgggtaaccagagttaccctgtggataataagtattgcctcgtgggtaaccacggttacccagtggataatacgtgttgtctcatgggtaacaactgttgccctgtgtataatgtgttgcctcgtggggtaaccactgttacctggtggataatacttgttgcctcgagggtaaccactgttacccggtggataataagcattgcctcacagggtaaccactgttatccattggataataagtattgcctcacgggtaaccgctgttactcagtggataataagtactgcctcatgggtaaccactgttacccaatggataataagtattgcatcctgggtaaccactgttaccctgtggataataagagatgcctcgtgtgtaagcactgtgacctggtcaataataagtgttgcctcgtgggtaaccactgttacctggtggataatatgtatcgacttatgggtaaccactgttacccattggataataagtattctctcgtggaaaagcactgtgacccagtggataataagtattgcctcgtgggtaaccactcttacccggtggataataagtattgcctcatggtggataataagaacgacctctggggtaaccactgttatccagtggataagaagtattgcctcgtgggtaaccactgttacccggtggataataagtgttgcttcatgggtaaccactgttacctggtggataatgagtgttgtcttgtgggtaaccagtgttaccctctggataataggttttatgtcgtgggtaaccactgttacccattgtaaaataagtatt

SEQ ID NO: 468158 - DNA, 577 bp, Homo sapiens
ctcttaatggtcataaaaggcatggccctatatgtttcattaaaaagcagaattacatttcctaacctgcccatttatactttggtcagtgtccacttacactttggtcagtgtcattcagaaggcaatgccttctcagggcctgaagcagctaaagtgaaggggctcagcttccctgagagagcaggacaaatagactttctccttgatctaactgcaggcacactcgctgggagctctggccccaggagggctacgtccagtacctctgagcagagagaagtaggggagctagatctcatcaccccaggctacaaggcagaagcttctgaggaagacagtgtccacgtctgctaccttcccaaagatggcttcttcatgatttctgagagtgaggatgggaagggaggaagagaaggtgggccttagactaagatctggcccttgaataaagtaagttcattcattcatttattcattcaatcagtcagtcaacagaatacatattgagcacctactgtgaggctaaagctacattgaccttgaacagataactaccagaatcgtaatgattacc

SEQ ID NO: 468159 - DNA, 547 bp, Homo sapiens
cactaagtccatggtcatttgcttgtgcttctgctactcattttgctacttcatcacattctgcctcatgtggttctgcagactgagcccttgtctcctcaactggcctggatgccccaggagtccagggaacacaacttgcaaagtgttagcacatcatcaaggcttagcacagcacgtaagaagcattcggcagatacctggagacgggacccgatcaaatgggaagaagtgccagggcttccgtggtccaggcacagtgccaggtcttaggtatatgatggaaagctggacaggtggtgcccctcttacaggaagcagacaggctagtgggaaagacaaagagacaatattaatgaactgtgctgtggtgagctatggaagcacctggaagaggcaactaaattggtctatggggtcatggagggctcctcggaggcagtgacttttacaaagagatcagaagaatagataagagttagatctctggaatttggatgcctccagcagtattagacagtaaagcccatgcagcaaattgccggct

SEQ ID NO: 468160 - DNA, 628 bp, Homo sapiens
ttaatccatgatttcctctactcctcagattgttattctgaaacctaggctttgagggagtgtggccctgacccccagagccccagcagggcacctcgctgccggcctctctccccagggtgcagccataagcccaggagcttggctatttatagtcaggctctgacatctccgatgatttacctttcagatctcaagtcaacaccactatctcattttttgcaaagatcagaagcagcacaatgtgattgggaagctgacagccctgcagaagggccaccatctctattaagccctggaaaaggtgattctctcaagggtaccaaaacctaccagaccagaattttgaatattggtccccactctcttctggctcgtagagtttctggcgagagatcagctgttagtctgatgggcttccctttgtggacaggaccctcagctgcaggtctgttggagtttgctagaggtccactccagaccctgtttgcctgggtaccagcagcggtggctgcagaacagcggatattggtgaactgcaaatgctgctgcctgatcgttcctctgaaagttttgtctcagaggagtacccggcagtgtgaggtgtcagtctgcccctactgagggg

SEQ ID NO: 468161 - DNA, 643 bp, Homo sapiens
cagtcactgacaagcagggccatggtcagaggagccaagtggagcctcaggctggacatgggcctgggaccattgcagacactgctggaggaagggcacacgcctgtggcccaaaggagcagccgaacatcatctctggggagacggcccccagagaaaatcctgttcatattcccagcaagaaggaccaccagtatctctccagttagaggcatgggtttcttcctaaagatatggatgaggatacttgcattcccaatttcatatttgttttggagacactggcccactggtccccggaaactgccatgtgctgcctctcgtgtccctctgactttgttcttccctttgcctggaatgcctggctttgggaaagatgcctctgcaggctctggttcaggtccattgtctgtgaagctttgcctgaccttctttagggtgagctctttatcaccccttcttgtgtttccatagtacattgtgtggatttctgcatcacgaatcatcatattaaattagaacttttcttgcctgtcacttccttcgattgtcatctccttgagggcagggaccttctatttttacaccactggttccttgtaaagtgcctagcaatctttgccaataagaaatgctttcttct

SEQ ID NO: 468162 - DNA, 510 bp, Homo sapiens
cccgtgggcacacagggcagaaggaggcctggatgccttctatgtacaggcaaggaaatgaagccagccaggaatctgtgggtccatcattaaaaagaggactaggaaaagaaagaggagaagatgtcaagaataaacttaacattcgaaaccgtgatctctgggcttcagaatgctcgcagcttagatcgttcaaagaaaaagcaagtgcagaaaatcttcacgaagacagccccatgtctggctttgattctactcctgtggaaaaagggaagagcggattttggtggactaccagcatcctctactgttggtgttttaagagccaagtggagacacagcaagcagtgggacgaggaagcagagcagagagaggaggtgaagaacggcagccactgttagcagctttcaaccagggtgacctgtttgatgcatcagatgatggtccccaaagcatggatggatgatgtggttgtgggctgaacacttctgttcatactgctgatgtgc

SEQ ID NO: 468163 - DNA, 815 bp, Homo sapiens
gcagctgcaaaatggtctttctggcctcttaagaggagcttatgctgaaacccctggtttctgtctttcatgctcgaggaaatgaaaatggaccccttgattacttgtgtccccaagttgttgctcatgtgtccattgagaggcatgttaattgctcatacaggccctttgcatgtccagaggtgtcatctgagagccagagactagagtcaaaaaccttggaactctacctgatgttctattgcatatcagctgagctggcactcaaactacaagatgcatcccttcccactctttctatcttttttcaaaggcagaggagcctcatcctgtggccatggccaacaaaggctcatagaaagtactgccaaactaccactgatgttcccttacatgggctcttcagtcagcttgtggtggatgttgcctggcctgggactcactgttcaggacagtgggctcccctctggcccagggcaagtccagaaatactgaccaagagccaaaccctggaactggggaccctaagaggccacttggtgctctatcccccagtggctgagctggtacctaaggtgaaagacaaatgtaaggataatgacatgaaatagaaattgtcttttaatagacagatgaaggtaattatagtgattataatagatgctggcaaatattgcaataaatggactaatttagttcacattacaggaactgttaaaactaaagcattaaattatgtgtgcaatatttattaaaaatcacagagcacaaattcctttgaattggtaattttatagaaaccacctctcatcttt

SEQ ID NO: 468164 - DNA, 1058 bp, Homo sapiens
tccccagcacctagcacagctcctggcacactgtcagcacccgatgggtattgaagattctggcaacagaaatcctgaaaatcgagtggaaattcctggggatgaggtgctggctggcaaagcagagatgtcctttgcaggctcccagccgcatcgcaaagcagagtatagcaggttggatggggagctggaagacaatagcttaattaccaatgctgcctttgaaagtgggaagctcttatctttcagagttcgtaaggacgcagcaacaaagcgctgtgattcaagcagacagcagccctcaccaaacaccaaacttgctggtgccttgattttgaactttccagcctccaaaactgtaagaaacaaatttctgttctttatgcatcacccagcttcagaacctgaaagcacaatgtctttctgctctggctcggtccatattccacttggcaagctgcagtgggccctgcccctaggttgaagtgctggtgaagaagccttgacagagccttgctaactcctgcttgaaggggatgggtggagggtttaccacaatgcctggtgggctgaggtgaggacagctgagaaaggatgactttttcaaaagaaacttttgtggtgcttgtgttgcaagagggatctaagatgaaatttatcatgtgactaatgggcctctgccccagacattgggcctttattatgcattgtgaatttctaggaggctttactagatttaacatcttgctaatagatttgaccacaggcttatattcgtgaaatatttcatggggataattttctgctgaacacaaccagggaaatattctagaagatttcaagggcaacagtttacactgtcacctctactttaaaaaagttctgcattagaattcttaaagttctttagaatgtgtcatcttaataataatgtctgacatttattgaattcttattatagaccaggcaatgctaaatatttcacatgcattatgttatataacctccaaaacagccctcgaggtgctattactacctgcatttcatagatgaggaat

SEQ ID NO: 468165 - DNA, 1495 bp, Homo sapiens
ctgaataggaagagctccagtctacagctcccagcatcagcgacgcagaagacgggtgatttctgcatttccatctgaggtaccgggttcatctcactagggagtgacagacagtgggtgcaggacagtgggtgcagcacaccatgtgccagccgaagcagggcgaggcattgcctcactcgggaagcacaagggatcagggagttccctttcctagtcaaagaaaggggtgacagacggtacctggaaaatcaggtcactcccaccctaatactgcgcttttccaacaggcttaaaaaatggcacaccaggagattatatcccgcacctggcttggagggtcctacgtccatggagtctcattgattgctagtacagcagtctgaaatcaaactgcaaggcggcagcgaggctggtggaggggcgcccgccattgcccaggcttgcttaggtaaacaaagcagctgggaagctcgaactgggtggagcccaccacagctcaaggaggcctgcctgcctctgtaggctccacctctgggggcagggcacagacaaacaaaaagacagcagtaacctctgcagacataaatgtccctgtctgacagctttgaacagagcagtggttctcccagcatgcagctggagatctgagaatgggcagactgcctcctcaagtgggtccctgacccctgacccccaagcagcctaactgggaggcaccccccattaggagcagactgacacctcacacggccaggtactcctctgagacaaaacttccagaggaacgatcagacagcagcattcgcagttcacaaaaatccgctattctgcagccactgctgctggtacccaggcaaacagggtctggagtggacctctaacaaactccaacagacttgcagctgaggctcctgtctgttggaaggaaaactaacaaatagaaaggacatccacaccaaaaacccatctgtacatcaccatcatcaaagaccaaaagtagataaaaccacaaagatggggaaaaaacagagcagaaaaactggaaactctagaaagcagagcacctctcctcctccaaaggaatgcagctcctcaccagcaatggaacaaagctggatggagaatgactttgacaaagaaaaaagaataaaaagaaatgaacaaagcctccaagaaatatgggactatgtgaaaagaccaaatctacgtctgattggtgtacctgaaagtgatggggagaatggaaccaagttggaaaacactctgcaggatattatccaggagaacttccccaatctagcaaggcaggccaacattcagattcaggaaatacagagaacgccacaaagatactcctcgagaagagaaactccaagacacataattgtcagattcaccaaagttgaaatgaaggaaaaatgttaagggcagccagagagaaaggtcgggttacccacaaagggaagcccatcagactaacagtggatctctc

SEQ ID NO: 468166 - DNA, 1221 bp, Homo sapiens
tatagctgaatctgaattatctgaattctcaaggggatgcaaaatggtacagccactttggagggcagtttggcagtttcttataaaagtaaacatactcttaccatacaatccagaaattgtgctccttggtatttacccaaaagaagtgaaggcttatgtctatgcaaaagcctgcacacaaatgtttatagcagctttatttataattgctaaaacttggaagaaactgagatgtccttcagcaggtgaatggataaactgtggtacatccagacaatggaatattattcagtgctataaaggaagacacaaaaggctccagttcacaattgcaaatgacaatctcattctgtcagtcagaggtagttgccaggtgcccaagaccatggaagcccaccccttgcatcatcgtgccctggatactcataggcagaaggaacttgccttgtctgaaatgagactttggacttggacttttgtgttaatgctggaatgagtcgagactttggggagctgttgggaaggcatgattgcattttgaaataaaggaatggaatctgagctaacctaccatgtttgtactggaagtcctgccaacagcatttaaggaggcctgcctctcctgcagtcaggtgtgaccaaaggagtatgagtgaaagtaatgtgtgcctctacaaaacctgacgcatatgaagaaacaaaccatccatccacacctgatccttgtcttctccatctgccagctgaatggagagaaacaaagaactcctgctgacccacactggactatgacatgagcaagaagcacacttttattatgttaagccactaatattttgggattatttgttagagcaatggaatctatcatgatgaatacattttttaacattctcatatcttttctttttttttggctaaaattgatccatattctgcgtacttgcttttgtcactgaacatcatgtaaatttttccaaatctattagtatagaggctactcattctttttaataggggtgtaataatcctatatgtattgcagtatatatttaatatgttattatattcaataattatgacagatgagtatttctttgtttttagattcttacttctataaatgatgctgcaataaatattcttatacatccccatgtgtgttattaacacaactattctcttgataactttcaaaattataaaatttgccaaaga

SEQ ID NO: 468167 - DNA, 700 bp, Homo sapiens
catttcctttattcaatggtttccagggacgagcagggaaagccggcagtgacagttatcacccagctcccacgcagccagcaaggatagtactactttagcccaccatgctccccaacagcaccgagtttatattgaggcagccggccctgctcctcccagccatggtttctgtggtcctttgtgcgccaaccccggattctgccctggaaaattcacactcagtcgaaatcactgcaaagttcagctggaagtttccttctccctgtggtctattcccaaatcagctggcagcccaccccaaggacccctgtgagataaagtcagaaatgggttccctgggggctgggagtgccttcagggctcttcccgctgcttcttctacttttatatttgcttcgctctctaaattcacctcagctttaggcaaggttaaaaccttctccgatgatctggattttcagtcttcctgtggggctgccacactcaaagcttttgctgtggaaattcctgagagccagactagtgattattactgttcttctgggactagccaaccagtggggctgccacactcaaggctggtgctggggaatgtctgcaagggatctggtgttgtaattcatcttcaagtctcccagcagtgggtaccagcccgtgtatctttacatttctgaatgcaaaataaggtagttcaaac

SEQ ID NO: 468168 - DNA, 546 bp, Homo sapiens
agtatctctctccatgttgtgctgcccggagttggaggagaagcaatgtgggcaaggaaaaggctacatggaactaggcatgttcaaaatggcggctccatcttcctttctctttgccagccatgtgtatagtaaggagcaggcaatatggcaccgaccaggcgatcctttccctgaggtttgggaaactcttcagaggagcccatggaggaagcagtacagtgttaagttagtgaggaacaacctggcccaggaaatgggcctgtttggcaagtgtttgactgaatcagaggagcagccctgtgggcaggagatgaaatcagagggagttgaagctgtcttctgcactgagtcagttcctgggtgggaacaagacgaccagatgagacagtttatcatctgggtggtgccagctgacccatctagtgcaggatctgcaaaatatgtcaagccctgatcttaagttgtacaatagtggtgctatccccaggagccatttggggagggtttgttttgggagaccgctgttgtcatctttgtttcaaa

SEQ ID NO: 468169 - DNA, 778 bp, Homo sapiens
gaggagccgaatgttaatccccaagacaatgaggaaaatgtctccaggtcatgtcagaggtcttcatggcagcccctcccatcagaggcctggaggcctaggaggaaaaagtggttttgtgggccaggcccagggtccctgtgttgtgtgcagcctagggacttggtgccctatgtcccagccactcaagccagggctgaaagaggccaaaatagagcttgggctgtggcttcagatggtgcaagcctcaagccttagcagcttccacttggtgttgggcctggcagtgcagaaaggaaatgtggggttgcagcctccagatagagtccctactgaagcaccacctagtggagctcaaataagtctcttgagacctgatgattttaaaaagaggagttcccctgaacaagttctctctctctctttgcctgctgccatccatgtaagatgtgacttgttcatctttgccttctgccatgattgtgaggcttccccagccacatggaacttggtgctcgtgcttggtccaaacctcaaggagtgagtacttagagtaaaggctttgccgccttctttgtggcttcacctgtgactccccttctagactcaggaacatattggtatcaaaaccctttgcaagaaacttccattaggtcaaacattcagtgctagaaaaatgaaaatcttgctgtatcagggtatgatgccttatgtaactattttaaaaggtttatttggcacattaaggaaatgtaaaatgtttcattttcccctcatt

SEQ ID NO: 468170 - DNA, 547 bp, Homo sapiens
gagcgagtgctgaaaccagtctagcaggttcaggaaatggaattctgctgtggagcctgtagagtggcacaatgctggcgcttagagttacctaacagagctcagtgtgaaggaaatattttttactggccttttgctgaacaaggaaaatatccactaatcatgcaggtggaagctcagatgattgattttacatctttcttttctaatacatgcatacaacgctataactctccctctgagcactgctttcgctgtacttcacaaattttgatacagagaaagatggtggaaaaggattttccagcaattatccccctgcagaaatttcaattggaacaactatccaagcataaaaatgccttcacaagagagaaaaaacaaacaaagaaatgggagatgacagaacctggttgtagcaaaataataagaaaagatgtattgaagaaggcaaatgggacacttacacattatctccatcacccccgcctaaccccaggcaatacagcatagagagagagaaagagagagacactgtccactgggt

SEQ ID NO: 468171 - DNA, 509 bp, Homo sapiens
gacttcagacatgccacctttaagagctgtaacactcactgcgaaggatggaaaacgcaggcacaaaaactaaacaaccagaatgggagaggtactttcagtggtacctggagagtaaaaggggagaagatctcctcatctccctacagaaggccaacaatcaatttagaaaagataatcaagaactctctaattttttctctctcttaaagaaaccctgggaatcccttacttcccccttggcacctctcccacctccaccaacaccccaactctaccctgatctctctgaatttccccaaccagatctgtaccctccttctcctgcatgttcaaatctaccatcttctcctccttgtctaccactggctcaaacgaagacagtagagagtctaacttcaaagaccctacctcctgctgattctctggtagccccagtggcagcctctcattggaagatgtggaggagagggaccttgcagggacatttctcatgatcaccctatttc

SEQ ID NO: 468172 - DNA, 638 bp, Homo sapiens
tgtctgaattctaactctggctcagttactcacttcagcagtgtgactttggcttcagggctaagcgggatggaatcccttcaagggcatcctcccctaagctacagagctactcaagaggtcatatctccctctgaggaaagcacaggaggaattaggacttctctggggccatcccaggtcctcacctgccccctgcccctgtgcttccttctacctcctcctggaatcaccctctttcctacagggagtacctcccttccctcctctcctcctgtctccctcccccagcctgagacattcaggccagaagaacatcctggcatctgctgggggtcggaaggctttggggacagacgtgagctgagggtggagaaggggagcgaggtgggcactgagaacttcagctcaggtcggggctggccagctctgaacctcacaggaacaatagttctcttgccttggacctgcctgtctgtgtacagtgggggcccaggccctgtcattcttgctaccccatctctcattgtggcttctgtttcctaggtcctcgaggatttttctcatttcccagtctgactttgtagccttttcctacctttctctgcagcgatagttttgtattttctgcttaagtt

SEQ ID NO: 468173 - DNA, 554 bp, Homo sapiens
taccctgcaaggccacagaaactaggatgaataattgctgtctgcagctccacagctgcccctccctgctccttagcatgaagagctgtcctgctgttctttacagtttggtcaaaagccgatttttctcatcaccctgctttacagaggctcagcacacttcaatagaatctgaaggtagtacctttatgaaagaggccccagagagctccttcacgtctttcaccttggaagaacaagagagggtaccatctatgaacaagaaaatgggccctcaccagacgtccaatctgcaggcaccttcatcttggacttcccaggctccagaactggtaccaccttctatgaatggaacactggagagtggtcattgtgccttgataactagcactgctgggattgatgccaccttcgcacctatgaccaccgatggagggggagactttggccaaatttctgcattaaacattatatgcctagattagcacctagaaggcagtgcctctcggcagtaaccagttagttggcatgctaagattgcacatgaaagtctt

SEQ ID NO: 468174 - DNA, 556 bp, Homo sapiens
gggtggtgcaagatgtgctttgttaaacatatgcttgaaggcagcatgctcattaagaatcatcaccactccctaatctcaagtacccagggacacaaacactgcggaaggctgcagggtcctctgcctaggaaggccagagacctttgttcactttctgattttgagcttttcatctggggctacagtatcagcttctacatcattggcaagtgttccaagaccttccacattgtgcttttctggcatcatcacaagctgctggcctttacaaacagaccgcctgattccagctttcccaggacaacagtgcccatatccttgtacttacccaaaattggcagcctgattggtacagcaactgatctattgaagtctgacaaattacctagatatgaaccatctcctggctctgcttcacttatttcttctacgtgcttccctaatcttctcgtcttatgaggagaccagtcattttggattaggactcacactagtaacttcattttaacttgattacctctctaaagaccctatcaccaaataagatcacact

SEQ ID NO: 468175 - DNA, 925 bp, Homo sapiens
tgttcttcagtaagcactgacagcgggtccttgtcaggcagatcccacccagagaatccactcggctctgggatggtactgggtgttgtctgcacagagtcctgtgatgtgaacacgcacaggtctctcagtcacggctaccagcacctgttccagtggaggtggcagagggtgcaatggactctagaagaacaatttgcgaatctgacagccccgagaaccagacaggttcagagtgactccaggtcagctatgtggtcgtataacatcgctggacaaaaaggaaagcgacacagaaactttaagacaagaacccagaactcgcagaactgtgacagtaaaagaactgtagtgctcctgctcactgagctgctggcagcaggagtaaaagagctatttccagtttttccagcaccatctactgaagagactgccctttctccagtgtatgttcttggcacctttgtcaaaaacgagttcactaatcactaactaagttccaacggaacaaggatatatttaatttggagccccacagattagtcttcattgcagtatatttgcagagataattattttaagagtaatatgccctttaaaaagcacactggttatgtcttcagttcttaagaagaaagttaagtttgaacataaatgagttcaggaatcaagtctcagtgcccttatatactgggctagttacatgaaacttgtaaggcaggaacttccattagctattaaatatttggggtctttctgacacaatgcagtatcccaagtacacataagagaattttgttgtaggtttgtcaaggcccaaagggtaaggatctgtaatggacaccagtataccaatatcttcattagtggaaataattcaaagaacaggaattgccataacctttcctgaagaattacctctttc

SEQ ID NO: 468176 - DNA, 789 bp, Homo sapiens
cacagtgtgtttacaatattgggagtaatatcatatctacctttcgaaattatgaacaatatcacaggaaagtgtaaagcaccggcgatgaacaatgtcacaggagaagtgtacgccccctgctatattgggagcaatatcattctctcccccctggatactaaaaacaatacaacagtggggtgtacaccccgtgcgatactgggagtaatatcatcttctcccttacttgatattagaaacaatatcacagaagggatgtacaccctctgcattaatgggagtaatatacttgcccccttggatattagagacaatatcacagtggggatgtaccttaactgtgatgttaaaagtaatatcatcctccttcctttggatgttaggaacaatatcactgggagggtgtacaccccctgcgatattgggagtaatatcagcctctcccctccatggatattagaaacaataccacaggagtggtgtacacttcctgcgaaattaggagaaatatcatcctctccacctttagatattacggaaaatatcacaggggaggcctacacctgctgtgatattgggagtaatatcatcctctccccacctggatattaggaacaatatcacaggtgggtggaaacccactgtggtattaggagtaatattattattaattattaagcatttatttttatcatctatattaaaaatattaatgttaatattaattattaacattattttactgttatcaatattactatttataatagctaatattattatgtt

SEQ ID NO: 468177 - DNA, 823 bp, Homo sapiens
agcaaggctccgtgggcataggaccatccgagccaggcacaggatataatctcctggtgtgccacttgctaagaccattgggaaatgcagtattggggtgggagtgacccgattttccaggtgccatctgtcacccctttctttgactaggaaagggaattccctgaccccttgcacttcccagggctgctgcagtttgctgagggttcacttcaggccctatttatctgatttgctaccgagcgaggagatgtcactcaaagaggctagagaacagcaaagattggtgcctgctccttctgggacctctgacctcaaggggcaacaacctgatgccagtaggatcactcctaactgccaggagaagaggccaagtccgctggtccagagagactgctgcgacacctcccccaattccaattctgtccctgagcctctggctggagttattggagatcctgcagggaagccccgcccaatgaggaaggctgggtcaggtttaggcctgaagaggcactctggccacagaaactgccacagccagtgtgcctcggtggcatgggttcgcgagtgggatcttccgatccgtgggttgcacagttctgtggaaaaagcacagtttccctggctgggtagcacactcactcgccacctcccttggctagggggaggaggttccccttccccgtgtggctctcaagtgggccgcgcaccacactgttctttctctccgtgagtcactccagctttctagtcaactttgatgagagaacctggatactttggttgccggtgaaggattcacacgctaattttttttttc

SEQ ID NO: 468178 - DNA, 797 bp, Homo sapiens
aaccactgctgtaggccagttgcacgaatgtatctggagggcaggaagatgtatgggtctaaagctcaaaagagagaactgggaggcagaaaaggttttggagatgtcagtgtatatacaaccacctaccagaaaaacacggagtgtgccaaaatgaataagattcagtccctacccccaaggagcatgcagtcacatggggagaaaaataggcaaacagtcacagcagagggaatggtggctgtacccaggaagaacgtgatcaggagcggaattggagagagagaaggggccagaggggagtttctcaatgccacccttcagtcttcgctagcctcatctgcagcaaggtgggtctggctgccccaggaagatcactgctgctgctgctgctgctgccaatggtgcactttgccaccacctttggcaaagaggcctttgtccagactcctggcctcttccttctccctgaagtgctttctatttcctcctcctgtctggaaggatcccccaaatagcacatcttcctttcacaatgaacttcttggttctgggtagtgtgtctccttccctgcaatgtcatcttcatggttcagccttaatggtggaatactgcagaaggaaagaggtagagtgcctggtactccataaatgtagctaaataaataaatgaagatgtgaaatgattacatttgtctttgagagtggctaattaatgtttgtttttaaaaggttgagcttggagatgtggagacaagagcctggactaaggttgtaaactaaggtggtaatgataa

SEQ ID NO: 468179 - DNA, 1162 bp, Homo sapiens
ctccagacctggggtcgtgttctcagaggactgctttgccttttgaactgataattgcaaaattccatacggaatggcccttgtggataagcacaaagtcaagagacagcgattggacagaatttgtgaaggcatcatgaatggacccctgcactcccacccccgatggtgctgctggactgccgagattgcaccgtggagatgcccatcctgaagaacctggccaccatggccttctgtgacgcacagtcctcgcaggagatccaccagacggttttaaatgaagccgtgggcgccacgatgtaccacaccatcaccctcaccagggaggacctggaaaagttcaaggccctgagagtgatcgtgtggatagacagtggcaacgacaacgtggacatcaaggctgccgcgagctcggaattgttgtgtgcaacatcccagcatggagcaaatcctcgaggtggccttgggagtggtccgcatccgtgggtagacgctgtgggtctcatgagctttggtcgcacgaggcaggcagttgcatttcaagccaaggcctttggattcagcgtcatattttatgacccctacttgcaggatgggatagaacggtccctgggcattcaatgggtctacaccctgcaggatttgctgtatcagagttactgcgtctcctcgcactgcagtctcaatgaacataaccaccacctcatcaatgactttactataaagcagatgaggcagggagcattccttctgaacgcagcccctggtggcctggtgggcgagaaagccttagcacaggccctcaaggagggcaggattacgagggacagctttgctcagggtccattgaaagatgccccaaatctcatctgcattcctcacactacctggtatagcgagcaggtgtcgctggagatgagggaggcagctgccaccgagttccgccgagccatcaaaggtcgcatcccagaaagcttaagaaactgtgtgaacaaggaattctttgtcacatcagcgccttggtcagtagaccagcaaacaattcatcctgagctcaatagtgccacatacagatatccaccaggcaccgtgggtgtggctccaggcgacttcctgcagccgtggaagggatcatccctggaggcatcccagtgactca

SEQ ID NO: 468180 - DNA, 599 bp, Homo sapiens
agaaagatttcttaacgggttgagggtatccagtggtggtgaagagaggaaaggtgcatggaagatgagggacaaaaacagcagatgtccaattcatggacaagtctgtgctagtcagctgttgctacaacaattactgaatgagtgtgacagtcgccacacccccacccatgggacttgggcagacaagctgatcctgaaccatgtcttcagtgataaccacttcaggcctgagaaaggtctcttttcaaagtgcttctgttcacagtcccaggaaggaggtaaggaggtgtggcttacatcatctggggtcctttgtccactgcttcgtgtctacataacaacaaaagctgtcaatgatggcacaaagatggaacgcagaagacactgtgactgtctcatggggagagtctgtgtaagaaagaaggcaagtggtggtgagaaacacacccaaggcgtccatctcattctgcccccagagcagtctggcttatggttcagcttcaccagggaaatgtctttgactctagtttaggaaggaagcgctgagacaaaaggtttgagggtggtgaggtggggtggaggtgagcgtatgcagg

SEQ ID NO: 468181 - DNA, 608 bp, Homo sapiens
ccttgctctggaataggctttggcttaagagcccaatcgccaactgactgctccccaccacgggttacagcaatgcctgcatctccatctcccttgattcccactgtcaccaaagatgctgtttacagctggagaaattatattgagactacattactgcacacacacacaatcaaagtgaagtgccctaatcaaccaactgcatatattcaacttgaggaaaaagtttttccctacaacatcgaattcataaattggaagaagcaactgttacaacaggtgcacagatatcaatgtaaggacaagaaaacacgaaaaatcaaatttgtcatctccagaacacaaaattcttcagaaatagatcccaatcagaaagaaatttataaaatcctagaaaaaataattcaaaatattgactttaaagatcagagtaaacccccatatgttaatagtaaccttaaatataatgaattaaactttccacttaaaagatataaataggccaaatggataaaactacataattcaactatatgctgcctacagtaaactcatctcacctgtaaggacaaataaaggctgaaagtgaaagaaagaaaagcaatagt

SEQ ID NO: 468182 - DNA, 577 bp, Homo sapiens
tatatatatatatatatatatatatatatatatatatatatatatatatatatatatataaaggactgaacatagaatttcttcaaaaccccttcagagaccttccctgtttgaacagctttattctactctcctatttcattggcagtatggctggcacaggattccaagttcaaaagcatttcctcccaatatttgaaagcattgttccattgtcttctggtttcccacatagcttgctcccgccatctctaggagagtatcacatacctgcacctgtgctgtgtgacttgcagtgcttttctatgcaaagcatgttgtcctctaccccatttgtggcagacatggccatgggactggctttaatggaatgtgggaatgtggctgttgctacaatacaccacccagatttccctccaggaatgaaggataaaatacccccagctgctgggagagctgccagaaaacctccctcagctgttagccctcttcagggattgcctgcgctgaagaaaattgccctacccaagatcatgtttccttccagaagcagcctacctcccaatgactgatcagc

SEQ ID NO: 468183 - DNA, 898 bp, Homo sapiens
tctgctgagagctgaacactcaatgggacgacccatctacagagaggggcaacccactgtgggtctcttccgagctgttctaacactccaaataaagcttctcttcatcgtgttcacccttcacttgtctgcatacctcattcttcctgcacacaagacaagaacttgggcaaaggtgccaccagccacagaggtttccagccagagaagagacaccccaaatatcccccgggagcttcggcaagactcacgtctccaacaaccgagctccctgggtgagcaattcctgtcccttttaagggctcacaactttaagggggtccgctttacaccaaaccagaatcaaaaccaaaatcagagtatcaagaaatccaagccaggtcgaaaccaaaacgaaagtatcaagcaatccaagtcaagtcaaaaacaaaaaccaaagtgccggtataggcacaccgtgggtgttcaggccacactgccactcaaatggaatgggcaagttccaaagactagtcttagcaagtttcagatgtctggactccaagtgccagttccttcccggtgttcagccactgtgttaatcctctgtgggggcctgcatgcgctgctctggcaaggcattccaccggggcaattgcctacccaggagcgctctcaggatctgcgttgctcaagctggctggagtcccccgcagggatgttccacagggcaagcctaagccacctaaggggctgcctcaaccgtccattaatcacctcgcttcccggtcagggaaccaagaaatgcagcaggacaagccgcagacaaaacccctcagataccaagttaaagaaggaagggctttattcagccaggagcttcagcaagactcacgtctccaacaactgagctccccag

SEQ ID NO: 468184 - DNA, 1221 bp, Homo sapiens
tgttgcacgtcctgagaggggggtcaaggaactctcctatttcatttggacccctccacaactccacccgatgcatctcttcctttggctggttactgagaatatacaagctttcagtactatgaatcttgcaagcaagttattgaatctgagggtgattttgggaaactcaaaacttatagttgagaagtggggcattgctacaaagatacctgaaaatgtggaagcagcttcagaagtgggtaatgaacagaatttggaacagtttggcaggcttagaagaaggcaggaagatgaaggaaaaggatgtatggaaatgcctggatttccaggcagaagtctgctgcaggggtggagtcttcatggggaacctctactagggaagggtggaggggaaatgtggggttggagccttcacaaagagtttccactggggctgcctagtggagctgtgagaaaagggcctctgttctccagaccccagaatggtagatccactgacagcttgccccatgcacctggaaaagctgcaggcactcattttccttctaacagtcaggcccgtctgctacaggtctgcaggagtttgctggaggtctgctcccaaccctgtttgcctgggtatctctggcagaggctgcagaacagcaaagattgctgcctgtttttccctctagaagctttgtcccagaggggcacctgccagatgccagccagagctctcctgtatgagatgtctgtcagtccctactgggaggtgtcttccagccaggatacacgggggtcagtgacccacttgaagaagcaggctgtcccttctcagatcttgaatgctgtgctgggagatccactgctctcttcagagctaccaggtagtccctggctggggctgctgcctttttttcagagacgccctacccagagaggagggaatctagagaggcagtttggttgtagcagccttgctgagctgcagggggctccacccagttcaaacttcctggagctttgtttgcactatgaggatgtaggctcctcccgagttgacctcgcggatctgctccatactctgtacccgcatcgcttcccgcagcgtctggtacagccacctgttcttccggtacagatggaagtggaattgactatctgttccactgctatggacaggatgctgcacacagcgatcctgagcttgctggcagccctgatgttctcatagtc

SEQ ID NO: 468185 - DNA, 1019 bp, Homo sapiens
ttgcctcagctgctctaacacgtgaccacagtttagacgcacaatggaccaagtggaaggcaaagcacaagagattatatggcatgagaaggacgtgaagatgattgagcagcacaatcaggaatacagccaagggaaacacagcttcacaatggccatgaacgcctttggagacatgaccaatgaagaattcaggcaggtgatgaatggttttcaataccagaagcacaggaaggggaaacagttccaggaacgcctgcttcttgagatccccacatctgtggactggagagagaaaggctacatgactcctgtgaaggatcagggtcagtgtggctcttgttgggcttttagtgcaactggtgctctggaagggcagatgttctggaaaacaggcaaacttatctcactgaatgagcagaatctggtagactgctctgggcctcaaggcaatgagggctgcaatggtgacttcatggataatcccttccggtacaatcccaagtattctgctgctaatgacactggttttgtggacatcccttcacgggagaaggacctggcgaaggcagtggcaactgtggggcccatctctgttgctgttggtgcaagccatgtcttcttccagttctataaaaaaggaatttattttgagccacgctgtgaccctgaaggcctggatcatgctatgctggtggttggctacagctatgaaggagcagactcagataacaataaatattggctggtgaagaacagctggggtaaaaactggggcatggatggctacataaagatggccaaagaccggaggaacaactgtggaattgccacagcagccagctaccccactgtgtgagctgatggatggtgatgaggaagaacttgactgaggatggcacatccaaaggaggaatttatcttcaatctaccagcacctgctgtgttgaatgcacacttcaatcattgaagatccaagtcactgacttttttgtgtagttgtattagtctgttttcac

SEQ ID NO: 468186 - DNA, 2144 bp, Homo sapiens
ggttaaagagagaagaggttcttatgttttatcttctcttcttgtctgcatttgccgcgttgaacacagagaaggagaaaaaacctgaatctcagagactcactgaaaaagccccagcattagtaccggtcatggctcctgggccaggacttcaaaggagcctggaactggctgtaactggaaggaggtcctggatctgcataccagggctggcgaggtgcctttcgctggaagtcctgactccttctcaatgcacaaggacgcccttctgctgccaaagctggctggtggttctttctggaatggcagctttccccatcccccttcaggcttgggtcgatcttctggcaggcaaacgtactaaagagttacaggtggtgcagatacgatccacatcctgccctgggggaattgacatccatcagattgcttctttaattggtgggtctgagtgtggccccatttacccagtggctgtgctaaggtttaacgactagaccagtggtttgcactagcacttgtcctagttatttgacactttttgctgtaggtcaaacttcactttcatatgtcactccctccactctctgctggctaagtgttaagcaaggtgatttctaagatctttcagtctctaagctgatatatttctgagtcgagcaaacatgaaatttaagtgttgtcctggaaaatccccctctacttaaaccttttcctttcaggggataggcgtgtctttccagaaatagagttcaacagcatcaagctaccatcatccaatggaagtgataggaaaaaaattacctagatgactcatttatcttgtgaaccatggactcataaagaagaaaacacatagcaggaacatacatatgttattacatgctgagatagtaaggttaaagaaagttagagaagctttccagttggtaatgtaccacaatttatatctgcagttgtctcttttttggttatttcagcctgctgtgtagaacattctttacactcatcctggtgtacatgtgtgcaagtttctgtagtctagggcatagacccaaggtggacacgtttatattatcaaactgttctccaaattactcttactttcttctgacatgtgtaatgtgatgttaaacatgttcgtgtaatttttattataaatttttccagttttagaagttggttttttaaatgacaatgccactcattaccattttctattctctgaagtatttttaaatttatccttatttatttaaatacataaattattgatttttgccattagtttcagaaactagttgtgattactaatgtgtcctagctcccctgaggctctgctgtaaaatagccagtgaatgaggattttttaaaggtgatgagttggccagtgatgagggagggcgaagagtggccggtggggtggggtggggggacacagaaagcatacatgtcttgactcagtgtggttgatggccagaacccattttcaatcctatgaaatcagagctttctcttggcaaactggctggtttattagtagtgaagttaatttgaaaaatgaaataacttccaacaagttaaaaagtaatgctttaaaaatttcactgtattaattttaacattggcttttcatgttattacgttaattttatatgtgatggttcaagtgaaaggagttgttctattttaaatatgacattctatttgtgaatacaattctggaaatattgggagaaacgtaattggtaaaagtattttctattaaattctctgggggtggtggtggaatgttttcttaaattattttggttagagggcaaacactgtcttttaatgatctttgaatcagcagaacttatttagcatagagactgacatacaaaagttaataaatagatgcaagaaaaactaaaacacagcatgaagtggtggggagaacactccacacaaacccagaagtctttccctttggcctcagctctatcactaatatgctgtgtgatggagacaatcacttaacctttctgcagcagactctttctttatgctgcaaggcagaggagtgaaataatagtggtcttaaagagttgctctgcttgcctcatgtattagtccattttcatgctgctgataaagacata

SEQ ID NO: 468187 - DNA, 522 bp, Homo sapiens
cccacatctggatagagttagaatgagcgggaattacttgcagcatttaaatataggcctgtacctctgggtccagctggtgtcacaatgctgcagacctttggatgaatgtgaatatccatatgctccccacatctctcagccccttggcaggaaggtagccaatgagctgcagcatttgaaaactgatgtgctacctttagctttctcttctgttgtcatggtggccttgaaagtacgtgcaccaagattcacagcaataagatttaagcagattgagtccctcagctgtcctggaggacaagtgggcagacggaagcccccagggccaagtgacaggcttgttctggctctgcctggctcaactcagggattggaaggggaggcacagaattgtgccaggagctttctctatgggctcctctgcttagacccagctggcttggcttagcaacagtgacatcgagggggcaggattcacattcccttttcagaggctttggcagcctctgcagctgtagc

SEQ ID NO: 468188 - DNA, 674 bp, Homo sapiens
ctctagatttctaaaaagagaggaagatataatgatagtggttatgacgtgtggttggggaacagccgaggaaacacttggtccagaaaacaccttaaattgtcaccgaaatcaccggaatactgggccttcagataaaggctatggttttgatatttatcttgctgtgcctacgccttatgtcagacccactgaagtagaatctcaggggagtcgcttggatgtttatttgtcacacaatcctgcgggaacatctgttcagaatatgctgcactgggctcaggcttcaagttcctctacgaagaaagatgttcaggatatagggcttcctactgacgaggagacagataggtcctcttatgagcatggccttccagaatttcaacagcagcagactgctgcctctctgaatataaatcatgatgagaataattttaaactaaaaatcaggactaaattggaatgagtaaaagattgtaccaattctgtgaattacgataagatttatcatttttattacttattttcttaatctttattgaaatttagcttatgtttctaaagactggggcataatgttaatcttctttgtatatttcttctgtactgtctttaaatgtacactattttcttatattattttaacgtgcttattttattttaggctgttaatt

SEQ ID NO: 468189 - DNA, 768 bp, Homo sapiens
ttcagttacctcccaccagagatgtcctacgttgggctgagatgaccaggcctttagaccgcaaacagagtgaaatcatccaacatcaaggctatccctgtgaggaatatgaagtcgcaactgaagatgggtatatcctttctgttaacaggattcctcgaggcctagtgcaacctaagaagacaggaaaatctaaaataacactgagttccttcctcctggcccttcactcacagtccacagtgacccacacgttctctcccttgagagacaaaatgaggcagatggaattcatgaagactgtcaagatgctggatgagtttggtgtagaaggcttttgtcctacagggagactgcatgtgtgtttggtgcccgtttatagcaataacaacaagagctacccatctgatctgagaatactcatggtttgttacagagccgagcaagtgtatatgctgcccacactcttgctggaacatctgtgcaaaatattctacactggagccagagatatgacggtccctacagcaatgtggacaggaggtcaggactggctttcaaatccagaagacgtgaaaatgctgctctctgaggtgaccaacctcatctaccataagaatattcctgaatgggctcacgtggatttcatctggggtttggatgctcctcaccgtatgtacaatgaaatcatccatctgatgcagcaggaggagaccaacctttcccagggacggtgtgaggccgtattgtgaagcatctgacactgac

SEQ ID NO: 468190 - DNA, 609 bp, Homo sapiens
cagattgcctgtgaactcatcactaggagatgatccaagccattcatgagggatccgccaccatggtccaaacccctcccaccaggccccacctccaacatcgggaattacaactcagcatgagatttgatccggggcaaacatccaaaccgtatcactccctatgcaagaagcagacaacagacagattaaaagacacgatctttgctcttgagagctcctggtttaatgggggaaacagctgcagagacaactgccatatcatgtatagatcttcttgtcaacaccaggaatggggcacaatgagattcattttgcagatgcagacgctgaggcccaaggaggtgaggcaaactgctcaagacctcatgatcgccagcagtttgtgtgaatgtttattggcagataccacatgggcaccagccaatgagaatgaacactgtccgtcttgccatattggtgcttgtattagtctgttttcatgctgctatgaagacatatccaagactcggtaatttataaaggaaagaggtttaattgattcacacttctgcatgggtggaaaggcctcagggaacttacagtcatggtggaaagggaagcaaacac

SEQ ID NO: 468191 - DNA, 1061 bp, Homo sapiens
ttaagagtggcctttgaatgcccattgtctttgcacgatgctggccatgcagctgacggcacaattctatttcttctttcctttgggttctcttggtgataggcagtttgccatcggccacataatgacaaagaaatccaaagaactctctcaggctctccagtatttggcccaaacaatagcagcagggaactgcagattgtcagagctggaagactccttgcaaattaccaggggcagctcttttacagatgaggaaaatcaagcccagagagaaaacgtgaccccccaaggccacacagccttgactttgggtgaattgtttaccctatctgggtaccactttccttatctggaaatagaaagtgtagagacctgtggtagctcctttgagtgggtgttaggaagacacaagaaaggaggtccctttagcaaatgtgttatctgaaagcaaggtcctcttaaactccctgttggaaatgctgggggctgggatgaaggactgaaatgtaactggattgacgtccttttctcttctgctttctgcttctcttccctgtttcacaaatctgtgatcaatgcacaaattgatcacagtggagcaaagacagacttctgagagccctttgcaaattgggactctgaggctgtcacctcccctgctctacccaagaagtaaccatgatcttgaaacacctctatcctttcctgtttttttttaaaacaaaacaaaacaaaacaaaactttattttgattgtttacatatgtatccctaaataacatattgcttattttttgagcttcataaaagctgtatcatattctgtaaggtcttctgttacttgctgttttcccccatttaaaatgatatttctaagattcatccttgttatggttcgaggccgtgtttcatctgcttttctctgctggagcacattgcatggtaagagtacaccaccatttacttatccatactccttttgatgggcacttgggttggattcagtgtttttgcagttataaagagtggttctatgagtgtttcaatatgtgcacacac

SEQ ID NO: 468192 - DNA, 595 bp, Homo sapiens
ccgacctgggtttggaaaccttcttcaccattcattagcagcatgaacgtggaccagccaaatccgtccgtaaggaagtcagcagccttgtgcaccaacagccaacttcatggctcagcaagtgaccaggcatctgcccgggtcccggagggcaacccattgaatgctgcccttgagtcatccccaccagtgtccccaggcataggacatcacagccccagcaggcagagctcacgggaagcctgctgctcccagggctttggtgtttttccagaagaaaaaggaggaggaaatgaaatggcctttcctcatttgctgtgcagccctttatccaagtgtaaatcaaactcctccaacacacacctgcacaacagcttaagaggaggagagtggagtggagaggaatccagacaagaagactcaaaactgctccttctgggtgacagaggggagagagacagccagagaaagagagaaaaaggggataatgagaaagagaaagggaagaaagaaccgtgttcagcatcagcagggaagcgttgccttggctctccactggcaaccactggataaggagtgatgatggcatcctgac

SEQ ID NO: 468193 - DNA, 5264 bp, Homo sapiens
gacttgggtgaataacggcatcattcgtcagccaggacgttcacggagaagagcagagacgggttctgacggttctgctggtgagttctgttctggaaatgctgctgccacgtggagatgttttgcaggggatggaaagggagttgtgagtgtgaggccatgggtgtgggcactcagatccgtgtgcgaggccatgggcgcgggcactcagatccgtgtgcgaggccatgggcgcgggcactcagatccgtgtgcgaggccatggtgcgggcactcagatccgtgtgtgatgccatgggcatgggcactcagatccgtgtgcacagcagaactaacccacctccaccaaccagtcagataaatgggaagatgccaccggacaattgcagagtgacgcatttcttaagatgggcaaaggacagattagatttattcctgagctatcactgcttcttgtgtttaaatacctatgaggaaattctacggacttatgggatccccatactgctcctcaaacacacttgcagaaatcagaaactacacacggatggctccccgtgcatcgaacacagtagacaaactcgctaggcggtatagacccccatgggattgtctgttcatcccagccaccaggagcagctcagtgcctaagacttgagcacattctcaaggaaccaggttcatcacagagtccctctctggctcctgagaatttcctcttcattctctctcggaaaattcttcctggaaactctgctaactgctttaatgcaaaccaagcccctgctataagtaacaccatgattgccattttagaaatggggaaaccagggcttaagcaacgtgctcaaggccacagggccaccaggagcctgcgttcacacctggcactgcctggctccaaactgctgtgactgcagccgaccccgctcccatcgcagaccgcagatcatggtgactgatatggtttggctgtgtccccacccaaatctcatcttgaattgtagctccccaaattcccatgtgttgtgggaggggcctggtgggagataactgaatcatggggggcagctcccccatactgatctcatggtagtgaacaagtctcacaagatctgatggttttagaaggggtttccctttttgcttggcctcattctctcctgccgccgccatgtaagacgtgattttcagcttccgccatgattgtgaggcctatccagccatgtggaactgtgagtccattaaacctatttttctcatcagtcttgagtatgtcttcatcagcagcatgaaagtggactaatacagtggctcaagtgactaccgagctatcttgctgtcccctccttgccagtgccccatctggctagtgccccgtttgcttctaaaagtctcctcgtttaagcaaagtttgtggtcaccgtccccacatatcctgtagcctctgatgagggcctcagtgtcaaaattcccgccactccctatgcctcctcacctggaatccccatccgtatcttaaaatgcaactgttgctattcaaatctgtctccttccaaacctgttcttcctcctctgtgtccctagtccttttaatgtgtccctggggacacttccaaggaagccgaggaatcaggaccagcccctctatcaactaactcttcagtcctccattaacaacaagccacctacaatttaatattcttgccaataggtggccaggtctatgaggaccaaaaagacaatatggtaaattatgatgaaagtagataaacataaagcattatttatgattgataataaatcttgtaaaaggccattttcagacaaatccagcatgatttgactcatgtgaggtacttgaagtcatcaacttcatagagacgggaaggagaatggtgccagtcaggggctgaggagggaagggagactttaacggggagagagtttcagttttgcaagacgaaaaatgttctggagatggatggtggtgatgggtatataactgtgtaaataaactttaggccactgaactgtataatttaaaatgactaaagtggtaaatttgatgttacatatattttaaaaccattcttaaaaatgaaaaattttttcaataaaatatctcaatgaaaccacccaaaagttcttgtcaatctcttgcattaactgctaaacgtgagctagaaatctaccaggtctcatttgaagtgcatgtaagtggcgcgcatgtatatatttagccaggtgtccaggaaaaatgattctgagaaacaagactccaaaaaaagatgctaaggaagacaatgcaagcaggcgaaccttcttctgggctaaagagctaggagagcataccgaactgctggaccaatgtatttgtcccataaaaaaaggactggaaatgaatagaaagtcacttggtttgtggaaaggcagagctgtctggaaaaatggtcaatgtatattttctgatctgtttcctaacactaactaattttcatcactacccaatgaaaacactctggggaataagaaaaagatcggacatgagctgacttctatttctttgctagaaaatcaaaaatctgtattcaaagagaacaggacaaagaagaaaatactgcccaaaatgttaaatatacactaaatgttgttcatcactcttttttaagacgtgggaagccgtagggtctggggaattaagcaacagagaaaatgtcaagagcaatggaattgaaccccaggcagatcttaatagcttagctagtttctccacctataaaaatcaggacactcttactgctgtttctgttaggtaattaacagtcataaagcatgctgaaagtagaaactgctaaataaataatgactgcaaaagaattttaaccataacgcactaagtaataaggataaaacatgggcttttaacttgaccatttttgttttcaaattaataatgcaaacaagagtccaatcttgttaagatggctcagcatagtgttagatagcaagttaaatttagtcattacaaaatacagaaggaatcttgcttctccaagagcagttcacccaactctaggtggagctgtgaaaataaagccatgttctattcctgtaagctacagaaatgttgccacgttgcctgtgtctacactttcgtgaattccagaaagaggccattctacttgaaaacctactaagcaatcaactttttgggaatttccatttatttcacattgattttggaaccctaaacttcagtaacgttttaaacaattttctgggaattggcaacacaatgatgtcagccacaatgactgttttccacatttcccaatcccctggactacatatgtatgagattgtaggcttatttaagacctttgcagacattttatagatgcatagtgaggaaataaaaatggagatctgagcaccaattctatgattttccttctaaactctttattccaatcatggtattgagtaagtcataagatttaaactatgaactaggagagctaactttattttactattcatatctattcatttttgcatatatacttgaaataactactgagtattatgaaatcctaggaaaaaaaaccaaagaattataaatcacagaaagatgggaaagtcttggagatcaaatccattgtaattatttatcactgaaaacccaccacctagaaaatatggttttctacttaaatataaagtatgatcaggattctgttcacaaaatacagcattctgtgaattttcttgcacctgtaaatacgctatagctataaaggatagtttcaacatcactgaacaaacaagcctaaattctgtttattagacatttggggagaaagtcatcctccaggtactattttgaggaagaattaaacaactacgaaagaaatcaaagtaaaggatataaccacattaaaatacaaatgtacaattttgtcctgataataaccgagacctggaatctcagttttagtgactcacattaatttaattgtgacatttgcttttctaatcatagatgtaaaaagaccactgtgttccaaacataattatcttgccagcatctcattgcatgaaattattagttaagatgagagcctctgactacatttatgtttgattagtttcactgatttaagaacacggaataatttaagatctgtttaaatgaaagagaagtaaggccccttctgagaagggctgctttcctccacacgttgccatttcgacaaactctacattccccccagcgactgctacccccagcgatgattgtgattaaagctgccataaacattaaacattctggtacaacttttcatgtaaacagatgggaccgctagaccatatggtaaatgaatatttaaccttctaagaagctgccaaaatgtttgccaaagttgctacagcattttgcattcccatgagcagtgtgtgagagttttagttgctacacatcttcatcagcacctggtattgccagtttttcaaaatccagccattgtaatagacaaaataatttctattttcaaggtcatggactctttcctctctcgttccgattaagctaatccaataaatttgttgatttcaaatattgtatttttgagttctagaatttctcttttttatagtttctacttcttctctgggacttcctatcttttcattcattatgagaatattttcctttatatctacagttcttaaactttaggatcagaatccccttgaaaatcttttaaaaatataaacttctgggcttctccccaacgttttgattcagttgattgtaggtggagccagagaatgtgtatttctgaaaagtgcccaggtgataccgaggctgctggtctcacgaccaccctttaaaggaccactgctttacatcacacttagttacaataggggcttgaaaatacttgtctgctcattccaacacctgggtcatgatgggtttagtctatgcttggtttagtctatgttgattatcttttctattgataatgaggcgattttcccatttcttcttttctattgggaatgaggctgattttcccatttgtcttgagcaatgtgggaattaaagaatggatattttaaatgttatgttgtggcgactctggattacgttatattcctaccaaaagtgtcaacttttctattttatcaagctatcaccttggttggactgaaactacagactctgcctcttgagaagcagctcaaatctcaat

SEQ ID NO: 468194 - DNA, 1070 bp, Homo sapiens
ttattgttattgtcctgtgcatgcaaagcacctcttgtaccaccatattgtggtcaccattgtttatggttattgctgtcattcataacagcatctttgaatcttatacactagacattcaaagtggaggcagtgggagggtaacagcagcaccaggtctgcagtgtagactggcagcaccgggtctgcagtgtagactggcacaaatctttggcacctgccagagacatgagttgctgctgactcatgatgactatatccaggcaggaactctctctgtccttgacattgaggatgatgagttgggtgtttgtgtaaatgaatgcatgccctccgactgcattaacagcccaaatctcctgtgcggtgcctcagtggtttctgatcagtgcttattggatgaatgatagaatataggatcggaatggatgtcaagacatcattgggtttttgtcatcccttcagtttaattcgataaatatttatggaagcctttcttgggtgagccacgtagcataaatgagggagtttggcatttactggaaagttctgcacatacagcatggatatctttcatgttttttaaagttctccaatggccagaagtttcagtggcaaaccccgtcagaaaatattgtcacgctcttgcagtaaaacgtttctgaaatcgtcattcatcaataatataaacattagagtagcaggtttagccaaactcttaattgttttgtctttattcttgagtcttctcaatttccgttacgttgacttagctttcaaactggtgggatttctatatggtcatagagggattttttttttttttttttggttgttgattagaaagtgattttcagaaagtgaaagttagggctggaagatacagcaatgcattttatagtttccaaatttatttctgaaatacggagttgaagttcagtaggataagatatgtggctatttgaggccagactacaaatacctgtgtttggatgctgcaacctctcagaatgtctggcttctcttttcagtatatgaaacaagagtgtttaaggggttttgtgtagttt

SEQ ID NO: 468195 - DNA, 667 bp, Homo sapiens
caggctgagagaggattaaccacgtgcagaaggcttgttatgcactgtgctgtggactcttgttgtggggtcctaggtctgcccagcattttggggttcaccccagagcctgcttcctatgactgcgtgggccagctggagaaggacgacccaagacccctcaagtttctgtgtcctgaccccaagcataggcctgagtgctcctggggcccaggggcctctacgcactactctctggggcccactgtctgcactctcaggcctggggggctccccctcctgtgcacctgtctctcccaagcaggtggacaccaacgtctatgtccccacctgagaatccgcagccaccttgccagccttcctggctgtggagccttccgccgggcgctgcccacagtgaccatttgcctcactctagaggcgcaggccaccgtggagctgtgctggtggactggcagtggtgtgcagtttcctcagctgcacctctgcatcccgcagagcaatgtcccagccttcacaggcagctgcttcttcccaccatcccagcaccgtggcactgtcccaatgcagtgctcccgcggctcaggggacttgcgtcttctgaccacttcctggctgactgtcaccttcaactcttgataaagcagcagtttctatatcctccatc

SEQ ID NO: 468196 - DNA, 2181 bp, Homo sapiens
gtcttcctcctcttcctcccttttcctcctcctcctccaccttttccacctcctcctcctccacctcttcctcttcctcctcctccacctttctcttcctccacctcttcctcttcctcttcttcttccacctccacctcctccttctcatcctgctcctcttcttcctccttcctctccttttttgtctccttcttttcctctttgttctcctcctctttcccctcctcctcttcctcctgctcttccccctccttctccctctcgtcttcttccttctccacttctttcttcttcatctcctcctctttcttttaaactctttgccctgagaacatgttactcagaggcaagggggtgggacaccttgtctgtcgtcacagaaaggaagaaggaaataggagggatgcagctgcaagcctgggtgttgttccgtggcaggaagtcgagggggctcggggcctttatttactctggaaaatagaaatcaagacagtcacccaagagcagggaggctgtggcctggctggagccctgtggcgggaaggagaggcccaggatgtggctggaggcctgtggagggaaggagaggcccaggatgtggctggaggcctgtggagggaaggagaggcccaggatgtggctggaggcctgtggggggaaggagaggcccaggatgtggctggaggcctgtggtgggaaggagaggcccaggatgtagctggaggcctgtggagggagagaggggcccggggcatggctgggggcctgccacctgtccgctagtggttcatggttcaggagttggggacccctgccttaatacatgcttgttagttaattgattgattgggaaagttctcgtgaaaaagaatgagtgagaagctgctgacctgtgaaaacctttgtactaacatgatcttttaaataccacaaaggaaactgtgactttatcaaagcaattaaatccaaattctttttcttggtaaatgtgttactttgcaaatgtcaaatgtgcaaccaggaggttgtcaaacaaaaatgtgtttgctgcaatgtatatttagtgtgtatatatacacatgtatgcatatttatgtgcttgtatatgtatatacatgtttgtatatgtatatacatatatttatatatgtatatacatgtttgtatatgtatatacatatatttgtatatacatgtttgtatatgtatatacatatatttatatatgtatatatatttatatatatatgtttagatatgcaaacagtcgccacagtgccccaattgcctgcaggattccacacagtcacatgccatgaagaaaaaccacatctgttttcctcactgctgcttagagcacccaaactttgtcaatggggtgcttcttgtctgctctctatgacctggaagtttctttctcccataagtgaaaaaagtgagagctgagagaaccagccccatgagctgcaggtcctgctggactccacgtggaagcacagaagagacgccgctcctgtgcgtctgggaagatcccgtctgtcatctggaagtcataaaagccactttcggaaacacagatgtcacttttggggaacggtcgtcatgtttcaaggcccttccttgggtttgaactgggagggccagagtcggcccagggaatggtgattggcacatggaggtgtcctggcagcggtggccgccaaggggcggtcggccctcctgtccccgccaccctcagccccgctgctgggcccttccaggcctttctcccagctccctgcgtcgcctcaacctcctgctctcacccgctttgtgactccaaccagaacagcccgtcacttcatttcttaagagtcttccttttgtgcctttcacattttcctctaaaatttaaactaacgatttgtgtgtggggtgtatacattgtgtgtgggtgtatatattatgtgggggagtatatattgtgtggggtgtatatattgtggggagtgtgtatattgtgtggggtgtatacattgtggggggtgtatatattttgggggatgtatatattgtgtggcggatgtgtatattgtgggaggatgtatatattgtggaaggatgtatatattgtgtgggggatgtatatagtgtgggaggtatgtatatattgtgtgaggtgaagtatatattgtggag

SEQ ID NO: 468197 - DNA, 552 bp, Homo sapiens
aggacaggcatttctgttttcatgccaaaatgttgcatttcccaagaccaccctggcccgccacacctccatcctgtgcctataaaaaccccaagtccctgttgggaagaatacacaagcagccggacatcgagaggaacacagtggcagaacagcacaccgacaggtaccagcagactccagcaggccatggactggcagaacgacacacaggaatggctcacaaaaggatggaggtgccattcctgtgtgtctgcaaacccctccccaccactcagaaaactggaagctgaactactggctctggctctcatcacctttggaggaccccacagaaattcctgttctttagcaaagggttcacctgagacagatgtctctataatgtcacagacaaaacatcttcattttcttcccacagctttgggagacttgttagagctctatataccatgaggctagagctaagttttctcaccacttatggagagagtgaaagaatctctgcagtggcctgctaattccctctctcatctattgacttcccatacc

SEQ ID NO: 468198 - DNA, 896 bp, Homo sapiens
gctctctctcctcctgccattcaagatgccgaaaggaaagaaggccaaggggaagaaggtggttccggcccctgctggcatgaagaaacaggaggccaagaaagtggtgaatcccctgtttgagaaaaggcctgagaattttggcattggacaggacatccagcctaaaagagaactcacccactttgtgaaatggccccgctatatcaggttgcagcggcagagagccaccctctataaacggctgaaagtgcctcctgtgattaaccagtttacccaggccctggactgccaaacagctactcagctgcttaagctggcccacaagtacagaccagatccaaagcaagagaagaagcagaggctgttggcctgggccgagaagaaaactgctggcaaaggggacatccccactaagagaccacatgtccttcgagcaggaattgacaccgtcaccaccttggtggagaacaagaaagctcagctagtggtgatagcacacaacgtggatcccatcgggctggttatcttcttgcctgccctgtgtcgtaaaatgggggtcccttactgcattatcaaggggaaggcaagactgggccgtctagtgcacaggaagacctgcaccactgtcgccctcacacaggtgcacttggaagataaaggcggtttagctaagctggtggaagctatcaggaccaattacaatgacagatatgatgagatccgccggcagccgtcagtagtaacagagctgatgggacaatggctcagagaggaggcagtgctacaaacacaaggacctagtggagagcacaccacagacatgtcgcactagggggctgccttgggagaggcaactgttcttcctggttttaatattttgtttacagatgaat

SEQ ID NO: 468199 - DNA, 522 bp, Homo sapiens
tgcattgcgcaaaatgtctagttttcaaaccatgtaaacttggtctgggaaaagagtgggctctgtggaatgttgctccttcagcagctgatgtgaagatgcttatggtgaccacaagccaagcctctgcaggagtgggaactaaacaatgggtacgaatgatcataaagatggaaataatagacactgggggctccaaaagcagagaggatggaagaaggacaagggttgagcacttacctgttgggtacaatgttcactactggtatattggggacactggaagcccaatccccactgagcttgacctccactccaacgcagcatcccagggtcacaacctggaacttgtcatcatctacaccgtgttttggagcccacatcttaaactccctgtcccttcagctcttcctcctcttcttggcaatattctctccagcaccttcagcacaagcccccgtctccagcttcgtcatgcccccctcatgcatcatctcccctccatccgtgctcggtgaagcc

SEQ ID NO: 468200 - DNA, 816 bp, Homo sapiens
ttctgctttcagttatttgataatgatgtggcttttaataactcctctgtcaactccctactgccctattccacagcacacccatttttacttaaagactttaaaggaagcaacatcacaaagagaggcatcccagagaaactcaggagagacttgggcgtggaggatgcagagaatttcactgtatgtgtgttggggggctcttggaacttctaatgagagcctcaaggaggggagattctttaaaagtggggatttggctgacaccggttctagcttcttcctgggaactgcgttcctagttcttagcccagctgtgaggctaggtcttctcactggcggctgtcatacttcatggacattcctgcctcttagtcaacttgctccttcaaagttgactgttgctcctgactgttctcggaccccagcctcttggcccatctgctaccagcactacacctgtctgtcagttccacccggaaatgcctccgtgcttgacctgtttctccacatcaacctcccctggagctcgagacccacattccctacattctcactgcctgccccgctctcacagctcagcaggagacagatgcaaacagttacttaaaccagcatatcattaatatcttaatcagtacagtgttttggcccaaatataaacacaaatctttcccctctcatttggaaagctgagatgcatggcgactttaaaatcactgcatattactgaagttactgaatactaaatgactaaatatgaagggaaactcaagtggaaatacacgagcacacatgagaaatgtaaacattggt

SEQ ID NO: 468201 - DNA, 603 bp, Homo sapiens
agcatcgcctggaattatactaaattattcacttatttgttttttaaatgttttccttttatgaacagggacttttgggctccatctctctcccctccctcaacatggcttcctaactccctccttctgttctctcaatgctccagcccacacttgctcaatcttcctctcctcgatatcctcacccttcctggtgcaataattttccagctgcctcttcggggcacctgggttccaagtttggaaacagaccttctcatggtcatttggagctctggtactttggggaaagggggctatcacagatggagtgatgacactggtggatggatgatgtttggaatttacctactgtacttgcctgaccactgttcaactgccattccagctactcaccaaaatgccacctttggtccttttaggaagctcaactgtgtcattgccatctgctgccagacctttgcctctgctgtgccctgtactggaacactctcctttcgcctttgtgagatttaggcggggacacagccaaaccatatcacatgataatgctgattatttggttatttatttatcacttagtcagttactatcagaaagtga

SEQ ID NO: 468202 - DNA, 620 bp, Homo sapiens
ccgagcctccccgatgagcaccaccccctgctccagggcgcccagtcccattgaccacccaagggctgaggagtgccgggggacggcgctggactggcaggcagctccacctgcagccccggtgtgggatccaccgggtaaagccagctgggctcctgagtctgctgtaacgctcaccgtgaaggtctgcagcttcactcctgaagccagcgagaccacaagcccacctggaagaacgaacaactccagacgcgccatcttaagagctgtaacattcaccgcgagggtccgcggcttcattcttgaagtcatttttgataatttaattggcatcattggtgcagcatctcagggaaggtacccacgcttcaaggcaagaggcattttcaaggatagtggccttgggctgtcccatcttttagaatctaaaaatcaaaacaactgaactcacggagacagagaatggaaggatggttagcagggccagggaagggtagtgggagagtgaaggggaagtggggtgggttacaagtggggtgggttaggggtggggtgggtttaaatgtacaatttaaatgtataatttaattgtacatttaaaaataactaagagtataatt

SEQ ID NO: 468203 - DNA, 600 bp, Homo sapiens
ggaaaaggaacaatatggaagcagtagcggtcttcgcacaagatgacagtcagtgaggcatttaaggtctttccgtctcttatgggagctacagcctggagccaccctggggtcagtaaacccaactatgctcacagattgtcctcctctgagaagatattttcatttaaaaagggagtcctcaaaaaagctatctgctttccttcaagcaagtccaagtgtagcaaagttaaatgctggagacacctgtgggaagatattgaggggcaaggtggaccccttaaattacatcagccacctccaccccacttctatggcaaaattgtcttccatgaaattggtccctggtgccaaaaatgttggggacagctgccctggacaactccagagggctccactcacctagaagacaatgggatggtgccttatggagttctccagagggatggccttgacctcggaccttcctgttccaatcatgacgttctaatcacttgcctttcctgaaacaagccctacacttccctgcctcaatatttttgtccacaaggttcccgctgcctgaaatatctccaggacggcattgaagttactgtgttc

SEQ ID NO: 468204 - DNA, 649 bp, Homo sapiens
agccaaaaggcactcaaggtaattcctgcagagtagtgcctctcgactttgactgtacatgagaatcatctggaatcttttaaagcccctggtgctcaggctgtaccccaaaataattgaattcaaatctcttgggtggattccttgcatcggtgttatcttagggttccaggtgcagctgaggctaccagtggaaatcgtcagaacccacagctgcttcaggatggtgagggcagtgaatggcccaggagactggatcctcgcctatatttgctgccaacgagctgtggagctgaggtgctgtctgaagctggttgcctgggatgccagggctgccgcctcgccactctgcccaccctggtggctgcactgccagaagcagcacatcgtgtcacttcttgacgcgtgccgcctccaggggagagacacctctgacagctggccagggaacagccctgatgtcaactgtcagaacaccccatagcctgcactttcgagcaggagagataaaatttcactgctgcaataagacggcagacaatatgctcgaaactaaactaaccttaagttgcagatcttttgacacaaaagttaggcattgtgatttgcatattagtgtattcctttgtgatttctgagcagagaatat

SEQ ID NO: 468205 - DNA, 666 bp, Homo sapiens
ttccaacagatactctcagaagttattactttacctctaactgtgggccacaatgtgggccagagacactgatcttctctctatcccacacaacatcatgctggttcaaaagggtattgtacacatagcactgtggcaaacttgcttgtttcagcagcaacttcatgtcaatttgctgtctgagttcagaatgcacagctgcttgtgtaggcccattggatattctgttcctaattctaggtataatagaggtcttaggtttctaacacattctcgtctggagatactgcaacggcaccagggatgtactttcctcaaggcagagttgtcggtgctgcttctctgctcaccatcatttaatggccctatcatctacggatactgtgaaaaggtgcatattctgcctggagttattcctgcccgaactgggcatatcataggctgtgctagactagtgcctacatgaaggcaaagctgatgacttcacagcccttgaagcaattgcttcaggtcccagtgccttggggatcacattcccttccttttgagcaactgaggtctagcaactctcaagtttagcttattacacgaagagtctccaagaagaacaggcaaggcaggaaggaagccctctcctcgaaggacctaaaagctcaacatgctcac

SEQ ID NO: 468206 - DNA, 686 bp, Homo sapiens
aaggaagatttcaggaccaaaacatggttcaaatcacagaccaaggacaaaggcaatccgactctggtggggtgatgtggatgaggatgtcactcagaaagctggctgaggccagccattttgagcacttatgtgtcagaccctgggctggggcctttagtgacaggatcctacttaatcttcccattttacagatgaggaaacagaagctcaaattgcttaactggtccaagatcccaagagacttaaaccagggatgtctggtgtggaggcccaagcaccttcagtttcacttcactgcttgggactggtactccctcaggtcacattgggactatgcccacatgaaccacctttgcaagattatggtgactgccataacggacaattccagtttacgatgggtatcgtcccaattggcagatacaaggctctgtgagtttggcagcaataggttccatccagggcttattttacctccacctgcccagagttcattatggaccctggaggaaggcccatccatccacaatgagctcctagtgggcagaggaaacaatggtagctattgagatgctggctggagatgtcaactttatgcagacaactgtgtctctcttattcagttcaccagctgcccctgaatatcccagtgaactactcacccctcaaatatccttcttaac

SEQ ID NO: 468207 - DNA, 527 bp, Homo sapiens
ttcaaactaaagatttggcttctcaaggaagagagagaaatgtagccatggtgagaatagagaaaaaagatgagttgtctgaaaggaaactggttcaagctaaaaattcaggccagcagtgggatccaaaaaaatggcaggtagcaggatttccagtgcctgctttttggtttcatagttcctatctcaggtcttggaaaaccaacatctccaggcagaagagactatattaccaactcccacgggaagaagccacagtcctgtgctggcattattccaatccgacgagttggggcatcagaaagccattccagagggaacactccccagggtcagatgactgggctgggccgcatgacttaacacgtccttccttgctaatctattttggtgcatgggtggaagccacagcagctatggcccaagggctccaagaacaggaatcacatcggtgaaattactcaagttgatattagttggacattggtttaggggaatagcatcataaattgctagttttggcaaac

SEQ ID NO: 468208 - DNA, 670 bp, Homo sapiens
gggtcagcatttccatcagtgctagcaaggactgaatatttccacatggctggggaggcctcacaatcatggcagaagatgaggaagagcaaagagacgtcttacatggtggcaagcaagggaacatgtgcaaaggaactcccctttatgaaaccatcagatctttgagaacggccaaagaaggcctcactgaggatgtgacatttgagtacagacaagaatgtgagggagtgagccactttgatatctgggggaagaacattccagatggagggggaacaccagatgcaggggaaacaggtgcaaaggctctgatggggagtctgattcatgtgttgaaggaacaggaagaaactggtgtggctgagatggagggagcacagcaggagatgcagtcagagaaggaaaggggaggaggcccaggtcctacagggcctttcaaaggatttggcttttactttgacaaaaccctgatggagagaacgtagcagagaatgggtggaggaaaattgcagagaacatgtatggaacttttcttttgccttcacaacttgactaactgctaggcctagtgttgtcctgtctttcctttccaaatgccttcctcactagcttaatcatttccagcttttgattttaagcaagggatgtgtgactcttcctttcactc

SEQ ID NO: 468209 - DNA, 908 bp, Homo sapiens
atagtcctataccatctgttgaatgcagaagaaacttctcactctcacacaaccacctcatgcttagcagagtacagcgccaatatgaactagagaaaaaccagatatggaccatttatcctgggtctctttgaagatgtccgaaagccacgggactggaggggaagtgcctggccaagaggaacaggtcttctcaggctcggacatcaggtcgcagtgggtggccctgctgccttcctggccacttgacaatccctctgaaatagagttatcctggagagtgacaaattaccaaccctggaggctatggcccagtgctgccagggccagaaccatgcaaagggaaggaaagccacagcacctaatccatgacccagagaaagcccttcagggaaatggagctgccaaatttcaattgggtcaatatttggtctttgttttcaaagttgccctcaagctacaactgttttccttttctgtgggctttggtggaataagaagcatgtctatttcctgcaaaggggcttaaaatgagaggcagtttccgatcatctcagttaatgtcagttgaataaatatttctctggtttctttcaaatgcaaggtatatttttacactagcaattcttttaagatcagcaaatgctgagttaaaaaaatatctgcaaagtgcctaattcacatatggacattttaggaggggatggagctggttagacccagaagatattcagcattttctaaatgcctaccagttcatcactttcctcaggaggaaaggtaggccccgtaaactgctctttcttaactgctgactgctattggagatcagaggaatcttctgtgtgattcattgaaaatgcatataattaccgtttatttgctactgttgctttgcttggcaattc

SEQ ID NO: 468210 - DNA, 453 bp, Homo sapiens
ggcgggcagctccgcctgtctggagcttcactcctgagccaatgagaccacaaacccaccagaaggaagaaaattcaaacacatctgaacatcagaaggaacaaactccagacacgccacctttaagaactgtaacactcaccatgagggtctgcggcttcattcttgaagtcaccagagaggagagctttgacgacgttctgggaagcctcttggcgttggcatctgccaagaggggtccccaacctccttgcaattgcagctcttcagagaactcacgcgcaataggccctgagccctcaaagtcaagtaggaaggacaccaaacatgacaccatttcagggtttgccaggctgccttcgactaccccagagctcctgtccccctggctttctgtcaattccatcctttttctggccgcccatgactgctgcctggactgcccttagtcca

SEQ ID NO: 468211 - DNA, 961 bp, Homo sapiens
gaagagcctttctctgctttcctggccatgccacaggtgccatgcagccttctgtttttcttacatttttgggaccccgaaagataatcccagttgtgaggaagtgggcctgctgtgcaggtgaagctcttcattgcattgccaatggggatggctcctctcttgacatcccagttcttactaaatccaaaaacattttccatgtgtgggaaggcctggtgtggggacaaaggcagatccaggttcaatgtgaaatggacatggatgaagctggaaaccatcattctcagcaaactaacacaaggacagaaaaccaaacaccgcatgttcttactcataagtgggagttggacaatgagaacccatggacacagggaggggaacatcacacactggggcctgttgggggaaacctgcacattctgcacttgtaccccagaacttaaagtattaaaaaaaaaaaactcacacatccttacatcatagtgaaactgtggaaaactaaaggcaaagagaaaaatttaaaacaataagagaacaaaagactgacagctgatttctcaaaagtaacactaaaagctgaaagccaatggaaaaacatctttcatgtactgaaaaaaattaccttcaatgtagaattctgcagctactacaatagtcttccaaagatatgggtaaaggaaaaaataaaaacctgtcaacagcatatttggagaagggccaggttttgtgggttttatatttttttgaatttctgatctgttatagacttgagtttttggtttatatcttgttcaacaagtcaagtaaactgattgtgcacttgaatattgcagcaatgttaaattggtatgcaagttagactcattttctgtacttatggtgagctggtagcagtttgcaaacttacaaccattccatggatcacactttcagtaaaaagttttaaaggatgcccttt

SEQ ID NO: 468212 - DNA, 682 bp, Homo sapiens
gagacctagcacagtggatcctgcctgtaattcccaaccctttgagaggccaagtgaggacacagaaatggccatctatgaactaggaagcctgccctcaccagatgccaaatctgcaggtgccttgatcttggacttcccagtctccagacctgacttccggccaaacacatgctctgcccttgactcaaagaggcctccacagccaacgctccccacggggctctcctccttggccacaacagcttcgctggcacaacgtggtgcgtgggtgctgagtgaggcaccagccccagtgctgggcctgtacgtgaccaggtgggggtgtgggaggcccagaaggagccatcccagaagcacccgctgtatgtacattcactgttgtggtgcgatctgcgaggcccagcttgtcccggcaccaccctcggccgccctgtacgttccctcttttaaaggcatctccctcctgtgctgctcgacatcatttcaggggtatcacaggatgtccttggagctctgctctttaaacagcttggattcctcccctaagagctggcagccttccttaccccacgagaaagttgctggagctacatttgggaatgactctgtctgggagggtggacattgcagaaccggcttctgtgcaggagggcctgtggaggcttggtagggagggaac

SEQ ID NO: 468213 - DNA, 554 bp, Homo sapiens
gaagagaccttgatgttctcataaaaatgacagtccagaggcaggggcaaacattaattaagttaggcaagaaccgaggattccctcacttcctgataagtcttagaggaagagctgttagcagcagacttgtcatatgtggcttttattatgttgaggtttgcagtcaagtgggcgtggagcctggtcatggggctgctgttgattcttcagtggggtccaaggctggtgggcctcttaccagagttttctttgctaagatctatggtcttcctgtgaaaatggaatcatcagctggggagaaaaaagccccactgctaccaggatttttagagacacacattacattccattttggtgaatctgaagggggtgaaggggacctggaagatccagaaatttttagagaagaggccaggatggatgatactttcttgcagagggtcaagagatatctcaaagcatggagtaatggaaatgaaattgagtactagttattgactaggcgtgatgcagatgccaacgcacttgctactcacagtgcctgcaaggtg

SEQ ID NO: 468214 - DNA, 573 bp, Homo sapiens
cacaggtgcaggtggaggccatgacgctggctcttcatcgtcatgcgcctttttataaattgtgcaagcagtatgcttctgctaagatagtaaaacaacgaggaatacgggctgtcagccccttcgctatcatcacaggcgatagagtaggaggaggccatgtcgataataatagggtaatccgtccgatgggttgtggcctcttatctgttgttagctctcccaccaagtggtcctttctagcttgtacccttctctccccctttctgtctgcagcctgtccctggatgctcataagcagagtggctacagtgcagcaaggaaaccttccagcaaacactgcacttggcacagccgcaggtcacgtccctgcccaccaggacctctctgtgataagggccaacgatgtttccattcctgttcatgaaatcacttggcgatgagtgaaatctgtgtgcgttgtaacaacaaatgactgcaacagaaaatcaccagatttccatcataactcaaatgccagccaggcttggtggatgggctcctcgctgaaatctccatagctgcataatcatt

SEQ ID NO: 468215 - DNA, 560 bp, Homo sapiens
ggcctctggtggaaggtgacttccagaagatgctccttgaagatgggagagagagctggagctcatctgtcctggcatcagagaaccgtgactccggagggtgggagaggcaggcccgagtcatctctgccctggggccccttcccaatgtgtcctgtcttcctccctatgcaggagtgagtgaagcagctgcctctgtggctgccgacgctggctacgcacagcaagggaggaggctgagacatgaggaaacctggccctctaggcgggcactttggaagctcgctggcatgctgctggagacccaccggcaaccacgaggacaaggacccgaggacagcgagtcacagagcggctgcagacctggcatcaacgaggataagggaatggaagctcttcttacagcagttctcagggagcgtttctttgccattcagtaaagatcagaccctcaacattttcagaactgcaccctgacattcttaaaagccagggctcctgttctcccacccctccctgggtgccgccatctgtctagaaggcagcatttgttttcaatc

SEQ ID NO: 468216 - DNA, 739 bp, Homo sapiens
ttcatggggcaatgtggactgaaaaatgtcctccctatcttttgggctccctggagcaggtgaacatgtccccttcagtccacccagttgtcatcaactgctcaggccctggaatgctgccctctgcttcccacggacatctatgcacgcccctcctgcctctggagaccagcttctctctggcctcagttaccttcacctggatggcagaaggaaagcacaaaacagacttactgttgtgtgatgttcagagctgctgggcccagcaggtcctgagcaagctcttcctgactttctctcagctggccaccatcttgaaggaatcgtctttcttctctccagggaaaatacccaacagtgtgtctcctaaagaaaggcttaagaccaacctccacctccacagaggaagacgtactccctgcaatccttgcccacctccacaagaagctccacctccactctcaggggtgtggtcttatcctctggcttccatcaagacaactaaattacccaagaacacagcagaacaaaggtggtattttcctatccatttagcagtcttacttgtgagaagtgactggcagtttgattaacggccctcatttataagtgagaacatgcaatatttggttttctgcttctgaattacttcacttaggataccgacctctggcttcatccatcttgctgaaaagctcattatttcattcttttttatggctgtgtagtattccatgta

SEQ ID NO: 468217 - DNA, 541 bp, Homo sapiens
agacacatcatgggagaaatcagaaaggcagaaatcagtccggaattgtcatcccgaagacccccatatacagaatgctggagctgtccccatctctcttatgaccattccttcctccctagtagagcaggggcaaagcattggctgcttttaagcaaaggaatgaccatgatgatatttgcatctcagaaagatccctctgaacgtagattggagaatgaatgggtggatgtgtgtatcaagattaagggctttggaaggaggttggtaagaggcaaaggggtggagaaacaaaaatttacaagaagtaaggataataatgctgaactaacatgctggttgaccagagaagttcaccaacttctgtctgagtctgatttaattcttagtgaggaacagattgaaaacataaaaagaagggactgcggaaatgggatgattttgaaagggatgtgagtgttaagcaatagcccttcagggaaggaattaactgggggggggcgggtggtgagggggtgggaagagagatgaccttttcttt

SEQ ID NO: 468218 - DNA, 534 bp, Homo sapiens
aagaaggcagtcatgaagagagggaagtcgggtgaaggacctgaagaaggaagtcagccaatagtatttcctgaggtatccttcaaagaagcctgtggggcatatttgagggaaggcattgtcattgaaaagtgggtcaaagcttatctggagctgattgttatacctgtgcctagaatcaaaggagacatctcggtggaggagagggcagcaagtatcattgatgtctattcagggaagccacagagcgcatggtcaccctgtgacatgcagttcttcgttacaattgtagggagcaccacactcaccaggaaaagaggatattggctttcgatcttgtctctgagaggtacaggccttctatctatgctgtctgtatttggcctgtggatcactcacagcagaaagccagccgggaccctatgacatggccaggccccagtgaaacgtccccttgtgaatgcccttcaccattcaaagaccaaggatgcctttatgtaagtagaggtcccatgctgggttgtttctgataat

SEQ ID NO: 468219 - DNA, 595 bp, Homo sapiens
agtgaacacagctgattttctagcttgactgctataaccactccctggctacggcctatgtttgctcaaggccctgggactctaccatcagcaaatggcaaagctaacgaggcctatgtccttcccttcagggtggcaatgtcccccaggccccagtccctctttcagcgctatgaagttaaaaccagcagccgagagtatgaagggaactactactacatatatttcctggagacaaagaattttgacaggtcccccaaggctgagaacatcctgtgttatagcgcctatgaagaacaggcccaggggtggtggcagctccctgccgtttgccagctgctgggtgcttcaccatccctgagtcacctcaatcccacactcttctttgtgaattgtcccttcattaaactctcctcaagtattctgtttgagtgtgccatgtatttcctgctgaggccttgaattatgtgtacagaataaatataaatgtaaacaaacaaacagctattgtaactcaaagtactttatttcaacagagctacttcccctaaaagtaatacttctgtgcttgtggtctaggtcacaatggggtgac

SEQ ID NO: 468220 - DNA, 1164 bp, Homo sapiens
agcctaaaaatccttgttctctctcaatccttccaaacagatgagcaatgtcgggctcagagtcaggaggagccacgaatgaatccaaatctttctagctccaaacttacgggattcctacctctttcctcctgctttaatgaggacagagtgggcttctcagtcccctcaaaaattcaccatggagttgaaggcctactccgaggagtgggccaagcgctgaccttccccactgtggactcatgggagcagacgttgcctgacggtctcagccagcctgaccctgtgtctgccgatgccctgctgaccttgccacccagcacgagttgcctctcccagcttgagtccgggagcatcgcccagcacaggggctcaagctgggggtcatccctggctggggctcagtcatactcgctgcatgctctggaagatctgcaccacactccggggtaccctaccccgcctccttaccccttcacccctttcatgacggtgtcaaatgacctaccgcccaaggtggggccactctccccagatgaggaagcagacaccggttccctccatgacccttccccttgggtgaaagaagatgggagtattgcctgggggtcatatgaatgccgcagagcttattgaggggagggccaaatgacttctgggtttttctttaacttgaggtgtattccaaagattgttttaggtgtgtcagcccattcaggactggattttcagaataagcctcaatgctgctctttgttagtggacgagggcatttatttgtaatcctctccactgtaaccccactgaaataaaacagaatgttaattaaatgtgtcagagaccgtattctagtaagataaccttacaatgtggtctttttggaactgttgtaacccattacgttctgaatcttctgttatctttgaagtatcatttttggcactgatttttcttaaattacattaaaaagtttatgcagatcataaaagatactgattttcctgtcagatgtttcttagttttaaactatgtgtattctgcagtaaaagacactggataggatataatatagatatgaccacataaaactcattttatagcatgtgacttgaaagagtgaagtgtttcatatacatatatttatggcttattatagtgacttgt

SEQ ID NO: 468221 - DNA, 595 bp, Homo sapiens
tcatatgatcatttcaacacagtgttgtccgttagggagaactctgaggttagtgaagactactgtggcttgggtggtagtggtcatggaaaagttcctagaggatgtaacttccaagctgagcggaaggaggagtgggaaccagcaagataaaggaagatttggtggcaggagggttgcatgtagaggaaatggcacattgaaggatccaagcatgaaaaagaaagaagatgtcaactgccatgttgtgagttgctctatggagaagtccgcatggcagggaatcaaaggatgccagcaactagcagcaagtaaaaaactaaggcctttaatccaacagcccatgaaatctaaattctgcctacaattatggcatttccaagatcttcccccagttgggccttcagataagactgcagccccagctgacatcttgttgcagccttcagagaaacctttaggtggaagcatgaagctaagtcctgtccagattcccaacccagagactatgagacaatatttaagttacttagtttggaagtaatttttagtgcaacaataaataatgaattatattgtagtaattattatttac

SEQ ID NO: 468222 - DNA, 523 bp, Homo sapiens
tagaatcctggaaaagggctaccatgcagcccacgcctggtcgactggaccaccttagtggaaaggggacaatctgggcctctggcctgccatatgttcagatgtgtctggagtttcttccttccagtgggtttgtggtctcgctcacttcaagaataaagccgcagaccttcacagtgagtgttacagctcttaaaggtggtgcagacccaaagagacaccccaactgctgttgggaattgggcaatgaccactctagctacttcctgctggataggggtgaagaaggagaggagattaacgccgagaaggtgtgccagtgtccaggaggaagtcaatttcctggccttcaatgcttaaacgtatgggggctcagtgagggtgatgacatgagctggcacttgtcctgggcaccctcagtcctgttgttgggtcatctggttgggggcttctggcccagagaacctttgtcctctggggcagtatgccttccagtgattgcctcggcatagtggacatgggc

SEQ ID NO: 468223 - DNA, 696 bp, Homo sapiens
ttcaaagttccgcaaatctctatggcaggggcaaatgctgccagtctctctgctaaaacaaaacaagagtcatctttgctccagttccccacaagttcctcatctccatctgagaccacctcagtctggaccttattgtccatatccctatcagcattttgggaaaagccattcaacaagtctctaggaagttccaaactcttccacattttcctgtcttcttctgagccttccaaactgttccagcctctgcctgttacccagtttcaaagttgcttccccagtttcgggtatcttttcagcaacgcccgactctactggtatcaatttattgtattagtctgttttcatgctgctgataaagacatgcccaacagtgggaagaaaaagaggtttaatttgacttacagttccacatggctgaggaagactcataatcatggcagagggctaaaggcacttcttacactgtggcagtaagagagaatgaggaagaaacagaagcggaaacacctgataaacctatcagatctcatgagacgtattcactatcacaagaatagcatgggaaagactggcccccatgattcaattacctcctcttgggtccttcccacaacatctccaacaatgctagcacatctaaatttaactaatatagttgacagaaggaggaggaggaggagtaggaggaga

SEQ ID NO: 468224 - DNA, 640 bp, Homo sapiens
aggttattttccttttgttctgatgggcaccgctcggtctaaagaacactaacaaatgcactgatttcaacctagaaggcagtctccctggagttcctaggaatctcctgtctgaggtctatgaccacccccaccagtgttttccagccagcagtagttccaaacctccctggggtgaagctcccagaggaaggggtgggctgccatctttgctctttggcagccttagccgttctggctttcagaacttggagagtgcaaggtgactgcgggctggagcagacccctagcacggcacagctgctgtatgaaaaaaccaccaactgcttttttacagaggtccccagtcccattccttttaactgggtgggacctcctgactggggtctccagccaccccctccagtgcgtttcagccagcaacatgtccatatctccctgggatggagctcccagagggagaagcagggtgccacgttagttgtttcacagccttcactgtcgataccttcaggtactggaaaatctaaggtgactagggactggagcagaccttcagcatactccagcagccctaggaaaagtggccagactgttcgttacatgggttcctgatcctgtatctcctcactgggtgggt

SEQ ID NO: 468225 - DNA, 1307 bp, Homo sapiens
gactggcagcaggtctgcgctggtcaggaggatcatgagggaggtggggtttggtgctggaatggatgagtctgggacttttcaagtccatggtcacagtgtgaccacaagaaagagcttttccctcctgggcctcagtttacctctctgtaaaacagggtcctctcttctgtcctctcagccctccctgtctccacatacccacacccggcagcatgcggctgttggacactgctggccctgagttcaacatcattttcatctttgacaggcttgctcagccaccatctctgaattatagtagtagtcataacccaacaatgctctgggcaggtccttggtacccaaggccaaagactttccagtctttggaaaccagtcataaccttctatggccagatgtgaaggaatggagtcctgacctcacagtcccagtttctaaagtgatccattctctgaattcctacacccagaaatgctctggctttgcacccttgggtcctctgcctttccaaggagggattccagaagaaggcactgtgatcataggaggtgacagctccatacatattactgcccctgaagaccttccagtgggacaagatgtggaggtgaaagacagtgatactgatgatcctgaccctgtgtagatctaggctaatgcgtgggtttgtgtcttagtttttaatgaaaatatttaaaaggtaaagaaatatatacacatatatatacagagagagagagagaaaagcttgtagaataaagatatgtatatataaagaaaatatttttgcacagctgtacaatgtgtttgtattttaaactaaatgttattacaaaagagtcaaaaaactttaaacattaaaacgtttataaggtaaaaattatagtaatctaaggttaatttatcatggaagaaaattttttaaataaatttagtgtggcctaagtgtgtttataaagtctacagtagtgtacagtcatgtcctaagccttcacattcactactcactcacccagagcaaattccagtactgcaagctccattcacggtgagtgccctagacaggtgtacccttgtttatcttttataccacattttcactgtaccgttttctatgtttagatacataaatacttaccattgtgtaacaattgcctacaatattcagtacagtaacatgctgtacaggtttgtagcctaggagtaataggctacacaatgtagcctaggtgtgtagtaggttataccatctaggtttgtgttaagcacactgtgacgttcacacaaccatgaaatcgcttac

SEQ ID NO: 468226 - DNA, 585 bp, Homo sapiens
aactaacctagtgctctttctatcatgcccaactgctctgccacccagtggaggtttgagctaaatcacacgcagttcggacagttcaggcatgatgatagccaggttccccagtcaggtggccgagccccaccagaccctgagccaaccgaggatgcagctttcctagggaggagcctgaggcacctatcgggggatccctggtccctggccttaccctggagcatcacccaccaagtgcttctccaggacctggctctgggtttctctacttatctcctccctggatggctgtataagccagatgacggctacctgaacactctagaaaaagtgaattcacagaggctttcacaggggaagagttatcagctggggtcttcctacatcatgctgggctgagagatctacctcaccctttggcaaaaaaactcagaatatatttatcatagcctagtaaatgttatatctggaaagactggtgaagcaggaagtatatagggaaaaggcaaggcttctacattgcacaactgcagggggtacaatacacatgggattcaacgtagaggactcattctggaattc

SEQ ID NO: 468227 - DNA, 598 bp, Homo sapiens
aggggtgtttgctaaaatgcagattatgggttcccaacacagatgtattgactcagaatctctaaggagccaccacacccggctctcagctcctatcttaaagcagagactgcccaaccctccacatctccaggggtggagggggtggtgtgttcagactgtctttcttggtgctctacatggatggtctcaagacagcttcaacttggatatggttggtggcatggcgggaatgccaatgcatttagtagctgggcattggccaaccaagcaatttacagggttgagggaatggcttcaagccagtatcccttggggcatgatgagaaaccaccagccctggggtcatctatgtgatgagtatttgcttgtagagcaagatggtgggtgggagctgggagggaccttagaagaatgctgtgataactacaataaaaggtagtatggtctatggcaaagataggcactgtgcattgtgatagcatgaattagggggacctaaatgtatgtggggtatgaaaaacatgacagaatcttttaatctcttagtcttttttggaaatattttttaagcctttttaattggtgaggaagtgaa

SEQ ID NO: 468228 - DNA, 537 bp, Homo sapiens
agcagcacctctttctacaaagatctacctcttcaggacaaaaatggaataccaaagagaagaggattggcatgcatgggaatacaggcaggcccacggcatgctccatcatcctctcctgctcaggccaagttattctctagcactttttataagtgggaaggaggatgtcaaagctcgaatcagcataccaggcagtggaggccaccacattgagcaaagaaaagatcaaagcagcctcttaggacaactgacccgtgacatttgtaaatatcagcgaacacatcctcagatctgcagagaagctggcacctgggaagaacaatttccccagcagctagccaagctggggtcttccaagtggatgcagagacctgccctgctgccctccccatcctctgagagtgccttctctgggcttttgcttcaaagagccatctttttccacatggcactcatcttccttgtcctttgcttcatgacaccttgagcgtgttagaagctaatcctgaacaagcatagaaggggcactggggt

SEQ ID NO: 468229 - DNA, 730 bp, Homo sapiens
tctccttcaatctagatctgagaccaagccgcctcttgaatacccatctgatcctgtgaaactggaagcattcagacccaaagctgcagagcaaaagccccaataggcccagcccatgggaggctaccatgaggatgcgggctacctggagctcctggggcagagacaagaaggattcaaaggccttgcacacagtggcgacttcctctcgatccacgcagacctcccaaatccccatgatccaggtctccatctcgttcagttccagattaagagtcttccactggggcaggatggtggtaacacaggagcagacccagccaaggagggagagaaaattgaacaaatgtacaattgggttttataccgagacattcagttcccaggggcaggcaggagacagtggccttcccctatctcaactgcaagaggctttcctcttttactaatccacctcagcacagaccctttacgggtgtcgggcagggtgacggtcagatctttctcatcccatgaggccatatttcagactatcacatggggagaaaccttggacaataccccgctttcaagggcaggggtccctgcggctttccacagtgcattgtgtccctggtttattgagactagagaatggcgatgacttttaccaagtatactgcttgtaaacattttgttaacaaggtatgtcctgcacagccctagatcccttaaaccttgatttcataca

SEQ ID NO: 468230 - DNA, 807 bp, Homo sapiens
cagaaacttctgcagacttaaacatccctgtctgacagctctgaagacagcagtggttctcccagcacagtgtttgagctctgagaaaggacagactgcctcctcaagtgggtccctgacccgtgtgtagcctaactgagagacacctcccagtaggggccgactgatacctcctacaggtgagtgcccctctgggatgaagctttcagaggaaggatcaggtagcaatatttgctgttctgccgcctctgctggtgatacccaggcaaacagggtctggagtggacctccagcaaactccaacagacctgcagctgagggacctgactgtcaccaacatcaaagaccaaaggtagataaaaccacaaagatggggagaaaccagagcagaaaaactgaaaattctaaaaaccagagcacctcttccactccaaaggattgcacctccttgccagcaacagaacaaagctggatggagaatgacgagttgacagaaataggcttcagaaggtcggtaataagaaacttctctgagctaaaggaggatgttctaacccattgcaaggaagctaaaaaccttgaaaaaagattagatgaatggttaactagaataaacagtgtagagaagatcttaaatgacctgacggagctgaaaaccatggtgcaagaactacgtgatgcacgcacaagcttcaatagccgattcgatcaagtggaagaaagggtatcagttattgaagatcaaattaatgaaataaaatgagaagagaagtttagagaaaaaagagtaaaaagaaatgaacaaat

SEQ ID NO: 468231 - DNA, 1677 bp, Homo sapiens
tttcaaagccagtccctgaaggaggtagggaagaggaggaaacaagcctagaaacttgaagagcagactgaagtcacacacctgattagtgaaagtcagcagaaagctgactgtgtttctgatgatgttgtcgccctcagagtacccctctctcctcgccaccacctgcaggctcctcagggatgctcttcctccagccatgggcccttcagacaagaaacgtgctgcccctgcctttctacccaccttttctccacaagaagtgcccagagagctccaagcattgaaaggcaatgaggaccctggctctggaagtagctcttctttggctcctggccattctctgatgaagtcatctgaagaggccagtgctgtcattgtggccaccagcagtctgccagggcctgtcctggggctcatccaagccccagctccaagaggcaaactgcagatgtttcttctatttttagatgctgggatgttgcccatgaacgagccagtgacctggaaaagccaattctccctccaatctctgcttctgactcgctcatttcccttcattgttctaccagatttttcctcctactatgggaccggcatgaaatgacccagagttaactgagctagaccttgatctattgagatttctcatacatgagcatataacttgaaaacaatagaaatgttatcatttcccttttaattcttaaaaactcttattgctgttgttattattattagttttatatagcattaggcaggatatccagaaatggtcatagcagacatcttttgggttatttctgatcttatctatttagtgtgatgcttactgtatattttgggcatagctcctttactaacttaaaggaattcctattttactaagtgtttttattatatatatatatgtgaaatttctataaaatattttttctgaatctattgagaaatcatttgatttttctcccttggtctagtgtatggcttatattaacagatttctgtttttaaattacctcaagattactgcaataaaccttatttgatcacaatttttaaaaatgtgctgttgaattcagtttgcttatattctattttggatctcagcttttagaattttgactttgtgtttttaaatttccttataaagtatcaaggttttaaatcatatttatcttattagacattccataaactctttcagtctgaagtctttcatctttctttaatactaaaaaatccttggttattttttctttgacacttctctttcttcatttttttcttcaaaacttcctattacacagatgatgacacttttattttattcttcacagcttctaattctgttatattttccaactgtttgtcttttctcagtgccttctgggagagtccatcaacctggtcatctggctcacttatcccagcagaatccatttttaatatttatgtcatttattggattctttatttcaattattaaatttttggcatccaatgtttctgtttggttcttctttataactgctttatgttaccattatctttccttttccttatttattacacttattttaaattattaatctgtgtggtttcattagttctaatttatcttctataggttgtacagtttgttttctttctaacggtgatgtttctcagatgtcc

SEQ ID NO: 468232 - DNA, 580 bp, Homo sapiens
acattctatgggtttgaactaatgtataatgacatatatccaccattatagtattatacagaatagtttaacagccctaaaaaccctctgtgctgcatgtcttctgtcctcactggcaaccactgatctttttgctgtctccagagttgtagccttttcagatcgactcttatgtttagcttatcctcagtttgttctgacctacctagaggagctaaatgcacaagtagatgtgacccagacagagtatcacattcaccatggtgcctggaccacagctcatcaggaacatggcagaaacttagcagaagaggttctgcaagaaagtgccagcaaccttggtctgaagcaactgccagaaccctcagacaaccatttaatgccagaaggttctcttgaggagacgggggagctgacagtagcactggtgaggaaactggaagagaaacatcctaaggcttctgctcagagctattgtaaaaggggttgaattcttgatttgattctctgcttggtcactgttggtgtgtagaagagctactgatttgtgtacattaatcttgtatctggaaactttgcc

SEQ ID NO: 468233 - DNA, 613 bp, Homo sapiens
cgggaaaccaccatggcacatgtatgcatacgttacaaacctgcacgttgtccacatcatgtcaccaccttgaaggtatttgatattctgctgcttttgggctttttcattcagccttcccctttctccaaccagaggatccttttctatcatctttaccatgacatgcccaaatgtattacctctataccttcacccactccattagactgttcccgcttatgtggaattccctgcatgatgtttctttttcttctgtttatattaagtcattacttcaccttttctttaaaacttaaacctttcaactgtagccatcccaaggaggactggttcttggctgctggctcttccgccctctggggacctacgtcctgctttgcctcctactcctcgttcccgtcctgccactggtgcagtttgactgggtcacatttgggggaaaggtctgtgttctactgttgacctttactcttttgttggggttaaatttttattgtgttagaacattttgaattttacattgctgattgctagattttgctatctttatttcaagaatgtcaaagtttcacaggaggttaagttacttgctgataagcttcatcatttt

SEQ ID NO: 468234 - DNA, 709 bp, Homo sapiens
aaactttcacaaatgcgtaacataaacttcagtgagcagagtagggggaaaagaagtgacttaactttggaaaatggcattttgactggatgctgtaaggctaaagacaaaaagaaagagacatggatggagctggaagctgttatcctcagcaaagtaatgcagcaacagaaaaccaaacactgcatattttcacttgaagcagaaattcattatgaagagcagattggtaaaattattgtggagacacaggaacttaaatggcaaaagacagatccaaaggttgtgcagattgtgggagtaaaatcagggttgaattatatgaaggacaagtctgaaacagacctatctgtggagggaaagaatatggagggaaagaataggtaaatactaagtacaactaatttcaagcagattttaaaatgtaaagttatatcttgtttttgcatagagctaacagcataaagttatcacagtccctaagttttcatgcctcttattttttatttagatctttattttaattgaaaaataaatattgtatatatgggctacaatgtgatgttttgatacacctgtgtatgtatatgttgtggaatggttatatcaaactaattaacatatccatcacttcaatgcttatttttttatagtgagaatatttaaaatctacttttaccaattttgaaatatacattattattaacta

SEQ ID NO: 468235 - DNA, 1636 bp, Homo sapiens
tcgatggccccctctacccagagatgtccaatgggactctgcaccactacttcgtgcccgatggggactatgaggagaacgatgaccccgagaagtgccagctgctcttcagggtgagtgaccacaggcgctgctcccagggggaggggagccaggttggcagcctgctgagcctcaccctgcgggaggagttcaccgtgctgggccgccaggtggaggatgctgggcgcgtgctggagggcatcagcaaaagcatctcctacgacctagacggggaagagagctatggcaagtacctgcggcgggagtcccaccagatcggggatgcctactccaactcggacaaatccctcactgagctggagagcaagttcaagcagggccaggaacaggacagccggcaggagagcaggctcaacgaggactttctgggaatgctggtccacaccaggtccctgctgaaggagacactggacatctctgtggggctcagggacaaatacgagctgctggccctcaccattaggagccatgggacccgactaggtatctatctggaggccgttgatgaaagacaccaggctactttagcctctgcaaccaccaaagccaggctcctggaagccatcagaagctataagaagccagcaggtgtgttatgcacagcagtaccaagaagctgtgtccaatagttcacagacttttcattgccttttaaactctcatttacaactctgctaaggaaatgggctcaaaacttccctggaggagccttgaaacttagattataaactattttagtgagttataaaaatgtccatgaaacccactaatgatatgaaatcacactaaggggcagtgtggtcaaatttctgatgcatttttcagaggaggattattaaattatttttgatattgaatgtaatattaaattccatgtaaaattgggatgtaacattttatatggaataataatattggatagaaaatagaaatgctaaatatggtttatgaatattttaatataaaagaaaaaataattggagacataagaagatttggtttgaaatagaatacaaaaagctgcaacaataactaaccagtatagaaaatgagattctttcagtcatcttagtaattgtggagttaaagtggtccttaggaatactatttctaaagtcaggatctcgatggatatatcattcattaaatattttaatatgccactatatgaggtacccaggataataatagtttataaatatgtgaggaaactgacacctaaacaaataatttaagtacagcaatgtgggagattggagtatgtagaaggttctatgggatctcagcaagaatctaaattagaattgtctggaaaatgtagagtagtgtgtcttagtctgatttgtgctgccataatagaatgtctgagactgggtaatttataatgaacagaaatttattagctaacatttctgaaggctgggaagtccaaatcaaggtatcagcatcttgtgagagccttcttgttatgtcataacatggtggaaagaaagaaggctacagagaacaagagggggccaaactcattcttttatactgtcaccaaccacacccatgagcatggaatcctcac

SEQ ID NO: 468236 - DNA, 719 bp, Homo sapiens
ccagcagcacccccctccactatcaccatgagccatgctgccttcaccactgtggtgaatgcctgcatggagggaggcctgggcacagccaaggagtatgtaccccaccgtgctgctgccactgcaaatgagaatggatcctgctgctaccgcaggatggctgctgccactttggctgacaccacccaacagaatgtagtgaccagcagtctgggagcacctcggctcttccagtgcagtggatttccaaccttgaggagccagagaacaaagtcaggatccagtacaagtcccccagagttagagcatgcagataaaagaaaaaagaaaccatccaaatgtcagcaacttcaaagattaaaggaagataagcccacaaagatgagaaagaacaaatgcaagaactctgacaactcagaaacccagagtgccttctttccttcaaatgaccgcactacctcaccaacaagggtactgaaccaggctgagatggctgaaataacagaaatagaattcaggttatcgatagaaataaagatcattgagatgcaggagtactttgaaacttaatccaaggaagctaagaaccactataaaacaaaacaggagctgacagaaaaataactagtatagaaaagaatgtcaccaacctgatagagctgaaaaacacactacaagaattctgtaatgcaatcacaagtattaacagcagaatagac

SEQ ID NO: 468237 - DNA, 3436 bp, Homo sapiens
gcttataggcgtgagctgaggaagcatacagcgatttccctctcccacctggtgagagagcctccacgggctctagggtaaaatggtcgagtgctgtgtgggtgttcttggtgctggaaggatcctgctctactcagttccaggattctctatggggcctggaggtggattctccagggggccgcccttgtggattgtggaatgcctcaccaatggtcagaagcacgtctcccctggtggctccccacagtcgtcctcccagggcccatctccaccctctggtgccactgggcatgcggagagcctctggcaagctgcaggagctgccaaagcatttggttattttgctcattttattaataaatgtgcacctatgccaaccacatggcgactgccgcctaggaacaagagtcggaacatgctctggggagatttctggctggattttggtgacaaaggaaacagacagggatctatggggagaagggagtcaggcagctgacagacatttgcgggcttgcaaggacctctgcagtttgtgaaggcctttttgggaaaaggagagttgggtggaactgtatggaaggggcttggggccctgacccttcagccagagggactgtaaaccgcatggagcttggacacatagcttggcctgactgcaggcagctggacacatctttctcccagggtctgttggctcgtgggttcctggtgagggcggagctgatggcaacagtgccgtacctgcaaaggactttgaaaaccccaaagcaaagagaaagaccttccaccagaggggctgctggcccaatgccacgctccatggagggagttggccatcacatgtgcggtgctgggtctgggggctgtacacacaaagctggcattattggcacctttccgggatgctgtacagagaaatacccaggagtgacgtgacccataaggacaggttggatgagtgggcctttgtgtagaagaagccagcaggcaaacctcatagggagcaagccccaggcctccagggctccagacccctgtgcaggcaccagaatggactcctcctccagccaggaagtgtgttctattctattactggccagagaataaataatctgaaagcctcgccaggatctgccgtttaccctttaagggaatgaacttctgttcatttgtaaaggggggaaaaaaaagccttcccagatgaaagtctgggctgagggaagagtgagctaggcagatggcatggatgccagcaggaagcccttacagccagcaggccgggcccaggggccctggcatcccgctggacagtcagtgcctcccacagcagccccggtcctgggctcctcaaatcttagctcgggcctctctacttagtttgctcatgcccttaaaacagcaaaaaatgtcaatcacacatactcaatctagtaattcatttataaataataatcatgcatgactataccaacatgaacattgtcaaacatgcacaaaaatacaaatttaaaaaataaaaccaagataaaatattttaaaattccttaattactatggatgatttcttttttaccactattacctttattaacaaagcaaaaatatacagtatagctaggttcattagtaataatagtggatataaattcttatttcaaattgtcttctcattcatagtataaatctgggggccaccttcttgtgggatccaactggattgtcccagctccaaggtcacccttcagagaagcttggatcggcccctcatctaaagaatattactctccccccagtgactgtctcagggcttcctttataacttttaaagtgcccatcacatgttgtcactatgtaaatctgctcatggactctgactactgtctccccaactaggcaatgtgcttggagttcatcagagaggatccatgtctgctgttttcattgctatatgcccagagaccagcatggtcccgggatattgtaggtgctcaataaatgcatgaataatgagatgaacgaatcagcccaggcctgagcagatggcccacctgagtctccggagccttggggcccagcaggaagctggggcggtggggtccaccctcctcttagagaagttgtcagcaccagacttcaagtcctggccctgcctcacagggcctctgtcctgggttgccctctccacctcccactggccagccagccccagcccaggccattcagagaggtaccacgaaggctgcacctgcagatgccacccaggtcagtcccctgatttcatgcaggaggcatcagccatttgccagaggtggcagcccattggaggaacccgaatctctggctcctggtgagttctctctgtgatgagcatcagatcacttgagtaggggagagaggagtggctacaaatgcagatctctcagctcaaaccccatggatttggaccccggaggtctggagaggggcctgtgaatctgcatttgtaataaactttacaactgagtccctgaagttctcctgggcactcccatccggctgtctctgttcatttctagcctgaatgacaattaaaggtcagtgacataggtggagcaatagtaactatacccatttaataggtgaggaaatcaaggccccaaaatgcatacagtttcataaagtaaatttgatgctgtaaattcataccagagctaggcacggtacccagtacttcaggctccttagttaatggcttttggacaccagtcccctggggagatcagggatggcccttaaacatgcccctccattctgcccctgcacagctacaatatttaaaggccctaagtcctgaaaagactatggtgtctcccctcatccccaatgaattctaaacaaaaataacactaaactgtaactgtaaggaaatcccatgatgacaacagtactttaatacatttttgtaaataaaattgtttaaaaacatttttccttatcttatgggtggccctgcttctgtggtgcccaatgcaatatcctggcttcctaggagatagctccttgtctgcaatgctcattccagtgtggagtctgggtgaggggcaggttggtccctcccacccctggacattgttccacctcctttaatcccacctggtttcctccccgtggaactggaatgcactcaccaggagagcctagcatttcaaagatgtgccctggcaaggcaggctcttattgatggggattttaaatgtatgcctcctgtctccttgacaatctggcttccattcctgtgggagcttcttccagggaaagcccaggctccctcccctctagggaaggggcccctttccaaccctccttagagaggacagagactagagggaagggcagcccacccacgggtgcaggccagaagcccctctctctgcttagacccctccatgtt

SEQ ID NO: 468238 - DNA, 1284 bp, Homo sapiens
tgatttagaagctgcctcaaaaatatgataacttcctccagctctgggaggatgaattcattttctgcagctcagccctgtgcactgggcagctcaaccctgtgcactgggcagctcaaccccatgtactgggaagctctaccccatgcactgggcagctctaccccatgcaccgggaagctctaccccatgcactgggcagctctatcccatgcactaggaagctctaccccatacaccgggaggctctaccctatgcaccagccagctctaccccatgcactgggcagctctaccccatgcaccgggaagctctaccccatgcactgggcagctctatcccatgcactaggaagctctaccccatacaccaggaggctctaccctatgcaccagccagctctaccccacgcaccaggaagctctaccacatgtactgggaagctctaccccatgcactgggaagctctactccatgcaccgggaaactctaccccaagcaccgggaagctctactccatgcaccgggaagctctacctcatgcactgggaagctctactccatgcactgggaaactctaccccaagcactgggaaactctaccccaagcactgggaagctctaccccatgcaccgggaagctctaccacacgtactgggaagctctaccccatgcactgggaagctctaccccatgcactgggaagctctacaccatgcaccaggaaactctaccccaagcaccgggaagctctactccatgcaccgggaagctctacctcatgcaccggaaagctctactccatgcactgggaaactctaccccaagcactgggaagctctaccccatgcaccgggaagctctacccccatgcactaggaagctctactccatgcactgggaagctctaccccaagcactgggaagctctaccccaagcactgggaagctctcctccatgcaccgggaagctctacctcatgcactgggaagctctaccccatgcactgggcagctcaaccccatgcaccgggcagctctaccccatgcactgggcagttcaatcccatgtactgggcagcagcttgactcccactggtactgctgccaccaggccatctactcatggcactgtcttcctcacccatcactcccagatcccactagccctcttcagtgggccctgctagagtgagagaggcagcagtttcctcactgaagtcatcaggaatctttcagaagtgtttagaagtgacaaaatttaaactcaaaagacgtctaa

SEQ ID NO: 468239 - DNA, 551 bp, Homo sapiens
gaggcacacccacttcttaagatctctggccagagtggtaacctcactcccacccatatcccattggtgggaatgagtcacaaggtcatgcctggctgcaaggagggctgggaagtatataagaacgagctcagcacctgtgtgggtctgatcctgcaggcagacagtcctctctgcgagcaactgagccagactggggaaagcagggacaccaggacaggtcatgaaggccgatctacccagaaaaacacagaagaccgggagaatgacttggctcctgacaaggatggcttcagcctatcttctagaatttctgtcaatgaggattcagttttggaggacagcagatgtttgacttcctggaggacaaagcagaaaagccgacactttgaactttcttacccctgtttgaacatcagtgctcaggtaacaggccagtggctggagagcaagcttccaagattactcttcactgtgaattctccagcattttccaagcaaagaaaagctggaccttccactgatgtttacatctgacaatgtcttttggt

SEQ ID NO: 468240 - DNA, 521 bp, Homo sapiens
ggctgcgggacccagcccctcgccgggagcgggcaccatggtgctgtcggtgcctgtgatcgcgctgggcgccacgctgggcacagccaccagcatcctcgcgttgtgcggggtcacctgcctgtgtcggcacatgcaccccaagaaggggctgctgccgcgggaccaggaccccgacctggagaaggcgaagcccagcttgctcgggtctgcacaacagagagctgaatccgggaggaacctgaaggactcttccccaccccctagcagctctgagctccagccagtcagagggggttggtatggcctcccccaagatgtctctgcagacgtccctggagacaggagggcttttatcccatgcatttgctcatggccagagccccttcgtgcaggaaatagcccgtgctcccattgtaaagagcagcagaaggggtctggggaagcagtttggaaggatttccctgcataggcttcctctagagcaacgccttctctgattgtttcttttaattcacaca

SEQ ID NO: 468241 - DNA, 591 bp, Homo sapiens
agcttcagagatgtggctctgctgccacctggagggcagagccagaacagctgagtcccccgccgacccatgatggctactcctccactcagccctcatcccatatatgacccaatcactttaaaaacacaatctcctttattaaatgtttctaagggagaagatgaatcagagaagaacaacggaaaaccagagagaaattgggaaacttggaggttacgaggatctaaacaaaggcagaagatctggagttggagagagaaggatcctgaccactcttcccatcatatgctcctgccccaatccaacccacccatggctaatacacagtcaaaagcaccagctgtgatgcaaagcagcatggtccacttattgagtgcttactctgtgtcaggcactgtgctcagcacttcatgtgcactgtcatttcactgtagctccaatgattgccacgcccacgttcagagactctcattagctgcatgcctatatccccattcattaccctttataacatggccctgagcttgtactgccattcactatttaatgatcttgggtaagatgtgctatgtaatctcaaaagatctc

SEQ ID NO: 468242 - DNA, 560 bp, Homo sapiens
actgtaaaactatccttaaattctgcgacatcctataaattcatgtttactttttcacattataagattatgtatcagagctttccttctaacagtcaggcccctcttctgcaggtctgctggagtgtgctagaggtctactccagaccctgtttgcctgggtatcaccagcagaagctgcagaacagcaaacattgctgcctgttttttccattgaaagcttcatgccagaggggcacccaccagatgccaaccagtgctctcctatatgaggtgtctgtcgacccctgctgggagagccaacaggcaataacatttaagtctgctgaaactgctcccacagctgccctttctcccagggatgcccttcccagagaggaggaatctagagaggcagtctggctacagcagctttgccgagctctggtgggctccacccagttcaaacttctcagaggctttgtttaccttgaaagctaaaattctgagctgttgaccttttaaaatctcctcattttaactagatttaggagttcaggttctaaattactttgcatttc

SEQ ID NO: 468243 - DNA, 1483 bp, Homo sapiens
agagcatcgccctcctccatggatgtatatgattccttaacaataggagacatgaaaaagccagcaaccacagatgttttctggagttctctttcagcagaaactggatctctttccacagaatcaataatatctggcttgcagcagcaaacaaattatgatttaaatggacacacaattagcaccacaagttgggaaactcatttagctccaacagctcctcccaatggtttaacttcagctgccgatgccataaaatctcaggatttcaaagatactgctgggcattcagtgactgcagaagggtttagtattcaggatctagtcctcggtacaagcattgagcagcctgtgcaacagtcagacatgaccatggttggaagccatatagacctctggcccacaagcaataacaaccattccagagacttccaaacagctgaagttgcatattactcacccacaactcgacattccgtgtctcatcctcagctacagttgcccaaccagccagcacatcctcttttgctaacctcaccaggaccaacttctacaggtagcttgcaggaaatgctttcagatggaacagatacaggttctgaaatttccagtgacatcaattcatcacctgagagaaatgcttccacaccattccagaacatcttgggatatcactctgctgctgaatcttctatatcgaccagtgtctttcccaggacctcctccagagtgctgcgggcttctcagcaccccaagaaatggacaggtgcagccactaatgcagcggacacagtatcatctaaggtacagccaacagcagcagctgccgtcacattgtttctgaggaaatcaagtccacctgcactgtctgcagccctggttgctaagggcaccagcagcagccctttggccgtggcctcaggaccagctaagagcagttcgatgactactcttgctaaaaatgtcacaaacaaggccgcatctggcccaaagaggacaccaggggcagtccatacagccttcccattcacaccaacctacatgtatgcaagaacaggacataccacgagcacacatacagccatgcaaggaaacatggacactgcctctggcctgttgtctacaacttacctccccaggaaaccacaagccatgcacaccggcctcccaaaccccaccaacctggagatgcccagagcatccacgccacgcccactgacagtcacggccgcgctgacatccattacagcctcagtgaaggccacccggttgccaccattgcgagcagaaaacacagatgctgtccttcctgctgcatcggctgcagtggtcacgactggcaaaatggcatccaacctggagtgtcagatgtccagtaagctcctggtgaagacaggtatgagaccactgttctgatctgaaagcagcaagcctggcctcagagatgtaaccataatgtttattttagatcagtggtcctcaa

SEQ ID NO: 468244 - DNA, 1345 bp, Homo sapiens
tgaggtttgtcgccttgcctgattgccatgcttctattttaccccacagttctctttctcacccaaaggagagtgcagatcagtgaatccttgaagttcagtatcgccaaagggctcacacaggcattgcggaaggctttccaccagaacgatgtctcagctcacattgtgagcacgtccaatgcctcccaggcagtcaccttggtgtacgtcgtgggcaatcagagcacattcctcaacggcaccgtcgccagcagcctcctcagccagctctcggctgagctggtgggattctacctcacctatccgccgctaaccattgctgaaccctctgctctgccttctgcatccacagtgctgcagggtgtggacaattcgctggtgggcctgcacaaccagagctttgcccgggtcatggagcagcgcctggcccagctattcatgatgtcccagcaacaaggccggcggtttaaacgggccaccaccctgggaagctacactgtgcaggcttagatcattttaaaagatgagctaccttcatgaatatggagatttaactgtctagaatctaaagatatttcttaagttgacatatttgaaaaattgaggcctaagagaaaacatgtgaccactaaaaatttttaaatatttgacttaatttgtaatcgaagtaaggcaagttttaactaccacaagatgccattttcacctaccaaagattagtaaaatactaagatccagtattgatgagtgtggagcgaaaagggcactttcaaacagagcaactggtctcctgctccagcgagagcaggcttcttgagaggctggatatagggaggtatgtgaaggttggcgtctagccacagaagtcttcagcagtcaggagaggaacatctgctgatcacctgggtgattgcagggtccatgcaaaatgccctgcaaacactcggcctctctttttccgaaagatggtgaagatgcagcgtgtcccaggcccgaaggacccagcggagctgacttactataccctgtacaacgggaagcctttgttggggaccgcagctgccaagatcctgagcaccattgattcccaaaggatggccttgacccttcatcacgttgtccttctgcaagctgaccgtaagggaatggtctttttattcagtctttttaatgccattaaatgtttcctgaaaatcaaaatgattccccaaaatcatgttaatggtctcagagctaaacatatttgtattctggaaggttcttaaatcaatcagctatgtttctgtgttgtttcaagcaataagggatatgttttagatactggaaggatggtaatgatatt

SEQ ID NO: 468245 - DNA, 611 bp, Homo sapiens
atcacagcgcctaacacacagacttgggactggggtggggggttatgtctgggttgctttcctcttcccagtgttgcttgtcatgtccctcctgctggctctttcccacagccgtggtgaagaacccgcccaataacctgtggatcatcgctgcagtgctggcgcccattgccgtggtcacggtcatcatcatcatcatcactgccgtgctctgcaggaagaacaagaacgacttcaagcctgacaccatgataaacctgccgcagagagcaaaggtatatggaagtgtctcaggacctgatggtttgtggttatctgatgcccattcggccatcagtgcttccaagtgttttatatacagcagctctctaattctcacagctgcccttggaggaagtactattattttacagatgaggaaaccgaggcatagaaaactacaagctaaagagacatgaaagggattttagagataatgtaatcagactccctcctttcacccatgaaaagtaactctttcaaggtcatatggttggtaagtagcagaactgatggtagaataaggtctgctatgttctgaacgttgtggtccacagatttatatgttgaaa

SEQ ID NO: 468246 - DNA, 762 bp, Homo sapiens
tcctcagaggaccccgaataactcaatctccccaacatcataaaatcgatgtgtttatgttgtgcttcagtgccagcgagtgacgaagaggagggagcggttctatttgacaactccagcaaggtggccgctgaaccctttgacacatcttctgggtctgtgcagctcattgccataaaacccacagccctccccatggtgccccccacctcggacaggagccaggagtcatcggcagtcctcaacggcgaggtgaacaaagccctgaagcagaagtcagacatcgagcactatcggaacaagctgcgcctcaaagccaagaggaagggatattacgacttccctgcagtggagacgagcaagggtctgaccgaaagaaagaagatgtatgaaaaagccccgaaggaaatggagcatgttttggatccagattcagaactctgtgctccattcaccgagtctaaaaacaggtgcagtctctaagggattctggagttttacttcagtggtctttgggataggagctgggatgggagctgtttttcctggatttcatgctgacactcagggaaaatgaatcaaagccacgaaatcaaggtttgaagttacatgtgcaggtttgttatatcgataaacttctgtcatggggttggttgtatggattatttcatcactcaggtattaaacctattagccaataattattttttctgccctctccctccttttaccctacaccctgaagtataccccagtgtcggt

SEQ ID NO: 468247 - DNA, 605 bp, Homo sapiens
ccacagtcaccaccgaccgacgtgccatggtgacagcattgctcctcttggctgtgacagtatctcagattttccttatttttgatgaccttgacagtttttgggaagtttctattgacatatcttcaagatcactggttctttcaacaatgtccagtctactgatgaagtatggcaatttcacattcacctccagaaattcatcaaaattatcattttactgtttttaccagttgttgactccagcagcttctgcttcagattgtcaaattatccgtgtagctggaggaggaggaaagttgggaacgaaggaagaaaagaaagagagagagagagagagagaaagaaagaaagaaaaagaaagaaagaaagagagagaaagtcagaaagaaagtgacaaagaaagaaagaagaaagagagagggagagagagaaagaaaagaaagaaagaaaaagaagaaagaaagaaagaaggaaagaaagaggaaggaaggaaggaaagagaaggaagaaagggagggagagagagaagaagagagggagaattcacaatctcatttattcctttctacaaacaagtaaacagagtcctggaaagttgaaga

SEQ ID NO: 468248 - DNA, 484 bp, Homo sapiens
caggaaattacaatatgatcaaaaagggaactgatttagcaactggtcatatctacagtcaaccctacaaaattccctcatctgttcacagaaactataagtcttcaaagtactgtcccatctacccattcctcagcccagccctgcaacttgaacaggaaggtccattgcctgtggtctggctgggcactgagagtggagagacctggattctagcgctggctcaccattggttcatggcgcatgagcccatttcctcctctaaaaatgaggagagtcccttcctttcttaccccatatgtctgcactcaggtttcagggccaatttcagatgggccatatgctctctgtcctctgtacctttgcccaagctgtcgcctgctcctcagtcacctccctcattgccctgtgtctacctgtttaagaattaagctctaagattctactctatcatccctcacctccttcagaaagccttcctaga

SEQ ID NO: 468249 - DNA, 1105 bp, Homo sapiens
aataggaggtccttatcacccaggatggagccgggtgctctacttaatttaggggaaagctactctccgggaaacaggacctacattagctgccttttcagatatcgcacttcctcaaaaccacttcagaaggaaagtgaattagaaatgaatttgagacatatgagcggctttcactgcctcctccctgctcctggccagcagcctgcggagctgggacccacactctcccagcactgggtgacaccgtcccccaaagtctgtggacacactgaacccgcccatggggctggtgtggagccccgaggccaaggacaccttaaggaattcaacaacccctcccctgcacacaggcttcttccagggaagccagatgccatgttgcaagatttcctctggagagggcctcttggcaaggaactgatgtctctggccagcagccagcgaggacctaagatctgtcaacagccatatgagaaactcatggcccttggacccttctggagcctgagaagagactgcacctcccttgctgctcgtgctccccagggcacccgcccccaaactctaaagctgaatgctgtgagcttaggctccagggaaatgagggttcagggtacagttcactactgcctctattttggcatctacttcttggaggacctcaattaagatacccttttggagctgttacagacctgcttgttttctagtcatagtggggcaggagaagacagagaggctgtctcaagctcttggtggctgcgatcactgtcctctttcctagtggggtatgtcatctttgctcttgcttctctggaataagtggaatacagcttctgcctccaagggatctatgcaggatggggcatagctctctcctactctctgacatctaaccctgtctgaaaggggaagaattggccccatggaggaccccagattattttcagaaatccccttcaccagcatccaaatacctcctctcccctgtttggtagaatgtccattgtctgccaaaatccactctcctctcctttcatagaaagagctttttgtttgttttgttttacaactttattgaagtattaattacatacaacaa

SEQ ID NO: 468250 - DNA, 736 bp, Homo sapiens
agggcatggaggctgtgagaagccactgaggtggcatttggcttttgtcactgagcagtcagtcttcaacaggattctgcagttttccaggaatgacccctgagctcctggctacgtccacccagacacacaccttgccattcctcagagctgtgaatttgccaatgactatgatggcacagcctctcactgagggtgaggcactccttaagccccagctctgggctttgtgccctgcccccactcattgccttttttatagacagggagacaaatggtggactagtggacctggactttccaggtgttcatttctgccccaaggagggaaagagcagaggactcagggcagaaccttcccagtgctgggggagttctgcttggtggccatgccgctagctattgggaagcccccttcatggatggtccaggctggtctctgccctgtagcagctggtgcaagtttctccctagagagcagggtggagggtgttcccgattttactcctgaggcgaccagtgtggggctggtgcttatttgctgaattttctgacttaatgactccacaactgaaactccaataagtcattcaaaatgcatgccaaaatagaacactattagaaagtccgttttcagtccaagaagttcctcattcttcttaaatgtggaagggggggatggtgtggaaaagactgaaaaagtcccccaatgtctgtgcaccccactttctatgtt

SEQ ID NO: 468251 - DNA, 563 bp, Homo sapiens
cctcattctcccccaacacagttctgttctaaacatggaagcctgttcctcgtgccacacactgaccagccgggctacctccttgccacttccgcacctggggcctgtggccatgggcagacaagggcatactcaggtgggccagggtagccccaggaggcctgagaacaacatttttaatgatgcagacattggcgaggtttttgaccctgatggaagtgatgctaggtgtcttccaaggctgggatatgaagggtcatatgcctttcacctggttctactgggatgccagcttttggaaccaccatgctttgaggaagcccaggcagcctgcagagaggcccacttgaggaagaatcacagccctttgctggcagcccaggctaacagccagcgtcaacctgctagccactgtccaaattgcggattcaagagcaaatgaatgagccttcttgctttaagccatgatattttgggctgggtttttacacggtaagacaactgatacagttccctatttatgtaaacactaaacacgctatttggtgtttgtgttgagtaaa

SEQ ID NO: 468252 - DNA, 615 bp, Homo sapiens
tttatttttaattagacaaggtgacacatgatgccaggatggatggttaccttaggaggaccctcgtgatgcctgtcgtaggcctcccaccagcagatcggccttgtcgcaaagccttttctggtagatgtaggacagccctctatgctctttggggctttggaataggaggaacagaagtgcacagcgtggaatggggaggaagaagagggagacgtcgggtcgcagtgcgcagcgtgcaaccctctgcaccttccggccctctcacctcttcacacggcatttgctctttcattcactcagcaacaattctgtgccctttatacgtgctgggcactgctctaggcactggagacgatgaggagaagacacttcccaccttcatggagcttatttgctggtggggaccgcagcagctacagggtgagcaccgctaggagataatgcctgggaatatccttcttaaattcttgaatgtaaattcactttacaaggaaggcacagtggcaacaccacactgaagctacgacttcagtctgaggttcacgtgagcccctggtccaagcttccaagtggtttcagcaaatatattagatatgcttgattgaaatgtgt

SEQ ID NO: 468253 - DNA, 697 bp, Homo sapiens
accaactgtttgctatgacaccatggagctaaatagcagagctgccgaaataacagttgagagagagaaggttgctggtcagacctggtgcagttcccctttcaccactgggctccatccaactctggccttgacgttttctataaattcagaaaaggcctgtgccttgacttcctgcagtggcacccttaacctcatctcacactccactacgctgtccttgtacctcagccatgtcgggaaccacagaccatcactggacattcaccagagcaagcctttgtccactgcaatgctcctctgggctgctggtgtggatgacgtcattctcacaggctacaaggtcccagctgccttccagctcaggccagcatgtctctgccctgtgttctccctggatggccccagctgggtggttctgagcagaccggtccaggtttttattattattcaccagccccggtcaccttcagatgacttccgtctcacctacagccttgagaggctccctgagccagaaccatcaagctgagctgattcctccttgagtctagaagctgtgtgaaataatacatgtttattgttttaagctgctaagttttggagtgatttgttaaatagcaatagataactaacacgacgtgctcttctgtttctctaggaggcaggcttctttcattatgttctctacaataac

SEQ ID NO: 468254 - DNA, 959 bp, Homo sapiens
caacagcagctttcctctgctgctgccagtgggcgcctgtgggagtgggggaagtggaatggtgatcaggaaagaagaacgactacacatagccagaagaaatcttgtacagattgaagctgagcctcctttggtctcatggatggcactattgatgggccagaatgctccccctccacggctgggttccgggagtcaggactgggtgtctccgatggacagtttgctgtctcggcctgcagcttggatggcgggagactcagaaatccctacagatcagtgcacatggtggcagccactaccaatgtcgggaagcacagctgctcggagctctcttttgtgctgctctaaagccattgattggagactaatttctcctgggacagattgggattgggagccccaaaccgaaagaatgtttaattctagatttcttaattgtgctgggaagggagttcttgggaatggtagagcaatgaaaggagcaaagtggtggggtggtgtgggtcagggtgagagttacagagaaaagaagcaattcacttctggtggccttgaaagacttacctggtaggaatgttttcaggctagcactctgtgactgcctcctttgggtggaaagagtgcttctcatgctatttctctcttggtatctgacatgtttctataattcggtagttgtttccgatctgtactgaatgtattttttctctccaccctgatgactgtttcctgaaatgggatggccacccaaattttttgtattttatgagagcttttgggttttcaaatatcatcttctcataagtcaagttgcaaattcttatttatttcctaggtgtttgcaatcactgatattcattttcattaactcattgggttgccggctacatctgttcggtagctccataggaattgcctgccatgaaccgagagctatatgggaaatgtggctggcc

SEQ ID NO: 468255 - DNA, 463 bp, Homo sapiens
ctcaaaggcatgcccagtaacctcctctgtagtttcttctcagttgtctccagcagcattgagagactgctctttgatgatgcttaccaaaatgccattactagcatgagtgcaagcccacagccccaagatcacagtgattctcatccgaaaatgatccctcaccaggggacatctgacaatatggagacattttggtggtcccagctggggcagtgctgctgcttgcatcgagtgggtagaggccacaatgtaccctacaatgtacagcacagcccccacacaacaaataattatctggcttcaaatgtccatggtgctgaggttgagccacttgctctagaaaaatgcagagtctgtcctcatacctatggcaactcaagctctggttcaggtgctccccaggaaaaatttctgcaggacaaaagtcctgagctggttaggaactgacaaaagatgcctg

SEQ ID NO: 468256 - DNA, 1023 bp, Homo sapiens
gcaggcctccacatgccgctctgctggaactgcaatctagtcctcctcccatgcaccggccttgacctcttcccccgcagcccggtggctcagacctgcgaaggaaccaaggcaagagggagaaaagccctgccgcctgatcccacgccgccactcacagacccttcgttgaccggcagcattgaacaggaaaaaaaaaaaaagatgaaaacacagaaaaccccaaaaacccagacggggagacgatgtggggaagagaacgtgctgggagcctcagtagccagtctcctcctcgtagtaagcggaatattcaggggcctctccagggccaggacggtcgcctgcacccgagggagccccatcggccactgggccttgcgggcagtacttggggtcgtatatctgccggcccaggccaaagacctggccgctctggttggcgccctgcgcgtagcccatctgcagggacatgaaagagttgttacacttgtcggttcccagcttggtgtcatagatgtaccgccgggtcccgggagccgtcgtgcccacctggctggcacacttgtttgcacccatctggaggctgatggtcgagcggtccatggggggcaatacgtggttcttggggtcatagagatgcctcctcgtgctgtacgcggtcatgcgggactggctggtgcatttgtgggtgcccatctgcagcccgatgacgcactggcgggcattcatggtggcgtcctcaaagtcccactcctgcttctccgagtgcgtgtcaccgatgtccgcccctctctgcggccccttagtcttggccttccctgccagggcgagaagagacacctgcacctgcatcgtgttcccactctcagacaggtcgttggcctcaaacaggtccacggggttcatgccatttggacttgccaaccctcataatcacatgatctaattccctaaaataaatattttactctctgtatacacatgggtaagtttaaggttgaacttaagttctgtcttggacaa

SEQ ID NO: 468257 - DNA, 1596 bp, Homo sapiens
ataggagttctcaggcagcttcaatggaaggagggagccaagaagggggcctggtatacattcaaagatgataattacgacatggattgtgtatattcttgctcggaaaggtgtagggcttcccttcctaccaataaccagttcggacattgacgttgtggaaagtgaggctgtgtctgtactacatcattggttgaaaaaaacagaagaagaggcttctcggggcataaaggaaaagctgtccatcaaccacccttcccagggtgtaagggagaagatgtccactgactcccctcccacccatggccaggacatccacgtgaccagagatgtggtgaagcaccacctctctaagtctgatttgttggcaaaccagagccaagaggtcctagaggagagaacacgaatccagttcataagatggagccacactcgtatcttccaagtgccaagtgagatgacagaggacatcatgcgagatcgaatagagcaggtgagacgaagcatatcccgtcttacagatgtctcagctcaggacttcagtatgagaccctcctcctcagactgctgagagcaacagatggagctttgggaacgcggagaacagtggggttacagggagtcatcatcagccctaccccttggccaaccacatctccctgctgtgtcccctgggcatttctctacctcccaggtggaagtccttcagggtccagcagcaacctgtatcagaagaacatccttctctgcttgacctgaagaagggccagacctgggcagaaagactccagcaggtgagctcttcatgcgacagtgtcagcactggagtcttcttgctgaactgcgaataaagagattttttggaaaatgtttcacttttttccactcttttctttttctctttgtgtttcagtttgggtagattctactgacatttcttttttttaaattttttaattattattacactttaagttttagggtacatgtgcacaacttgcagagtttccatctctctgtttacattacccatctgttcttgcgtgttgtccactttccccattagagcccttagcatatttttcatagctgttttaaattcccagtctaataattccaacatatctgactggtttctatacttgctttgtctcataaagctatgtatatatatttttagcaagctttgtaattattttggggaaagcaggacatgatttatcaggaaaaggagctgcggtaaataggccattagtgtgaggctgtatgtttacctggctgggaggctgtgtttatggttttgtagcatgtcagaggttaaggtttcctctggcatccttgtctttgtctttcttgttgtctttgagtgtccctagaggctccttcttaaatagagtctgaggtttacagttatttctgctgtaatcccgttattatataaccagggattacataattatataataatttaacacaatatgggaagcctatattgtggtgataagtgcgtgggaggggaagtgttctatatttgcaagattagttctcagtgtttagtgagcctttccctctgggctgtgacctttctgtgtgatt

SEQ ID NO: 468258 - DNA, 607 bp, Homo sapiens
ctggagaagagtttaaagcatgggaaaagtcttcttcaaaggacgagaaagagctctcctccactttgcctttcttcacttactctcttggctgctttctgctcctctgtatccatctacatcactcacatgctgtcttcccaactcgtagcactcaacctcttctgtatactaccggcttccgggatttatggtgggggatatccctactgctttccctgggcttatggcaaaagaaaatgaagtccagtttgaagtctcctgcaatatcattctgctttctgggcagaagaaagagttggtttgttggcaggggcaagggagtagttctggtcctagctcgaccatggacttgctgtgggactttagacaaagcacttcctctctcttggcctcagttccttccatgaaatattgtagtgtatactgtttgctttgtgcccacaaaaactcattgctgcaagtgggcaggacttgtggaatggctgagtgcagatctcagcaaatcctcttttcccaaaacaattatgaagccagacaaaattgccaaagacagtcatttaaagactggaaatttgaccaaagccatacaacagattgagaaggg

SEQ ID NO: 468259 - DNA, 654 bp, Homo sapiens
gagcacacgctgtttgaaaaaaggcgccaattgacttatctgacgcacgggctcttttctttgctccaggtagttgatcaggtctggcttagagacagcaataccatttctaggcttccagcggagtcctaacatcttagctatggatttccaaagacctgcaggtcacagggccacagaagctgggtctctaggagatgataacacagcagtgaagggaaaaccaagacccagacctggagacctgattgagatttttcgaattggctatgagcactgggccatctatgtagaagatgattgcgtggtccatctggctcccccaagtgaggagtttgaggtgggcagcattacttccatctttagcaatcgggccgtggtgaaatacagtcgtctggaggatgtgctgcatggctgctcctggaaggtcaataacaagctagatgggacgtacctgcccttgccggtggacaagatcatccagcgtacaaaaaagatggtcaacaagatcgtgcagtacagcctgattgaagggaactgtgagcactttgtcaatggcctcagatatggcgtaccccggagccagcagtgtccggggcttggtgggccctggtgtgagaaacctcccgtcccgtgagaatttgcacatgaaga

SEQ ID NO: 468260 - DNA, 1273 bp, Homo sapiens
tgggggtcacgtgttcacaatcaatggcctttgaggagctcttgagtcaagttggaggccttgggagatttcagatgcttcatctggtttttattcttccctctctcatgttattaatccctcatatactgctagagaactttgctgcagccattcctggtcatcgttgctgggtccacatgctggacaataatactggatctggtaatgaaactggaatcctcagtgaagatgccctcttgagaatctctatcccactagactcaaatctgaggccagagaagtgtcgtcgctttgtccatccccagtggcagcttcttcacctgaatgggactatccacagcacaagtgaggcagacacagaaccctgtgtggatggctgggtatatgatcaaagctacttcccttcgaccattgtgactaagctctcttttggactcaggacttgtgcggactatgaaattctcctatggtggctggtggaatctgctcggtggttgataatcaccaataaactagatgagggcttaaaggcacttagaaaagttgcacgcacaaatggaataaagaatgctgaagaaaccctgaacatagaggtactttatggagctgtcgctctcatagttcgatgtcttgctcttttgacactaaatcatatgggccgtcgaataagccagatattgttcatgttcctggtgggcctttccattttggccaacacgtttgtgcccaaagtaattgtccacatgctggttctaccttctatagaatgggcatagcgaatactggacagaataagtaagaaaaaatttctgctagaaaatgcagaccctgcgtgtggctttggcatgtctgggaatcggctgttctgctgctactttttccagtgttgctgttcacttcattgaactcatccccactgttctcagggcaccagtcatattgagtgaggggtcccactctactccaatatgaccttgccttaactagtaacatgtgcaacaacactgtttctgaataatgtcacattctgaggtatttagagttaagacttcaacatataaattttctttggtggggggacacaatgtaacccataattaatggtgagatttcttaaattttttaattcaccccttaactttcaaagatgccatttaccacaggtctaaaaagaccaagtgagagtagcaattttcaaaactccctttggatctgcacaggcagcaggaccttttacagagtgagtgtgattcgctagaaatactgactt

SEQ ID NO: 468261 - DNA, 802 bp, Homo sapiens
gcctaagtctgaacacaaggggaaaatgaactctctaacccagaaatatatacaggtaatatctgtgtgggttaaaaaactctataagaagcaagtgactaaaaagattagactttggtttcaactttacaaatatctttgggagaattccacacaagtttgggcagtaaaagctattttgagaagggaatcaaaatgggaacctatatacatccctcccctagggtgcattatcagtatgatacactaccatcttcctggtgggatggaagagattacagccacggtacagaagcttgttgaagttaatattatatggccagctgagttctttcagtcttatgtgacagaagggctgtgggcttcagatgagatgttcaggttagggcagagtggctttgctgtgggccattcactggagatggctggaacctccacctggggcaaaggagactggtggctgttccttgaggtacactgtgatattgtttatttgaaaccttatttgaaataagcatttattgctataaacttcactttagcaaaacttttgctgtatctcttagtctttaatgtgttgtgttttaattttcatttatttcaagacattctgaatttcactttttaatttctttcttgacccagtgattattccagatttatgttttgtaaatgcagctgctatttacatattcttttatgaaatcttatggacacaaatatttggtaatatttggtgatttttatttactaagtaggcttatttttaactttataagccttttaacagaactttataaga

SEQ ID NO: 468262 - DNA, 512 bp, Homo sapiens
gtcaccagcatcaaagaccaaagatcacaactcctcaccagcaagggaacaaaactggatggagaatgagtttgacgaactaacagaagtagccttcagaaggtgggtaatagcaaactcctctgagctaaaggagcatgttctaatccaatgcaaggaagctaagaaccttgaaaaaagggtagaggaattgctaactagaataaccagtttagaaaagaacacaaacgacctgatggagctgaaaaacacagcacaagaacttcaaataggcaactatgtgaaaagacaaaacctacatttgactggttctcctgaaagtgatggggagaatggaatcaagttggaaaacacacttcaggatattatccaggagaacttccccaaagcaagacaggcccacattcaaattcaggaaatacagagaacacccacagatactcctcgagaagaacaaccccaagacacataatcatcagaatgaccaaggttgaaatgaaggaaaaaatgtt

SEQ ID NO: 468263 - DNA, 677 bp, Homo sapiens
agctgcttcacaactcagctaggtacagaaagcctgcttcagccctgcctcgcccacgggaagtccaagggccccagtatggacctggacctcacgctgaacttctccatacacctgctaatgtgcccccaattctccctccctctcctcccctctccccgctccccaacccttcctccacaccctctgggcctcacggtctatcagcagcaaatttcccacatcctcaatatcttctctggacagttctgtcatcttcttgctctaaaggaaacctggctgtcctgtgacatcatcacttcccctgctgccttgcgtctcatgcccagtggccttggcgtggccagtgtccactctgctttctgtccacctctttcttctgaaggcccaggtcctttaaaatttgtgccgtcggacctcaccacctccccggtgtgctcacctgcccactcttcacaagagctgtttcacatcgtctcctccctgagcctcctctcactcattcctcctgcccctggccccattgctgaccaccaaggactgtactgccttcccagccacggtgactctgggcctcagcttctacctcattgagaagcaactccatcccctaaatcttcctaccatctaagctactgacttgctaataattgcactgacacatgatttcctttttt

SEQ ID NO: 468264 - DNA, 749 bp, Homo sapiens
accacaatcctcatggaagacgccaacaagctagccctaggtcagaagttaatagttcgggtgccacaagctgtagacaccttaatgcagcaaagaggacattctgcacttcttgataaactaacagctgcctggggctctggccgtggagctatgccagacaagttaatagatgcctcctacacctctgtcacaacccccaaaatgatcaccgacctgctctaccagaggagaactatttccttggctggctgcctgactcagctctttgtggagcacttgctgggaggctcagagatcatcctccttattgtcatggcctatgaccgctacgtggccatctgcaagcccctgcactacacaaccattatgcaacaagggatctgccaccttctggtggtgatagcctggattggaggcatcctgcatgccactgtgcagattcttttcatgaccgacttgcccttctgtggtccccaatatcacacatctgagtttcagcaacaaaatttgaatctaggtcttccaaatctcagtcgtacttcaaataaaacagttgttcatgaaagatgatgccaaatttgttgtagccttttatcacatgtagtatatattactactgaaatatatttcatgagttatgttcctatttatgcatggaaaataccagatcattctttgttactgtaaaacctttcatgaatcaaagtttctctgactgtaacacagttactttgcacaaatgttat

SEQ ID NO: 468265 - DNA, 589 bp, Homo sapiens
gtcttggaaattccatgagaatgggtgtacacctcttgcgatatggggagtaatatcatcttctcttcttctggaagtaggaataatatcacacaggtttgtacactttctgtgatattgggagtaatatcaacttctcctcctttgaatattaaaaacagtatcacagaatggatgtacaccccctgtgattttgggagaacaatatcacagaacgggtgtacactccctgcgatactgggagtaatatcattctcttcttccgcgaacattaggagcaatatcaccgggtggatgtacacccactgctatattgggagtaacgtcatactccaccctctggatattcggatcaatatcaccgggtgggtgtacacctacggcaatattgaaagtaataccatgctctctccctccatggacattgggaacaatatcatagctgtattttctcactagagaacactactagaatgttctcctaaatttcagatttcagatatgcatctgtaaaatgatcttatggagacacattttagttgctactgaatacttggttgttttcataagttcgcagcattactactgt

SEQ ID NO: 468266 - DNA, 1088 bp, Homo sapiens
atcacagtggtgggcaacctaactatgatcattttgaccaaactggactcccacttacatacacctatgtacttttctatcagacatttggcttttgttgatcttggtaattctactgtcatttgtcccaaggtgctggcaaattttgttgtggatcgaaatactatttcctattatgcatgtgctgcacagctggcattcttccttatgttcattatcagtgaatttttcatcctgtcagccatggcctatgaccgctatgtggccatttgtaaccctctgctctattatgttattatgtctcagcgactgtgtcatgtactggtgggcattcaatatctctacagcacatttcaggctctgatgttcactattaagatttttacattgaccttctgtggctctaatgtcatcagtcatttttactgtgatgatgttcctttgctacctatgctttgctcaaatgcacaggaaatagaattgttgagcatactattttctgtatttaatttgatctcctcctttctgatagtcttagtgtcctacatgttgattttgttagctatatgtcaaatgcattctgcagagggcaggaaaaaggctttctccacatgtggttcccatttgacagtggtggttgtgttctatgggtctctactcttcatgtacatgcagcccaattccactcacttctttgatactgataaaatggcttctgtgttttacactttagtaatccccatgcttaaccctttgatttacagcttaagaaacgaagaggtgaaaaatgccttctataagctctttgagaattgatgtcaactttgtgtttaataatcaatttgtaatattgttataataaatatataatatagattaatgtcacttgataatttttcatgtgtatataaattttccaattttcaaatttttttaattgttttttatttcaataatttttgggaagtaggaggtttctggttatgtgaataagttcattgggatctctttagtgtgctggctttctcaaatgccggttatgctagcagtaaaattgtcacatggacagactcaggacctctggttaa

SEQ ID NO: 468267 - DNA, 2541 bp, Homo sapiens
cgatggtgatcagggtcaacctagcagccttcatcatcctccttctgtaaagggagtgtgtgaggacaccatggacagaggtgaatcttccaaaagggtgggatggagtacattggctctgggcctctttgaaccagttcaaattgttgcaggagaaaggagtcaagatgtagacctcaagagagggttcctggatctgatgcacaaaggaattcaaggcaagtcacagagtgtgataagagatgtaaaagtcttgaacttgaaaagatacaaatttggagatgatctaataagtgtcatgaccaaatctggatctttgcttaaaaatgtgaaatcacttcatagtaattgctttttaattcatgactccaagggaacatttgaaaatatgcaatcatcattcatcaataaaacaattggagataaggttggtgagagaaatcacaaagttaaaggcattttttattatattaaaaagggaatctagccaaatgcccatcaaatgagttaaggatttttaaaataaaactctgtactataattttgttaaccaaacctgaaatagctcactatatgccctcaaggaggttggctcataaaatgtggttatgatgacataatatttatagatgaatttattataaatagtgcatgtaaatactgtatttcatgtactgttaattttattatagaatattttgtagaaataagtatgtaactgattaaacatatgaaacatattacatatgtaaattcatgatatactttcttaagaatatacatgcacttatacttttaaaacagtatgtactgaagatttatgtataaaaactgtttgtaagacaaaaatggccaaaagtaaaatatgcaaaataaataaaaatttgacaaacagcaataacaaaattgtaaaaatacaccatcaaaaaatggtctttttgaagtctattttatgcaggcactctaaaattgtagtggaaagaatgaacaatttgttatagtaaaaaaagtcctgggctctgggaataaagtatctgtgtggatgtcctggttttgttaaacacaagatgtagtgaaaaataatcagagaaaacataaactagttcttacaatgttatattgatatcataaaagaacattacatctatgtgatttccaaagactgtcatgtataaaatggggaagatgttcttttccttgtcatgtagttaacatgcattgcaattcaattatattacattattatacattatattattatactatttattatataatatattatgcgatataattatatacaataattatataaaacagtatatattataataattatataatataataattattatacattgttataactcccattatcccaaagcagtattagacacataatacaatgtagggaattcacatatgtttcacatgatttattgatttttacataaggttgatgaattatttgtatgcttggatgctgttaagttctgttgttagaattgtaacaggaaagcagagtgttatatgcaaataaatgaaataataaagttaaattgtacaagtagctctaagttactatataaactaagtattaaataccataaacatccacacacaaaaaaatattggttataggtgttatgtaaatattgccctttttcgtgaaatgagaagaccattgaaaaataaacaaactacagtttaagaaattgttttctggctgttcagaagcaatgctaagatcatacagtcagtaacagattattctagcttgaagaggtaacaggaaataacagaagtgtaaaagaaacttgcactaccacttcctaaacatactcacaactaagaggagtccacagatattctagcatgaggaggtaacagggattaagagaagtgtaaaaaaaaacttacactaccacttcctaaacatactcacaaataagaggagtccaaattaagcagagcacctagtgcagacaaccaggatttcatgatggttaaaggacttattgttgggaatagagactttttatgtgtagtttcttttcactggggacacaggctgcagcttattgtgcagatgtgagtcttcagtgtccaccagttgcatcattggcatcctttcttgtctcctgagactggaactaatcataaagctacacattctctcaatcgttgttcagtagatgcctctgatttcacatggataaaatgcgaaaattttattctttttataaatgtgaaaattatactcagagacaattttttaagtatattttatttatatatcaaagatctagggataaaaccaaattgcagatattaaatgcaattgcaggaacaaaataaatggttccaatcacatatttgctactcagacaagcattcaaatgtgctaatgatggaacagctgaagttttctttcttataaagtgggaatattcacatatttgaaattgatgtagattaatgcatcatgttatactccaaaactttaataatctcttattgaattagttttatgagtac

SEQ ID NO: 468268 - DNA, 1236 bp, Homo sapiens
agaagagaacccacagtatcttcatgttcgcacaaaatatatttgtcacaaatgaccagaaaaaattatacctcactgactgagttcatcctattgggattagcagacacgctggagctacagattatcctctttctgttatttcttgtgatttacacacttaccgtactgggaaatatcgggatgatcctcttaatcaggatcgattcccggcttcacacacccatgtatttcttcctggttaacctgtcctttgtggacatttgttactcaaccaccatcaccccaaagatgctggcagatttattatcagagaagaaaaccatctcttttgctggctgcttcctacagatgtacttctttatcgccctggcgacaaccgaatgcatcctctttgggttaatggcctatgaccggtatgtgaccatatgtcgcccgctgctttactccttgatcatgtccaggacagtctgcctaaaaatggcagccggggcttttgctgcagggttgctgaactccatggtcaacactagctatgtcagcagcttgtcattctgtggctccaatgtcatccatcacttcttctgcaacagtcccccactttttaagctttcttgttctgacacacacttgaaggaaagcatattttccacttttgctggtgtgaataaggtcggggctctgcttgtcatcctctcctcctattcctacgttctcttctccattttttctatgcattcaggggaggggaggcacagagctttctccacgtgtgcctctcacctgacagccataatcctcttctacaccacctccatctatacctacctgagacctagttccagctactccctgatcaggacaaagtggtttctgtgttctacacagtggtgatccccatattgaatcctctgatctacagcctcaggaataaggaagtaaagaaggctttagcgaatgtaattagcaggaaaaggatcccttcatttctgtgatttttttgcctaaaaatctgagctaaagagcatattttagttactttcaaagtctagttcatgcctacaatttttgttagaatattttctcattaaacacattctgccaatactcaaatatttgtatgcagttagggataaagcaaattacccaaaatgataaaagaccaaggggcctttactttataatcattctaaatcttcactgagttctcatagttaggggcttattttaatttta

SEQ ID NO: 468269 - DNA, 2702 bp, Homo sapiens
agatataattttctgctttggctaagtaattgaattcctcctcctgggactctcagaggatccagaactgcagcccatcctcgctgggctcttcctgtccatgtacctggtcacggtgctggggaacctgctcattatcctggccatcggctctgactcccacctcgacacccccatgtacttcttcctctccaacctgtccttgcctgacatcggtttcacctcggccacggtccccaagatgattgaggagatgcaatcgcatagcagagtcatctaccatggggactgcctgacacagatgtctttctttgtcctttttgcatgtaaggatgacatgatcctgactgtgatggcctatgactggttgcacatgaagtccaacgacaagtgttattataaaagacaaagaggcagaagaagtttgaggggaaaaaaggtgcagagaaacagagaaggacatcatgtaaaggtgaaggcagagactggaatgattcaaccacaaaccaaagatggtcaagattcaccaaaacaaaaaggggcaaggaatgagtcatccttaaagcctttgaaggaagtgagttcctgccaacgttgtgattttggaggagcctagagaactgatgagtgactaatctgctattgccttaagccacccaatttgcagtaagttgttaagataaaccaggggaaataatatatcacacaaattgtcctcttatttaagttttttatttgaatatctggaatgaattctgtattccaccttgcctcagctgattcagctgatatgccattccaccctacccttcaattgttgcatgcattttgggcagtaaattgacttctgtttaaaaaaaaaaatatatatatatatatatatattcttcttactttacaagctaaatcaatgaaatttgatcttgtagaggtaatatattttcaatagttattacaaacgtgttttttcaaaaacttttataacgaaatttgttttattgatgcaaaacaaatttgggagtaaagggaagtcactctcagagtatatgaagacactggagtacatctttaccttacagtaatgcacagcctctcaagataatgtctcagaactgctcaattgaagaaattcctacttccctaatatgtaagaatgcatatgtacttaaaaaatataacatcatttttgtaaaaccaataataatagcaactataatttcatatagcattttacatgtgcatattaggaatgggatgtttgcatattagcagtgtctaggaggatatgcatcagaagagaatattggcttcttcatactggcaagaattcagaagatttctgttttattatattttaatttacaatttatatttactacatggggaatataaagttagatcacaagaaataatatgttttgttattatgaaaatataaaactatattacaaagaaaatatttgcgtttctcttttttatttctactaaatgtcataaagaatatttcccatcaagtaggtaaattttttacatcaaccaaatctaattttgaaagaaaaataaatatcttttgatctaacaggaatgccataaaaacatatggcatttagggacattctttcaaagtataactgaaagtcatttaatgatagtatcagagagagacaaatttaaaataacaaaagtgggcataattaaaaacaaatgactaacggtgagccttaaatgatggtcaacgaaacaatctagaaaaaaagaaagagaaaaatatgaacaaatattgaattgatgagtggattcttactaatatttagcaaatcaaatagataataagcacaataaaaatttacgtgactattgacaaatgattttccagtctgtaataaatgaaatatgcaaaaatgaatttgcatattatcagaagccatataagtggtgtatttataaagtgagcctttgtcctttttaatgcaaaaagatatgtataaatttttgttcatatacttgctgacaatgataatttaaacaaattccaaaataacaaagtaaaaaaatagcaaaaatttaatcatttaaaaaaatggaacttaaagcacttaataaggctaataaaataaagataacatgaatctatttatacttaatgacaatacaatggtgcaataagtcattctctcattttgttattgttgttgttgttaaactgcctaacaacatgaatgctatgataaggatagctatggtcaaataaagtgatgagagggaaatggacagttggcatagacagtctaaggaataccaatgtgtaatggtcttgaaaaaaaaatcactatcatgatcttgttttcttatatatctaaattgaaatttcaaaagatatatgtttttagctgtattggatttcttatctgtatctagagtgcatcgactgtccagagaaatcacttcttagggaaaaagtacctttttttggtaatgtactttcacaaatgatgttgttatataagagcagtaaatattaagcataatttatgtataaatcagactaaacatttctacatgctataactctgtaacttgataaaatataaattttattaaaatatatgcatataataaaaacttgaagaaataagtgtggagaaattaacaattttaattgaatattgacaattttttttctaaatatattttcctggaga

SEQ ID NO: 468270 - DNA, 977 bp, Homo sapiens
cctgtctgaatcaataatcatctgtctttctgtgatctctgctattctactgcaactgggcccaagatgctggtagatctacttgccaagaacaagtcaatacccttctatggctgtgctctgcaattcttggtcttctgtatctttgcagattctgagtgtctactgctgtcagtgatggcctttgatcggtacaaggccatcatcaaccccctgctctatacagtcaacatgtctagcagagtgtgctatctactcttgactggggtttatctggtgggaatagcagatgctttgatacatatgacactggccttccgcctatgcttctgtgggtctaatgagattaatcatttcttctgtgatatccctcctctcttattactctctcgctcagatacacaggtcaatgagttagtgttattcaccgtctttggttttattgaactgagtaccatttcaggagttttcatttcttattgttatatcatcctatcagtcttggagatacactctgctgaggggaggttcaaagctctctctacatgcacttcccacttatctgcggttgcaattttccagggaactctgctctttatgtatttccggccaagttcttcctattctctagatcaagataaaatgacctcattgttttacacccttgtggttcccatgttgaaccccctgatttatagcctgaggaacaaggatgtgaaagaggccctgaaaaaactgaaaaataaaattttattttaaggaaatagtaaaaatacatgtttatacacacaaaaatgcatattcatactggtgttttcttcaaattatatattataacataaagttgtctcaaataccctaatttaatataatacatattttactcagccacaatctagcaattctctggaattgtctaaatatgctatttttttaatgtgttttcaatttagtataaatatagatgtatattatat

SEQ ID NO: 468271 - DNA, 684 bp, Homo sapiens
tgccctgaataccgcttgctccagccatgactaaaagggggcaagtgacagcacatgaaggcagccaggaggggtgctataccctgcaaagccacaggggcagagctgcccaagaccatgggaaactacctcctgcatcagcgtgacctggatgtgagacatggaatcaaaggagatgattttggaactctaagatttcactgccctgctggattctggatgttcctggggcctgctgtagatcagagggttcagcatggggttgacaactgtgtaaaatacagaggccactttgactgtttgccgagagtttttggagttgggtacacagtaaaggaaaaggatggtcccatggaagatggtgatagaagtcaggacagtcccgtggaaaatagtgatggcagtcaggtgggaagcacaggtagagaaagctttttggtgcccaacagcagaaggcatttttatgacagcaataaagatgaaaatataggtagtgaggatgactcccaagctgctcacctcattgaatattgcaatgacaaaacaaagcatttggctgatgtaggggtcagagcaggagacagagatgatgacagagtgctcacagacaaaattattgatgatgttagacccacagaaggataatgacaagaggaaatagctttccctgaaatgagtgccaag

SEQ ID NO: 468272 - DNA, 747 bp, Homo sapiens
cttgaagcagcaaatgaggccatgcctctccctgttgacacctccttgtcctctcaacataactgtcttgcaggcacagacatgtttatttgccaactcaacactcaccaaaagctacaaccgaagtggacaggcccctacactgtgatactcagcacaccaactgcaatggttctagagatagtcactagccaaaccgccttggccctggaaatgctcgtgcaacaacaaaaccaaatgggcacagcaatttatcaaaataggttagcactagactacttattagcagaagaaggcccagtcccaaggtgcaaggctatctgcactagcagcatgcaccagcaagatagcagaaacaggaagagagctagccaggacacaggcaagaacaatcaggatgatgcagacctgctggctcatgatggttgggtaacgcaagggcttacagatggccacatagcgatcaacagccatgagaatgaggacaaagatctccatgcagccaaataaatgtagtgcaaagacttgtgtcatgcactcattgttaataaagtaatccttttgataaatgtcttaacaaatagtcttgacaaaggtgtgggaaaccgtcaaccctacaaacttttggtgggaatgtttttacttatttatttacttattttttaactttaagtttaggtgtatacatgtaaatttgttacataagcaaactcgtgttatgaggatttgttgtgtaggttattttat

SEQ ID NO: 468273 - DNA, 740 bp, Homo sapiens
accacaatcctcatggaagacgccaacaagctagccctaggtcagaagttaatagttcgggtgccacaagctgtagtcaccttaatgcagcaaagaggacattctgcacttcttgataaactaacagctgcctggggctctggccgtggagctatgccagacaagttaatagatgcctcctacacctctgtcacaacccccaaaatgatcaccgacctgctctaccagaggagaactatttccttggctggctgcctgactcagctctttgtggagcacttgctgggaggctcagagatcatcctccttattgtcatggcctatgaccgctacgtggccatctgcaagcccctgcactacacaaccattatgcaacaagggatctgccaccttctggtggtgatagcctggattggaggcatcctgcatgccactgtgcagattcttttcatgaccgacttgcccttctgtgatcacacatctgagtttcagcaacaaaatttgaatctaggtcttccaaatctcagtcgtacttcaaataaaacagttgttcatgaaagatgatgccaaatttgttgtagccttttatcacatgtagtatatattactactgaaatatatttcatgagttatgttcctatttatgcatggaaaataccagatcattctttgttactgtaaaacctttcatgaatcaaagtttctctgactgtaacacagttactttgcacaaatgttat

SEQ ID NO: 468274 - DNA, 698 bp, Homo sapiens
tatcatctgaacatttattccagccttcgggcttgtgttctctctctctctctctctctctctctctctctctctctctctctctctctctctctctctccacatactgattattcattcatcaatcaatggacacgaggtgctttcacattttggctattgggaacaatgctgccataaacattggtgtacacatatcttatcaagttcctactttcaattctttgggatatatcttcccagaagtagaattgctggatcacatgtcacgagtgctgagagatggggccatcctagaggactgggaaaggaagcatggggccttatgggtagaggtgagtcagggagcaccattgtgggaacagaagcagaagccagaagtctgtgggacctgcagtcaccatctaacagggttggggctagtccccctccagggttcccagatcaaccctgtgggttcccagatcactaaccagcctgcattgtcactattagctcaattatgtcctccagggggcagtgggttcctccagggcaaggctggtgcctagaatatcacatatccattatgtcatctccatctcaatgtccataatctagtttgggttctcatgaactcttgcttgaatgtgcaaactcttagtttgtctctcagccttcactttctccccttgcacttacctttccagaagctgccc

SEQ ID NO: 468275 - DNA, 547 bp, Homo sapiens
cctgacatctcacagaaaggactttcagtttctcagcatgattctccaagtgacgtccagaacaggaactgatggtccctgtgtgatagcagccttgtttgttctgtctactgctgccgtcctgcacctagatcagtgccaagcagatattaggtcctcttcacagaggacacaagtgaatgaatacacaagggagaggaagaaggaacttgaatcaagagcaatgcccgagggattaacctcagatttaagggaggaggaggaaaaagaggaaagatacacagagatgctgaagtggaaagaaaataatttgaagttatcaaatgtgaaagaatatgtctcattaaaacaggaaataaagtcatctgctttgagtggggagctgaacagaatcagggccttgtgcagaataagagagagatggaaaagtctctgggaagtgaggtgatggattgattaaaggtgaaggaaagcagtgagcatcagtaaacccaacaaagaacagattcagggtggatccagttaaaacagtttcacaattttctcc

SEQ ID NO: 468276 - DNA, 706 bp, Homo sapiens
ctgccctcagcctttagaaaaggtcctatggctctccgtgtatttctacattcttctctgggtgtaattccctacctgatgtggttccagtttagagttgaccaaaagaacaatgtgcatgcgatttgggatgtcagagtgatgcaacagccattcctctcagaagttcatcacagtcagacatgttgtcagacagacaaagagatgagtaccttgtgggtcttaggtggttctggccctcctctgctctgcattcagcttgtcctccagactgtgggccccgatgaccaacagcagctccaggctgtgcacccacagaggcagacccctccagaggtaactgtcttgtatgggagcactggttctcacctcaaccacctgggaggtgaagaagatctagaagatctcgttgcttctagatctctaaatggactcaagttctggaaggccccaggagtcacgtacaagtgtgacccatgaaaagacaacctaagtcccacttttgaaaaaaattaattcctattttccctccactatttagaaaattactctctccattcttatgagtatctttgatactacagtgcacacttaatttaacaatgttgaggttaaccaatatcttacagcttttgtcctgaacagttcatgaatgttaaaacacttaattcagatcaccctatcccaacttacatactacttctat

SEQ ID NO: 468277 - DNA, 581 bp, Homo sapiens
tcactttcctttcacacggggtgagtaaaaaagaatacttgaagtaatgggaaatagtgtataccacagctctgaaatgggaaggagccttggtgtactggagaaactgagaagaggctggtgtggctgcggtctgacagcaatagaggaatttgagttccaaaatgctggtgtctatgcaggcggctttcaaactgggcccaacatcacagtagaaatgactgataacattattgccacagaatggcaactggatgagcagcatcgtctgacaaaagacaatggtgaagcccaccacccaggagctcagggccagctgcaggcagagtttgctggtcatgatggtggggtggtgaaggggattgcagatggtgaggtagcggtcaaaagacatgatagtgaggatcaagaactcggtggtgcccacgaagaagtggaagaaggcctgcagcaggcagcaggacatgcagattactgttcttgccactacaaaggttcctagcagtttggggatgactgtggtggtgtaccagatttctaagaaagacaagttacaaaggaagaagtacattggaatttgt

SEQ ID NO: 468278 - DNA, 561 bp, Homo sapiens
tttcaaccacagtctatgtgtacagtgtttcaaccattacgaaaacagtgtggagttttcaattgagtaatgggaagacactggaagaatttggagatcccagaagaagatggcaagacaagggaaagtttgcaacttcttagagacttgttaagtgattatgaccaaattgctcatagaaatatggacagcgaaggccaagctgataaggtctcagatgaaaatcatgaagttattgagaactggagcaaaggttacccttgttatatcctagcaaggaacttggctgcattgtatttatatcctaggtctctgtgtaaggttgaacttaagagtggcagaagaaacttatacgcagcaaagcattcaagatgtggcctgcctgcttatgacagcctgggatcagatatcaaacaaaataattacttaaaatttggcttgcagagccaccacttgccagaaagattagcatgactaaaagggagccaagtactaatagccaagacaatgggcaaaaggccttaaaggcatttcagaagtctttaggacatcccccttcca

SEQ ID NO: 468279 - DNA, 983 bp, Homo sapiens
agtggatttcagaaaacacttgaagataaggcagcatgtagcatgtggaacatgctagctccacacaaaaaccaaatacttgaatcaggccactcgactatagggctgctgcggtttgctgggggtccactccagaccccactctctttggcctctcctgcatctgcaggaggcagctggggtcccccactggaagatctcacccagtcaggagggacaggatcaagaacccaccccatgaagaagtctggttgcttcttggtagagcaaacatgttgtgctggagctgaggacccacccagtaaggagaagtgggtcggggtcccggttaaagaagtagtctggctaaagaagcagtctgtccaccatctggtaaggcagctatactgtgccccggggtcctttccttttctgtgcccctggcaggctgggatggctgagtctacagaaccacagatatggtggtcatccctcctaccaggaactccctgccagggagagatcggagttctgtctgtggaacaaaggacccacgcagtaaggaggactatgtcagggcccaggttaaagaagcagtctggccccgatctggcaaggccattgtgctgcaccgtgggggcccctattcatctggactgtatgcgttctccacagccagcaagctggaatggctgtttccctctgaaccataaagatggtggccgtccttcccttcaggaacaaggtcttgtctccagccgacttaaccctctgcccttggctggccagattctaacccagtgggtcttaacccatgaggtactatggaagtggggcctacagaacgatgctgcttgactccctgtattcagcctccttcctagggatgtgtatagaaggattttccaccttgtcagtatctctggcccgagcatgcaaaactcctgggtctttgtatgtgtgttgcaaagacctgtgggagaagcatggcttcccaggtgagt

SEQ ID NO: 468280 - DNA, 1327 bp, Homo sapiens
tctaaaataggaagctgcaggatgctggttgacttgctctcaggcaaccctaccatttcctttggtggatgcctgactcaactcttcttcttccacttcattggaggcatcaagatcttcctgctgactgtcatggcgtatgaccgctacattgccatttcccagcccctgcactacacgctcattatgaatcagactgtctgtgcactccttatggcagcctcctgggtggggggcttcatccactccatagtacagattgcattgactatccagctgccattctgtgggcctgacaagctggacaacttttattgtgatgtgcctcagctgatcaaattggcctgcacagatacctttgtcttagagcttttaatggtgtctaacaatggcctggtgaccctgatgtgttttctggtgcttctgggatcgtacacagcactgctagtcatgctccgaagccactcacgggagggccgcagcaaggccctgtctacctgtgcctctcacattgctgtggtgaccttaatctttgtgccttgcatctacgtctatacaaggccttttcggacattccccatggacaaggccgtctctgtgctatacacaattgtcacccccatgctgaatcctgccatctataccctgagaaacaaggaagtgatcatggccatgaagaagctgtggaggaggaaaaaggaccctattggtcccctggagcacagacccttacattagcagaggcagtgacctgagaatctgaaagatgctacagggtattagcctgctggataggaccctcgagaagccattttatgctactcttaggacatcatatgctaaagatattatggcttaaaatagataatggacaatgttacactgatgagaattatctgtgtaaagaaagttttcagtcattctaggatttccaaaccttgtcttcttaaatatgatagaatggaaaaaaaaaaaaaggatattaatctgagaggggtttggtatcattgttattttttaaaaagtggatttttaaaaattttctttaaacattttttacatgcctacttaatatggttaatccatatgaatgggttaggaaaaactgaaatgtctactgattaactgagttacctcaaaaactaaactgcagcattaaattattctaagatgttacccaaatcgagaatatgtgttgaattacataaagtatgtagcattccagatccttttcttgaatctcttctcctaaacaagataacttattggctgtttaaatgctcttgtggaatgtttcttatcttttcctttttgccatcaaaatata

SEQ ID NO: 468281 - DNA, 1406 bp, Homo sapiens
tgcctctgctggcacctggagctgcccatcccaccacagcagcaagtgtgcctggctgtgtgcagtggccagacccctgtgcttgctcactcacacacctctcgcctctcccacccttggcaagcatggaatccaggctggtagcacgagccaagtgcagcctgccaggccaagtgggtgaaaagaacccagcagccatgagcaaactcaagcagaggaaccaccagccacagaggtttctgtctggaaaagaaagggatacagctatttattccattaatgtcagttttgttgcaaaggggatgactagccgctctgtgtgtgagaagatgaccatgacaacggagaaccccaaccagactgtggtgagccacttcttcctggagggtttgaggtacaccgctaaacattctagcctcttcttcctcctcttcctcctcatctacagcatcactgtggctgggaatctcctcatcctcctaactgtgggctctgactctcacctcagcttacccatgtaccacttcctggggcacctctccttcctggatgcctgtttgtctacagtgacagtgcccaaggtcatggcaggcctgctgactctggatgggaaggtgatctcctttgagggctgtgccgtacagctttattgcttccactttctggccagcactgagtgcttcctgtacacagtcatggcctatgaccgctatctggctatctgtcaacccctgcactacccagtggccatgaacagaaggatgtgtgcagaaatggctggaatcacctgggccataggtgccacgcacgctgcaatccacacctccctcaccttccgcctgctctactgtgggccttgccacattgcctacttcttctgcgacataccccctgtcctaaagctcgcctgtacagacaccaccattaatgagctagtcatgcttgccagcattggcatcgtggctgcaggctgcctcatcctcatcgttatttcctacatcttcatcgtggcagctgtgttgcgcatccgcacagcccagggccggcagcgggccttctccccctgcactgcccagctcactggggtgctcctgtactacgtgccacctgtctgtatctacctgcagcctcgctccagtgaggcaggagctggggcccctgctgtcttctacacaatcgtaactccaatgctcaacccattcatttacactttgcggaacaaggaggagaagtggtgtacatactagtacaagtttacttgaaatttaaagggaagagggactagaaaattaactagtattaatgataatggaaaaaaaacttcacaaaaggagaactatataagattatcattttcccagctcccctacaatgaaaataggacacaaactggtattttccttatg

SEQ ID NO: 468282 - DNA, 807 bp, Homo sapiens
gatgatagaggagaaattgaaaatgaagtaaaaatgatttgaggttgaggttatgccagtggggagagagatgaagggtgagaagaaatgtccaactcatgacagcattcatcctcatggaccttccccatgtcccagctctggacgccccactctttggagtcttcctggtggtttatgtgcttactgtgctggggaacctcctcatcctgctggtgatcagggtgtactctcacctccacacccccaagtactacttcctcaccaatctgtccttcattgacttgtggttcttcactgtcatggtgcccaaaatgccgaggaccttgttgtccctgtgtggcaaggctgtgtccttccacagttgtatgacccaactctatttcttctacttcctggggagcaccgagtgtttgctctacacggtcatgtcctatgatcgctatagaggaaatactcagcacttcccaggtagtgaaaacactccccacgaagtgagccaaatgctagtggcccggggggcacacgggctcccactcatcatcctggcagatctgagtgggtaactaagagttgatagttcttagtgggcaattcaaaattagtaatataatttagttatccaagtgaaatttattacatgtataggtctcagcattaaacattattccaaacaacttgcacagttataattctttcacagattatctaagacatttttaaattcacagctagatttttatttatgatgaacatgcttgtagtatctattgatgcatttctcatcaatagatttttttaactttt

SEQ ID NO: 468283 - DNA, 1559 bp, Homo sapiens
ggcactccccagtgagagggagagagaccaagggtgagaagaaatgtccaacgccagcctcgtgacagcattcatcctcacaggccttccccatgccccagggctggacgccctcctctttggaatcttcctggtggtttacgtgctcactgtgctggggaacctcctcatcctgctggtgatcagggtggattctcacctccacacccccatgtactacttcctcaccaacctgtccttcattgacatgtggttctccactgtcacggtgcccaaaatgctgatgaccttggtgtccccaagcggcagggctatctccttccacagctgcgtggctcagctctattttttccacttcctggggagcaccgagtgtttcctctacacagtcatgtcctatgatcgctacttggccatcagttacccgctcaggtacaccagcatgatgagtgggagcaggtgtgccctcctggccaccggcacttggctcagtggctctctgcactctgctgtccagaccatattgactttccatttgccctactgtggacccaaccagatccagcactacttctgtgacgcaccgcccatcctgaaactggcctgtgcagacacctcagccaacgtgatggtcatctttgtggacattgggatagtggcctcaggctgctttgtcctgatagtgctgtcctatgtgtccatcgtctgttccatcctgcggatccgcacctcagatgggaggcgcagagcctttcagacctgtgcctcccactgtattgtggtcctttgcttctttgttccctgtgttgtcatttatctgaggccaggctccatggatgccatggatggagttgtggccattttctacactgtgctgacgccccttctcaaccctgttgtgtacaccctgagaaacaaggaggtgaagaaagctgtgttgaaacttagagacaaagtagcacatcctcagaggaaataaatactaggaagtaaatacactagtttgtttaaaaatagtaatctaatttagttattcatgtgaaattgattatatgtatagttctcagtgttaaacattattccaaaacacctgcacagttataattcttccacagattgtctaagacagttttaacctcacagctagacttatatttatgatgaacatgattatattctgaattattgactcatttctcatcaataggtttatattaagtttaaaacatattttaatcaaatctcagggatagatgattaattcatgtttataaattgataaacggtttttgtgttttgtttgatttcatatacacataaacttaagaatttaccatcatggagacatagttcaaaaccagcaacaaatattattcaaaaccagcaaaaaatatcatttttctaattgtggctgttcaaatttgtttttggttttaacgtatctatatatttgtatgtgtatatactattccaaacatgtatacaaaagaaagtacatgacatttagcatatttaacatataggttttcatatatttatgtatgtgtatgtatttgcct

SEQ ID NO: 468284 - DNA, 1695 bp, Homo sapiens
ctccttatatccccagagggagagagaccaagggtgagaagaaatgtccaagaccagcctcgtgacagcgttcatcctcacgggccttccccatgccccagggctggacgccccactctttggaatcttcctggtggtttacgtgctcactgtgctggggaacctcctcatcctgctggtgatcagggtggattctcacctccacacccccatgtactacttcctcaccaacctgtccttcattgacatgtggttctccactgtcacggtgcccaaaatgctgatgaccttggtgtccccaagcggcagggctatctccttccacagctgcgtggctcagctctattttttccacttcctggggagcaccgagtgtttcctctacacagtcatgtcctatgatcgctacttggccatcagttacccgctcaggtacaccagcatgatgagtgggagcagatgtgccctcctggccaccagcacttggctcagtggctctctgcactctgctgtccagaccatattgactttccatttgccctactgtggacccaaccagatccagcactatttgtgtgatgcaccgcccatcctgaaactggcctgtgcagacacctcagccaacgagatggtcatctttgtggacattgggctagtggcctcgggctgctttctcctgatagtgctgtcttatgtgtccatcgtctgttccatcctgcggatccacacctcagaggggaggcacagagcctttcagacctgtgcctcccactgcatcgtggtcctttgcttttttgttccctgtgttttcatttacctgagaccaggctccagggacgtcgtggatggagttgtggccattttctacactgtgctgacaccccttctcaaccctgttgtgtacaccctgagaaacaaggaggtgaagaaagctgtgttgaaactgagagacaaagtagcacattctcagggagaataaatactaggaagtagatacactagtttgtttaaaaatagtaatataatttagttattcatgtgaaattgattatatgtatagttctcagtgttaaacattattccaaaacacctgcacagttataattcttccacagattgtctaagacagttttaacctcacagctagacttatgtgtatgaggaacatgcttatattctgatttattgattcatttctcatcaataggttcatattaatttaaaaaaatattttcatcgaatctccgggatagatggttgagtccttcatgtttacaacttgataaaaagttttgtgttttgtttgattttttttgcacacaaacttaacaatttaccattatggagacatcgttcaaaaatagcaacaaatatttgaggtcatttttctaattgtggctgtagctgttcaaatttctttttggttttaatgtatctgtatatttgtatgtgtctatacaaatccaaacgtgtatacaaaagaaagtctgtagcatttagcatatttaacatataggttttcatcatgtatgtatatgtatctgtctatttacatacatgtattggaaaacatttctagaaacactatttttaatgggcaaaaatagcaagctattaatatttaaatattatcaatgaatcaaatagaaattgtgtattcacagaatagattactatccagcaatgataatgtac

SEQ ID NO: 468285 - DNA, 1085 bp, Homo sapiens
tgaggtacctagggtagtcacattcatggaaaaagaaattagaatgctggttcccaggagccacagatgttggaaggaaatggagaagttgtttaatgctatcatctcctccactcgacttcacactcctatgtattttttcttgggaaacctctccatctttgacctgggtttctcttcaacgactgttcccaagatgttgttctacctttcggggaacagccatgctatctcgtatgcaggctgcgtgtcccagcttttcttctaccatttcctaggctgtactgagtgtttcctctacacagtgatggcctgtgaccgctttgttgccatatgttttcctttgagatacacggtcatcatgaaccacagggtgtgctttatgttggccacggggacctggatgattggctgtgtccatgccatgatcctaactcccctcaccttccagttaccttactgtggccctaacaaggtgggctattacttctgtgatattcctgcagtgttacctctagcctgtaaggacacatccttagcccagaggagacgaggaagtgggcagaaaggtgactgattaggctccctcagcgtacgttatcacatcattctattcccaggttgctatggtgcttcctataatccaagttgcttatagacagtgtgcatggagctttctcaacctgccttgctcacctctttgctttctcaacctgcattgctcaacctgcagtctgcaactctttgtggccatggacagaagctcagaccgagagctctctgcgattctgtgattcagagaccgaacttgtgtgtgaccatctccttgaactccttgatttctagcctgagaaatgaaagtgtgaaacaagcttcacataaaatatttaaagaacaaactttattcatgaaaataaatgagaagatgatgaacttctaaaggaattttgaatattcttttcttagcagctttcaaaaaaacttcgcattaaatagtactgtgtctttaacttcattcctaaaccctgtatcttagtatgaaaatttgctagtacccatgcttttaaagtaaatatagcttatgc

SEQ ID NO: 468286 - DNA, 564 bp, Homo sapiens
gtgtgcgcctctcgacgtccagccgcctgtgtgtctgcctgagggaaggggagctggaagggggatggagtgggaagataatcttcccctggagtcccgcctggggacagtcaatctcttctctgaagtcccaccatcaagccttccctccaaagtcaagctgcttttctccaaagtccagctgcttcttctcttctctccttctctgccactatgctgtgcttctctgctagaggagcttgggatttttatgggtacagggtgtggggcagagcaggacagggtggttttggaaaaagcaacattccggcgggaaaattgggatgtgaagttctcatttagggccatgagtccaggcttaagggtggaaccctcgccagagactccaccctttcaacccagtattccctgcctcctgtctgtatctgttttaggagaattttgacagattttgaaaacaatgaattgcatcccagagagtggaaacagcctatccaaatataccaaagtttgatatagttagttttggaaaaatgacaaataatttggtgagtttagagtgta

SEQ ID NO: 468287 - DNA, 543 bp, Homo sapiens
gcataactgggagatgctacactcttagtttgtgtgagtgcaatgagcccccagcagttctaccctttggcagtgactatccctggagtgggtgtcataattgtagaagcacaggttactgctcgagcagagcacaccactcgggctctgaattacacccaagtggcccttctcttgttaacagatgaggctgatcagatcagaaaggaatttcttttctccaattcaacaggaccaatagcactggtatgcctatatcagttgttaaatgatctgaatatcatgtttggcatgtggaaaaacactagtggggacattatctattcatttataatgtgtcatgcaaataatgccccataccaaccacaccgagaggttgtgacttttatactcccttttaaagaggaaggtatgcaatgattctcatttttgttatattatgtgtctttaaaatgtatataagaagtgactttttgaaagtcaaagaactaactttatgtgtcactgtgtgcagacacgtgtgtatggggaggtattcccatg

SEQ ID NO: 468288 - DNA, 1090 bp, Homo sapiens
ctgatttttttttttttttttttgagaaagggtcctgtcaatccacaacccccgtggaaaagactaagggataaaaggtcatgaaccttaagagaggcacaatccaacaggttctctctcccacttcctactcaccggctgagcttcctgctgcctacagccttcctgtcagccgcccatttgcacgacacccctaccttctttgggatttggctgaggaggcagtgacccacagggctctcagtgaaagccacgaaggaccatatcttaggaaagttacaaatgagagaggacagatcagcaaatttcaagctaaaagcaaatttcaacctggctatggtgattttcaaatttctaactttttgtttacacagacaagtaaaggtagtgatgtgatggtagagacaacattctgcagccttaaaacaaaaactgcaggactgtgtatggtgactttggctgctctctttgaaaaggtacagtttgtcacggcttgccttggctacttggctaggaaagggaaatcccccgaccccttgtgcttcccagttcctcaacttcactgccagtggcctggagaaaaagggtgagatagtagtttacaaaataattaaaccgcctaaattagtaggtaataaagtcagattctaggacggttataggatttttccagagtgtttagatgccaaactccatgaaggttagaacctggaataagacatctacttattgatgtctttcataggttctgccttgaattcagatgtttctataggagacaattttaatcacagagaagatcagaggttttgaagaatgcgttatttctgaaatgaatgaagaagggaagctggaaagttaaggtttgactggaaagctaaggtttgcattccacttctgccattatctaccttggtgaccatgaaaagaacaattgaaagagcaacaacaaacttccagtaacaataattgaattcacattattaataataattttaacagatggaatggaatgtgtaccacatgcctcaaactgtgtcaagcacctaaagttaatcagttataaaatgttgaaattatatttattaaa

SEQ ID NO: 468289 - DNA, 621 bp, Homo sapiens
agcacgactgtccagcaaccaggcatggctatgctgggactccaggagaagccagcagagcgaagcgttcgcagggcaaaagtctcctacgggagcaagtcaagcatagggcgatggccagttctggctgagcttgactgtagacattcctgtaccaaatgctctggactttacatcagctggcttgctgcccctaccacttctctaagcatctgtccctgccaacttgagtgtctgtgggtgatcaaggggcctctttctgtgaaggttccagaggcctgcagtgagagtcagctgctccttcacagttcaactcactcgttctcctggagccaggaacaagtcctcatgtgtgatagccccatgcagggttcccagctttctccacattcagcccagcttctgtgtcttccttctgtctactctctgcctagcagtcatgtttgttagagatatgcctgttgtctcagtccctgtgtgggagctgttccacttggttgcgtctaatttgtgtattagtagaaatagaatattttgatatgtattagtaaagtttgataactagtatacacattaggttcatatagtacgtctatattttgttaagcattaatgtataaa

SEQ ID NO: 468290 - DNA, 540 bp, Homo sapiens
agtggctgctcacttcctgctgtatgacctggttcctaacaggacatagactgataccggtccatggccaggggaatgatgaaagcaattctctgctggcaacaggaatgcacaagtcaacagtcaaggatgggaggaaaaatgtttgcaattgtgttattgggcagtaatagactatttgacgtgcagcaacaagagaagagaggatatgcacaaagactgctttatacaccagtgcgggggcagtgtacaggtgatccaggcaatagtcccctggccacccctggttccagaccagcccagagcaaggtcagtccacagagccccaggcttcaaacctgccccagtacaagatcagaaacccttgcctcagacaccaggttggcatctgcagacacaggttccaggcctacccaatgccacaccagcccctgtggcctcaagctgcggcagacccatggtccagatccatgccagtggaccccagtggtgggggagcccccaagacctagaccccagaaccacccatgaatacctagg

SEQ ID NO: 468291 - DNA, 491 bp, Homo sapiens
aaaccccaaaatggtagatccattgacagcttgcaccatgcacctggaaaagccacagacactcaatgccagcccactaaagtacccatggtgggggtctgtaccctgcaaagccacagggctggagtggcccaaggccataggagcccacctcttgcatcagtgtaacctggatggctcaattcaacaagacctatcaagcctgaatatgtgtgtacccaatgcgggagcaccaagattcataaaacaggttattagagacctacaaagtgacttaaataaccacacaataacagtggaagacatcaacaccccactgaaagtattaggcagaccatcaaggcagaaaattaacaaagatattttggaactgaattccacagttaactaaatggacctagtaggtatctacagcaagctctaccccagaataacagaatatacatttctgttatctgcatatggcatatgctctaaaatgaccatgaaat

SEQ ID NO: 468292 - DNA, 2420 bp, Homo sapiens
ttttgtttatctggagccagcagtttatctagagggaaaagttcttcaagtccccacccgtcccagaagcccagccagcttcacctctcactggcactcgccacaggcagtcaggcagcccagcgggagctcatcccctgatcaagcccagcaggctccggcaggccacgcccagtgcggggccgcggagctcgcacccacccggaacccgcgctgggctccggccgcgcgcaggccccgcttctgcaggagcctctccctccgcacctccccgcgaggagagggagcgggctccgcctcggccagccccagagagggcgcccacagcgcagcggcgggctgaagggctgctcaagcgagaccagagcggacgccgaggctgaggaggccctgagagcgaggagagcgagcgagggttgctagcacgttgtcacctctcacaatgactgtcttcctcaagacaccaatcatcttggattggggcctcatctttttgacctcacttaatcttaattactttcctagaggccccgtctggaaatacagccacattgaggacaaccagaccttatgggcctcatttaggaaggacacaataccagtactattgctggcgggatcaaacctgaatctgctcaagcctcaagttcacctaccaatttgtagaaaatacagagcccagaggaacatatttaaatgtaccatgagtacgcaatctgcaaaatccagagactgtgagaaactacagattaaacattgtgtagataaagaacaggatgtatatttaaaggatacattaaatcaaaattttaaagtggcacggataaaggatggtattttgaaagacaagtctgggctaaagcacacacacagaggaaagtgattactataaaagtgagggtactaattgcatataggaagggagagggttgaaactggaggggaccacgggaaaggggcctctgtaatggttgacaaggctgtatttcttgacctcttggcttcaccatacatctgatttgtgtgattcattttgcgttttattttgtgatttattttgtgattattgtgtgttttattttgaaatggattatttttaaaaggagctaatttctcaaaatacatgaggaatctcccaaaatatctggataagacgatgaagaaatgtgattatcaaactagaaactaatactcgttgtaatttcatactttaaatataatatgcaataactaagttatttaaataaatataagatgccaaaacaattaactaaagtattaaaactttcaccaaagaatgttttttgcagggcttcagatcttgccaagcagtaatctaagtgaatttcatcaatgaatttttttgttgagttggctgaattaactattgtctgtcatatttgagacaaagacttgaaacatctgagacaaaggacttgactaaatcgccttgataacagtatctacactgtggttttttgaagtgaataccatacagaaatggcaagaattaatgtgataacatataaaaattggtattttttgtttacctagtaccctctggtttagatttctacttcctgcaaaattttcgttatttaatttacaacatgctagtgtaggtttttgatgatctggtgtcaccatttttgtgctacagcttttctcattactctgagcatatgctgagcaaaattcacaggaggttttacttgagtttaaaatagggtaacatcatagatccatagagtatatgaattaaaatggaatattagatacaactaggtaaggacagtggactgagcatttgcatttatctcttttaaaaccatactaaataagagtagtaggatttttttgaaacaatgtaaactcacaagaaaaaaatgaggaataatagccatattttaaaataaactttatttattagaagagttttagacttataaataaattataaaaatagtacagagattctcatagggcccatacccaagttcttctattatttatatggtatattaataaatgatacattattacaattaattgaccatattaatttattgtcattagagttcatacttcattcagatttctttagtttttacctatttgttcctttccaggattgcatccaggatatcactgtatttaataatgtatttaatagtcatgcccccttaggctccttaggctccttagattcctcttaactgtgatagtttctttttgtctttggtaactttgatagttttgagaagtactggtcaggtatttggtaaaagcacgtttgtcaatcagtatattttcctgatgccttttgattttgtaaatagatgttgaagaggtaaagggtcattttctccatattatatccagtgtatatattatcaacatgacttgagactgttaaagtc

SEQ ID NO: 468293 - DNA, 969 bp, Homo sapiens
gccaggtgcttttttaggtgtgaggacacaaaggttaagtacataacaatcaatgtgggtgaaaagagtggaagagaaaagaggcaccgaatctgagtataaatgactgaatacattgttacatatgccaagattgataccgaccatttatctacctcctggtatattccagagattataagcatgattaacagcaaatctttgttaaacacctactatatgccaaacactggaaaatcaatggtgaacaaaggaaaagttgtccttgtcctgcagaagcttctggatgcaaagacccatccctccagcccagcaggccttccaggaggccagtgggagagtaaagagtcaagacaaaaagcagagaaggtgtctgtagctgctgccgagcctaaggctttacagaagtggagtgggggatatgccagccatggcctgaaaccagtgtccaagaggcagtggaggatgctggatagagcatgagcacgatgaactttgctctgtttcaagtccatgccccaggctttcccacgtttctgcttttgctcaaattctttgctccattgctccatctggaatgcccttctgtctccttctttgccaaatttctaaatattacttatccttatggtcttctgtaaggtcctttttcttcatgaagcctttcctaatctgtttagctggaaatggttataggacattctttatttccttttagtggaacattccttatttctccttgtaaacgtatgctttctgaaggttaagttcatgtccagttcatatttgaacttccagtctgtaatacatgtctttatatgtaatagccatgtgttcatttactcaacgaataaatcagtcagtaaatgagtgtataaatcttgagggagttctgaattgtgtgtggtgttaaagatgtgccaggagaattgtacttgtttatttattaagcacatactgggtttaaga

SEQ ID NO: 468294 - DNA, 3861 bp, Homo sapiens
actttctgattaataagtctgccaattttattaatagaaactcatcaaagaatggcagcagaaaaccattcttttgtgactaagtttattctggttgggctaacagagaagtcagagctacagctgcccctcttcctcgtcttcctgggaatctatgtagtcacagtgctggggaacctgggcatgatcacactgattgggctcagttctcacctgcacacacctatgtactgtttcctcagcagtctgtccttcattgacttctgccattccactgtcattacccctaagatgctggtgaactttgtgacagagaagaacatcatctcctaccctgaatgcatgactcagctctacttcttcctcgtttttgctattgcagagtgtcacatgttggctgcaatggcatatgacggctacgtggccatctgtagccccttgctgtacagcatcatcatatccaataaggcttgcttttctctgattttagtggtgtatgtaataggcctgatttgtgcgtcagctcatataggctgtatgtttagggttcaattctgcaaatttgatgtgatcaaccattatttctgtgatcttatttctatcttgaagctctcctgttctagtacttacattaatgagttactgattttaatctttagtggaattaacatccttgtccccagcctgaccatcctcagctcttacatcttcatcattgccagcatcctccgcattcgctacactgagggcaggtccaaagccttcagcacttgcagctcccacatctcggctgtttctgttttctttgggtctgcagcattcatgtacctgcagccatcatctgtcagctccatggaccaggggaaagtgtcctctgtgttttatactattgttgtgcccatgctgaaccccctgatctacagcctgaggaataaagatgtccacgttgccctgaagaaaacgctagggaaaagaacattcttatgaacagaagtacaatgaaaaagattgcattagatctaagtttttggctatgatattgtatgaaatgatgtctttcactttagtgcatctgtcaacattctttctaatttggggggattttactgacctcatgtaggctgctttatgcataaaattatttatagccctctgcttatacagtttgtaattcatctaagcctttagctggagggaaggtaggagagtaagctacagctgtaaagggctgtttcctggaaaatctaaaaacacattacactaatcatatcaaatagagctggtcagggtctccgtcagtcatggactctattgttttgagccaacacaaatgctagcgtgaatgtatttcttccacttatggctgatttctctaagctaaaccaaactattggcttatttggtattgcctgtgtacctcagggtaatcaacacaacataaacgtatgccagaatcagacctacaaaaatatacttgtaaaggctagaaatgtcatttcttcagagaactcatctttgaaactgcagctaaattatacaccatccctctcttcttgctctcagatactggctacttttcttctcagtacgtatggcttatgataataatatgatacttaaatgcttattcttttaatctttctctgttgagttgacttaagctctaataagacatagagtagacactcaaataacattgattgaaaatagtaccagacacctcagacatcccatgtcagatcctctgcctacctctcatttccatctcgtacacatctgttagttctgtgcaagctcaaactcaacttgcattaacagaattccactttaaatatccacgatgaaacttttttcatattttaaaattaatgttatttttaggacagttttaaatttatcaaaaactttttatgataatacagagttcccttgccctgtataatttttcctattactaacatcatatattaatatgctacattagttacaatgaatgagtcattgaaacattattaaatagcatctatattcttttgtttacttgtttaattggaacaaatatattatttgtggtgtacaacactgatgctttgatatatgcatacatcgtggaatgacttaagctaattaacatatccattgcctcacaaatttattatttttttgtggtgagaacatttaaaatctactctcttagcaattttcaagtatacgatatactgttattagatatacttgccttgttgtacaataagtctactgaacttattcctcctaactgaaattttgtatcttttgaccaacatctccccagttgccatcccctcccgcaaaccctggtaaccaccattttactgctgctttgatctactttttagattccacacataagtgagatcatgcagtgtttgtttttctgtgcttggcttatttcatttaacaaaatatcctccagattcatccatgttttagcagatgacaagatttttttttaagtctgagtagtattccattatgaatatacacctcattttctttatccattaatgtgttgatggacacatattgattacataacttggctactgtgagtaatgctacataaacatgggagtgcagatatctcatcaacatactgatttcatttccttgggatatataaccaatagtgggattgttggatcacatggaagttctattttttaatttttgaggaaaccatactgttttaaataatagctgtgtgaatttgtattcccgccaccagtgtgcaagggctttctgttcacatcctagccaacccatgttatatcttgtcttcttgataatacctatcctaatagctatgaggtgatacctcattgtggttttaatttgtgtttctctgatgaatagtgatgtcaactatcttcatttacctgttggccatttgtaggtcttctttggaaaaatgtctatttgggcctatttttaggttggtttatttttttcttgctattgagttgactttttaatatactttggatatcaatcccttatcagatgtatggctgcaaatattttcttttatgccataggttatctcttcacactgttaattatttccttttctgcacataagcttcttagtttgatgtaccctcatctatctatttttgcttttctttcctgtgcttttggagttcaatctaaaaggtctttgctcaaaccaatatcaagaagatttccctaaagtttttctctagtagttttatattttcaaatcttatactttatgtttttaatccattttgagttctttacttttgtacatagtgtgaaatgaggccaatttttattcttttgcttgtggatatccagtttttccaacagatttttgaagtttctgtccttccaatattgtgtgttcttgacacctttgtcaaaaatcatttaaccacaaatgagtggatttatgaagtttcattttcaccatattatatcaaaggtacatactatcaactttaaacacacttattactgttgatgccaaccttgattttgtggttgaggtagtgttggtctggtttcttcactaaaaagttacactttttttcatattttctgtactctctggaagaaagtcagtatgcatggcttacacttaaagagtggatggttatgtttcactttatttagggtgaagtatcttcataaattattcagaattcttctttgtgagatttttctcttttctcatttatttatttgtccaatcatgtatttatgttaccagtgtggactcatggacattactatatatattgggttataattcaataatactttatttgctgctcaaattgttctaacattgtcatc

SEQ ID NO: 468295 - DNA, 781 bp, Homo sapiens
cagcaccaaggccatgcggaaggataatgatctgaagtacattgagaaggccatcaagaaactaagcaagtggcaacagtaccacatccacgcccatgatcccaagggaggcctggacaatgcccgacgcctaactggattccatgaaacctccaacatccatgacttttctgctggtatagccaatcgtagtgccagcataaacattccccagactctcggccaggagaagaaaggctactttgaagaccattgcccctctgccaactgcaacccctttttggtgacagaagctctcatccgcacgtgtcttctcaatgaaacctgcgatgagcccttccagctttcatcagttgagaggattgatctggaggacaacactccagatgaggttgaccagtatgcatctaaccggcttgttgcctctcataagaagaacaaagatatagaagatgaagacactaaaagtctagaggagaagatggacagatattgtaatgttggcacaagtcaacgctgtggaagatcagaagagggagagattggctctggtgaggagttcagagaagacatctcagaagggatatttgagcctggcctccaaggatcagcacaatatttataagaataggtaggaaaatgaagggagcagtggaaggcagtaatttgcatcctgaatgcatatcaatatcacttggtgcttagataacagccaggggtgctagttctgggtaagatggggtaaacattttttacccttcctcccatactgaacatgtct

SEQ ID NO: 468296 - DNA, 748 bp, Homo sapiens
aattccacagggagagggcgcaaaagctctgcattctggacccttccaggtcttactctacggtctttgcatttctggcaattggatgggccaacctggatctgccaaccagtcctgtggccctcacccaggaacctactcaacaaaagaagacagcttcaattgctgtgtgggtctgagtggattaggtgggggaagatctgccatcagtgctggcgggaaccatccaattggctgtgggcccagaaggaacaaatacagaaggcgaatttgtctctctctgagagctgggacagactttactggtgctgtcttggacatcagaagtccaagttcactggcctttggactcaaggacttactccaggggacccctgggaccattaccgtgctgtgtccatcctacctgcagaacctaggaagattttccacaactttagacttcactgcctggggtccagcctctgttggtttaccacaatgggaacacactaagagaggcatccagcacaaagctagagaatcagagaagctgtagtttgatatataatactttattgttgaccatactgttaccctactgtgcaacagaacaccaaaatatgtgatattattaccctgctgtgcaatagaacaccaaaacttattctaattgtaactttacagaacaccaaaatatgtgatattattaccctgctgtgcaatagaacaccaaaacttattctaattgcaactttgtacccattga

SEQ ID NO: 468297 - DNA, 617 bp, Homo sapiens
agacttaaacacaaaatcttatactataaaactagtagaagatggccgggtacagtggctcatgcatgtaataccagcactttgggaagctgaggagcccttcaacccgccgctgcgctgtgggggcccctctctggggctggctgaggccgaagccggctccctctgctggcggggaggtgtggagtgggaggcgcgagcgggagccggagctgcgtgccgcactcgccagctggctcggtttctgggtgggcgcgggctcagcgggccgcacttcgcgcggcggccggcgcctgatgggcttgatcagggggacgagctccctttgggctgctggagagccggggccaggtgccgcaaagtcccactgcaagtgccattgagaggtgaagccggctgggcttctgggtctgcagcttcactgctgaagccagcgagaccaggaacccaccagaaagaagaaactccggacacatctgaacatctgaaggaacaaactccggacacaccatctttaagaactgtaacactcactgcgaggcttgggtaacagagcgagactccatctccaaaaaaaaaaaaaaaaaaaaaaaaaaaaaaaaaaaaaaaaaaaaaaa

SEQ ID NO: 468298 - DNA, 1468 bp, Homo sapiens
cagccaccatcactcctggaaaataactcaaccttttattgaaggttccccagtgatgacagcaggcaccagccatggtgagagggagcaggggaatattcaggcccaggcagagttcctgtgtgaagtgtggtagcagttgtgctgaggccctgcagctggagagatcagccactcttcaaaagaaatcagagagcgaatctgctggaaataaaatcaacccttcctcattatgtttcctctttgtgtacttttcctgggttgatgcccaggtctgggaagaggagaatggatacagctcggagtgggttagctgtgagttcttagcatctgtgttcttggatcccacagcctttggatcaggaggaggtcagaagtccagattcaaagtgccagcaaatgtggttctttctggaggctctgagggaagcgtgtcccatgcctctctcctagcctctggtggttgtcagcaatccctgacggtcctgtcttaaacagcagtccccgaattaaagactcaccttggtctagtaagtcttcatcttaactcattacatctgcaaagaccctgttttcaaataaggtcacattcacaggtactggaggtgaggacttgaacatatattttagggagacacaattcaacccacaataccttgtgtcctgcagccttgctaaattcacttactagttctcgtatattttcctgcagattatttgggattttctatatagatgatcagtcagtttacttttgacaaaacaccagagccacatatgagcaaaggtttctctatattaaccacttctcttgtgttattgccatagagtttgaggtttttttaaaaaagtgtttctgttgattccaatcttgactaatcatgttgagcctctttttcagcacttacttgacttgtatattttctttggtgagatgtatattcaaatattttgcactttttactaatggattgtcttattgaattttgagagttcttcatatattctaaatatgttctttatcagatataagtttggcaatattttctccaagtatgtagcttgtctactaattttcttacagtgtcttctgaaaagcagaagttttaaattttgataaatttcaaggtatcaggtttttcttttatagttcataatttttttgtcctatataaaaaatctttgcttaactcaagatcacaaagattttgtcttatgctttactttaggcattttattgttttagctctataaatctttgtttaaaattttatttattgttttattttctttattgtggaaaatcaggttttcatttttccaaaaattgcaccaaagtaaagcaaagctctaattgatgtgggtgtcttgtgtaggcgttagcagtagtgccctcactgtgcactcattggacagtagtaaaccttaagttgacttttcaaaattctttcaagcttctctttatact

SEQ ID NO: 468299 - DNA, 825 bp, Homo sapiens
agacatccaggtttggtctctgatgcccactgctctctcctatgaacaggaacagccacatatgctaatgaagctcatccaactttactcactttacattcctcacagtcttcagacaacatctggacaaattctacatattttggacaggatttctcagtcgtccctcccctcccctgcccctccaagcatgcctcctttatatgcaggggtattcactctaaggcatcttcttgaggatagacattatttctcttcattgaaacccccagttcccagaagcgactcagaagcaccaggtaagcagctgcaggatgctgactggatttgtggggctatgttgatcacaagccacatccctctctttctgtctgcccccctctctctctctgactggctgtgtagcagaacctttcagcagaaaggtttagaggccatgcagattacatgcgttccattgattaataattgtatgctctatcatggattctatatcataattgtatagaagcatacattactggtctagttcccatagtacacttcaagcatcagcatactgttactgaatcagcatactcatcaacatacaagaatcagcatactcatcaatcacagggtacaggtattaaataaatattttgcaagtttactcttgaatgtcttcaaaagtctttagaatacacttacaatgattttaagctgagaataagaagaaccaatacatatttaatgaagttcagtaacactaaatatattagtactatattgatctttgaggaaaacatcgattgacacagatttccgttcccttgaacagtattg

SEQ ID NO: 468300 - DNA, 699 bp, Homo sapiens
agacttaggtcacctagcctgaggggcagttttggagaaagagatggccagaattataaagcccagcagctctcggtgccagaggctgcggagagtttctgtgtttttcgactattcattagtgattacatacccccctgaacacctgcaagaccaattcataaagcaagcattcatggactttggcaacagcttcatgggaactgcagggtacggggaccctttcgggaatgagaagaggggagtggtgggcactgcattgattgtgacggggccagcccggccgtgggtacgtgtggcatgctctccagcgagtgacactgatttacagcaggataacaggaagtgtggagcttgggtggcctgctgtgtaattctggaatggcaggggctggaagagtatggctcggaaagacaatgccggaacatcgtggcagctaagtctgagctgaatgcgcagaatgagaggtttactcagaatgtagactctacgtagcagtaatggagaaggttgttagttacctaataatgatgaaacgctggataatttacccagaataaaaagcttgctcttttctggatgatctggttaattatttggttaaattaggttaaaaccttttctgtcggggtctctaattatctggaaaaccaggtaactgtgtccttttaagagcttttagacttgaattattcatc

SEQ ID NO: 468301 - DNA, 695 bp, Homo sapiens
aaataactctcacagtggagcctgcatctcattgccgcccttctccccatcccaaagcctcctttgcgtcttcctctcgtatccccccaccttaatccacaagtatgggacatctctactccttccctggcaaccgatcacatgcccattaccatcccattaaaacctaatcacccttaccccgctcaacgccaatatcccatcccacagcacgctttaaaaggattaaagcctgttatcactcgcctgctacagcatgggcttctaaaagctataaactccccttacaatttccccatttcacctgtcctaaaaccagacaaagcttacaggttagttcaagatctgtgccttatcaaccaaactgttttgcctatccaccccgtggtgccaaatccatatactctcctatcctcaatacctccctccacaacccattattctgttctggatctcaaacatgctttctttactattcctttgcacccttcatcccagcctctcttcgctttcacttggactgaccctgacacccatcaggctcagcaaattacctgggctgtactgccacaaagcatcacagacagcccccattacttcaatcaagcccaaatttcttcctcatctgttacctatctcggcataattctcataaaaacacatgtgctctccctgctgaccgtgtccggctaatc

SEQ ID NO: 468302 - DNA, 2636 bp, Homo sapiens
cgccccggcggctcgccgcgcccacccgctccgcgccgagggctggaggatgcgttccctggggtccggacttatgaaaatatgcatcagtttaatactgtcttggaattcacgagatggaagcatagatcaaagctgtttggagaaaatcggaagtacattggagaatcactaaaagaccttattgaccagtcacaaagttctggtagtgggtctggactacctttattggttcagcgaactattgccaaacagattcagatggtccggcaagttggtaaaggccgatatggagaagtatggatgggcaaatggcgtggcgaaaaagtggcggtgaaagtattctttaccactgaagaagccagctggtttcgagaaacagaaatctaccaaactgtgctaatgcgccatgaaaacatacttggtttcatagcagcagacattaaaggtacaggttcctggactcagctctatttgattactgattaccatgaaaatggatctctctatgacttcctgaaatgtgctacactggacaccagagccctgcttaaatcggcttattcagctgcctgtggtctgtgccacctgcacacagaaatttatggcacccaaggaaagcccgcaattgctcatcgagacctaaagagcaaaaacatcctcatcaagaaaaatgggagttgctgcattgctgacctgggccttgctgttaaattcaacagtgacacaaatgaagttgatgtgcccttgaataccagggtgggcaccaaacgctatatggctccagaagtgctggacgaaagcctgaacaaaaaccacttccagccctacatcatggctgacatctacagcttcggcctaatcatttgggagatggctcgtcgttgtatcacaggagggattgtggaagagtaccaattgccatattacaacatggtaccgagtgatccgtcatacgaagatatgcgtgaggttgtgtgtgtcaaacgtttgcggccaattgtgtctaatcggtggaacagtgatgaatgtctacgagcagttttgaagctaatgtcagaatgctgggcccacaatccagcctccagactcacagcgttgagaattaagaagatgcttgccaagatggttgaatcccaagatgtaaaaatctgatggttaaaccatcggaggagaaactctagactgcaagaactgtttttacccatggcatgggtggaattagagtggaataaggatgttaacttggttctcagactctctcttcactacgtgttcacaggctgctaatattaaacctttcagtactcttattaggatacaagctgggaacttctaaacacttcattctttatatatggacagctttattttaaatgtggtttttgatgcctttttttaaatgggtttttatgaactgcatcaagacttcaatcctgattagtgtctccagtcaagctctgggtactgaattgcctgttcataaaacggtgctttctgtgaaagccttaagaagataaatgagtgcagcagagatggagaaatagactttgccttttacctgagacattcagttcctttgtattctacctttgtaaaacagcctatagatgatgatgtgtttgggatactgcctagtttatgatagtttgtcctgtctccttagtgatgtgtgtgtgtctccatgcacatgcacgccaggattcctctgctgccatttgaattagaagaaaataatttatatgcatgcacaggaagatattggtggctggtggttttgtgctttaaaaatgcaatatctgaccaagattcgccaatctcatacaagccatttactttgcaagtgagatagcttccccaccagctttattttttaacatgaaagctgatgccaaggccaaaagaagtttaaagcatctgtaaatttggactgttttccttcaaccaccatttttttttgtggttattatttttgtcacggaaaacatcctctccaaagttggagcttctattgccatgaaccatgcttacaaagaaagcacttcttattgaaatgaattcctgcatttgatagcaatgtaagtgcctataaccatgttctgtattctttattctcagtaacttttaaaagggaagttatttatattttgtgtataatgtgctttatttgcaaatcacccactcctttacaaccatactttatatatgtacatacattcatactgtagaaaccagctcatgtgtacctcatatcccatccttaagggaagaaatgttataaagtagaactaaatataaattttcagaattaatgcattcaaagtaatatatcaaatccaggactttgttaacttcaggcaaaaacttcattagggtaatatcatctcaattttttcaaatgaaaggattctctaattagaaatttatatgtcagagctgttctaaatttatcaactgtcaaatatgttttggacagctaaatcatttgagatttttggttttttgatttctattccctaacttgtgaagacaatgaaaaatcaggcagaaatatttagtatctagtcagtatctgtagctacactgtataactgttcttcaataaaatggttcatatttaaaaaaaaaaaaaaaaa

SEQ ID NO: 468303 - DNA, 2048 bp, Homo sapiens
gccgccgcccaccgcccgccgtcatggggctgaaggccgcccagaagacgctgttcccgctgcgctccatcgacgacgtggtgcgcctgtttgctgccgagctgggccgagaggagccggacctggtgctcctttccttggtgctgggcttcgtggagcattttctggctgtcaaccgcgtcatccctaccaacgttcccgagctcaccttccagcccagccccgcccccgacccgcctggcggcctcacctactttcccgtggccgacctgtctatcatcgccgccctctatgcccgcttcaccgcccagatccgaggcgccgtcgacctgtccctctatcctcgagaagggggtgtctccagccgtgagctggtgaagaaggtctccgatgtcatatggaacagcctcagccgctcctacttcaaggatcgggcccacatccagtccctcttcagcttcatcacaggttggagcccagtaggcaccaaattggacagctccggtgtggcctttgctgtggttggggcctgccaggccctgggtctccaggatgtccacctcgccctgtctgaggatcatgcctgggtagtgtttgggcccaatggggagcagacagctgaggtcacctggcacggcaagggcaacgaggaccgcaggggccagacagtcaatgccggtgtggctgagcggagctggctgtacctgaaaggatcatacatgcgctgtgaccgcaagatggaggtggcgttcatggtgtgtgccatcaacccttccattgacctgcacaccgactcgctggagcttctgcagctgcagcagaagctgctctggctgctctatgacctgggacatctggaaaggtaccccatggccttagggaacctggcagatctagaggagctggagcccacccctggccggccagacccactcaccctctaccacaagggcattgcctcagccaagacctactatcgggatgaacacatctacccctacatgtacctggctggctaccactgtcgcaaccgcaatgtgcgggaagccctgcaggcctgggcggacacggccactgtcatccaggagtccctggggctacccccgatggtgagaccccttcagaccctacagagaccccactgctctcacagctacaactactgccgggaagacgaggagatctacaaggagttctttgaagtagccaatgatgtcatccccaacctgctgaaggaggcagccagcttgctggaggcgggcgaggagcggccgggggagcaaagccagggcacccagagccaaggttccgccctccaggaccctgagtgcttcgcccacctgctgcgattctacgacggcatctgcaaatgggaggagggcagtcccacgcctgtgctgcacgtgggctgggccacctttcttgtgcagtccctaggccgttttgagggacaggtgcggcagaaggtgcgcatagtgagccgagaggccgaggcggccgaggccgaggagccgtggggcgaggaagcccgggaaggccggcggcggggcccacggcgggagtccaagccagaggagcccccgccgcccaagaagccagcactggacaagggcctgggcaccggccagggtgcagtgtcaggacccccccggaagcctcctgggactgtcgctggcacagcccgaggccctgaaggtggcagcacggctcaggtgccagcacccgcagcatcaccaccgccggagggtccagtgctcactttccagagtgagaagatgaagggcatgaaggagctgctggtggccaccaagatcaactcgagcgccatcaagctgcaactcacggcacagtcgcaagtgcagatgaagaagcagaaagtgtccacccctagtgactacactctgtctttcctcaagcggcagcgcaaaggcctctgaactactggggacttcggaccgcttgtggggacccaggctccgcccttagtcccccaactctgagcccatgttctgcccccagcccaaaggggacaggcctcacctctaccc

SEQ ID NO: 468304 - DNA, 1437 bp, Homo sapiens
gacgtttgtgatggagcctttggtctctgatgttgagaggcccatccctgtctcctcgtttcccaatccctgaagccctccagaacggtgcccaccacctggaggtgctttgcgtgaggtgatgggctgcaggttttctaagggccaggtccgagtcatcgtgcctctaaccgtgcccagcacaggactggcacacaggaacaactgggaaatgccccagtgcttatgactgtgatgatgatggtgatgataggaatgacaatgatggtggcgctgctgctgatggtggtggtggtgactgagatggtgctggtggtgactgagatggtggtgatggtggtgactgagatggtggtgctggtggtgactgagatggtggtgatggtggtgactgagatggtgatggtggtgattgagatgatggtggtggtggtggtgattgagatggtggtgattgagatgatggtggtgatggtggtgattgagatggtggtgattgagatgatggtggtgatggtggtgattgagatggtggtgatgattgagatggtggtgatgattgagatggtggtgatggtggtggtggtgattgggatgatggtactggtggtgattgagatggtggtgattgagatgatggtggtggtggtggtgattgagatgctggtggtggtgattgagatgatggtggtgatggtggtgattgagatggtgatggtggtgattgagatgatggtggtggtggtggtgattgagatggtggtgatgattgagatggtggtgatggtggtgattgagatggtggtgatgattgagatggtggtgatggtggtggtggtgattgggatgatggtactggtggtgattgagatggtgatggtgatgactgaggtgatgataattgagatggtgatgatgatgattaagaaggtgctgattgaaatggtggtggtggtgactgagatggtggtggtggtggtggtggtgatgattgagatgatgatggtggtgattgagatggtgatgctgctggtgacggagcggagcctcacagagtgagctcagagcagccagtgctggccagggcttcaacagaccccgcagaccccctaaacgagaggcagtgtggtccaatggttacatgcacagactctgggctcaggctgcgtggatttgaatctctgctctacccaagctgtgtggccttgggaaagttcttaacccctttgtgcctccgtttcctcctctgtaaaatggtggtgctgatagttctgatttcatcaggctcttgagaagactaaacgagtttctacaaatcacctagaatagtccccggagtgcagtgaatgttttattcgtattgctgttgttattatgaatgatttttgacaaagaggactgtgggaaacacgtggaagctgccagagactgaacttc

SEQ ID NO: 468305 - DNA, 536 bp, Homo sapiens
cctagcacctccctggaggccatgcaccttcctggctgcatcaggtggccatggaacagaagctcagggacagaggttttgcaacaacaattggatgtgctttttgggaaaaaacaattcaaatcacaggacagtggcagaggaggggtcagatataaactcacccccggttctgaagatctgaggacccctaaagaacatttcaccccactccctcccatcactgaccccatcctcctgggcatggccagcctgggggattttctccttctgcctggaactgacactacccaggactcagaggacggctaccgtgaaatgggaacgagtagagccgtccgaggtacactgttgtgggaagtcagcgcaaaggggaagagtacctttgtgtaaaaggagtaaaatcagaatgtgcgtctcccctcgcttatattttcagaaagaaaatctggaaggatgcgcaagaaactaaaaatggttccccgagggtgggtggaggtgggatgggagagagcctcttcattctacacatgttc

SEQ ID NO: 468306 - DNA, 2125 bp, Homo sapiens
gtgactcaggagtcttcatcatgacaagggcagcttgagctgtgcctaatgctttactaggctgccatcttgagatttagcaacaatggcctgcatgaaggaagccccggcggcgttgccaaatccggttgtggtcatcatctgcagtacaggattgatgacgggaggctgctatagaactggcctccctagtgtccacggagaagagaggatcccaaaacggcagagaccatgtagcactcttaaccctcagaggcaagatgatgccattaccaaaatgtgcaatgagggtggaaaggcttgccaagccggagtgtttggccgtaatgaaaacaatccactgaatgatgaaaatggaacagtcaggaacatgcctgagcaggtcctaatgagacttggaaggaacgagattggaagatcagaaaaaaatggcctgggaaagagtgatgggaatgagcaaatgggagtgagcacattgtcttacgtcaacaccaccgctggccccctgaaattatcaactgcagatgaagcactgaagaaccagatagaaaaggaagccaatcactaaatccagcccacactcaaggggaggggaattaaacttcaccatctacggggtggatatctacatatatttttgggattcttctataaggaagatttgtcccttctccccccatttatttatttattcaatcatttatttatatgtggactgacgtatatgtatttatatgtggacttatgtatatttatttatatgtgagctgatggatatttatttatatgtggactgatgtatatttatttatatgtggactgatgtatatttatttatatgtggactgatgtatatttatttatatgcggactgatgtatatttatttatatgtggactgatgtatattatatgtggactgacgtatatttatttatgtgtgaactgatgtatatttatttatatgcaggctgatgtatattcatttatatgtggactgatgtatatttatttatacgtggactgatgtatatttatttaatacgttgggctatggtccagcactacattatttattttgctgctcaagtggttcttaggctgctgggagcctttgcagttggttcccatgagcctttgacataaccccgtcactgtgggttgttctggttttgttgtgttttgagtgcttccttgcttccaacactgaaagatgctccaggctgatcttgtatattccctgccccagacctagaatcagccatttctccaaggatccccagttcctttcactggagaatggcatttcaaaaccaagatctgtataaattaatttaaaacatgaaaatatgctcaacctcacttacaataacagaaatatcaataaagctagaatgatactgttattcactaatagatcaacaaagaaccaagatttgataggacgttctgttggaaaagccaggaggtaaataggacctctcactctacgctgctctaggtagatacggcacagcctcaatggaaagcatttggcaacagctgtcaaaattgatatgcacatatgctttgatttagcaactccacttctaccgacctgcttgctgcctatgaaataatgggtaaaagaaagggtttttattgcaatgttgtttataaatttcaaagaactataaacaacataaatatatatcaatagagaacctgacatttagattatggttcatcaaattcaatggaatacaatgcatttgtaaaaacaaatgaggaagctcttcacatactgatgccaaatgatctctaagacatttttctaaggacaagctaaaacacacttcagagctgaaggagtaaggtttgtctaggaaaagcaatatatgcatatttacacacatacataatatatatttctatattcatatatacacattttactttgtgtgcataaactttacctggatggactctcagctaatgaataatagtaattgcctatgggtggctggctgggggacaggagtagaaaaaatagttttccttgtagactttttatgcgttttgaatattgaaacttttgaatgtattacctaccctttcatcaaaaaacaaattaacactatgcctct

SEQ ID NO: 468307 - DNA, 956 bp, Homo sapiens
tgttttccctcggcaacacaggatgttggagctggtggcccagaagcagcgggagcgtgaagaaagagaggaacgggaggcattggaacgggaacggcagcgcaggagacaagggcaagagttgtcagcagcacgacagcggctacaggaagatgagatgcgccgggctgctgaggagaggcggagggaaaaggccgaggagttagcagccagccaggagcctcccaccaagcgggagtatgaccagtgtcgcatacaggtcaggctgccagatgggacctcactgacccagacgttccgggcccgggaacagctggcagctgtgaggctctatgtggagctccaccgtggggaggaactaggtgggggccaggaccctgtgcaattgctcagtggcttccccagacgggccttctcagaagctgacatggagcggcctctgcaggagctgggactcgtgccttctgctgttctcattgtggccaagaaatgtcccagctgagggcctttgtcccattgtccctctgtgaccccttcatctttgataaagcactgacatctccttcctaataaatagaccctgagttctgtacatgcctgactccttcctgaatggctgggagggacaaaactaaggcagaggaagaggctaaaacggaacagtagaccctcttcctcatctttagtttccaacaaagacacttgtttgtaatctctgggtctgattaactgctggggaagttgcggaggagaggtgctaaaaggggtggagagtacattggatggcaccttttactcctatggatagacaaaagaggagcaacttggttgactaggctgtggggctttgaccccacttatttaatcccctcagtggcagctccaataaatcctgaccagatccagagattggggaccactttacatttctaaattaatgttttacaataatcctc

SEQ ID NO: 468308 - DNA, 529 bp, Homo sapiens
atgctcagaacgaggcctggaagaaccctctggctgcaggatggagacagtgctggagggggcagggcaaggccggatatggacttgggctactggaggagaaaagccattttggagcaaacaaactggtacaatgcccaggagtactacgatcgcattcctgagcttcggcaggtcattgagcagctgagcagtggcttcttctcccccaaacagcccgacctgttcaaggacattgtcaatatgctcatgcaccatgaccggtttaaagtcttcgcagattatgaagactacattaaatgccaggagaaagtcagcgccttgtacaagaacccaagagagtggacgcggatggtgatccggaacatagccacctctggcaagttctccagtgaccgcaccattgcccagtatgcccgggagatctggggtgtggagccttcccgccagcgcctgccagccccggatgaggccatctgagcctccagaccagaccccaaaccagccttgagtctgtcacactctcggg

SEQ ID NO: 468309 - DNA, 613 bp, Homo sapiens
agtggttgctgcccaggctggtgcagcagctccaaggggtcggtgagatgaagcagccaccctccaaggcggcctcagccatcctgacacctccaatgcggaggtgtggggtgcagatacagcgctctggccccaaggaggcgatgtttccccagggatcggctggcggaggctttgcaatgatgaagttggcctgtggtgggagcctcctccgtctgtggccacccttctttgatacaaataggcaggagaagaagggtgtcccagctccagcagagagacagcaagagcaaattcaccctttgtctgcctttctgttctacgtgggccctcagctgattgggcccacactgggagaggctccacttgatcttgaccggaggagttccagccacggcagggatgccgagcagtctcctgaccagcaggtggtgctgtggcgcagcggcagagagcaccgcgggccggtcctgttgaatgtctctggggctgcctcatgacaacttctgctctgctggcagccctcacccacccggcccaggcagcgcatctggatgggaaatgtgccccttgctctccctctctttctccttgtcccttcccagaacatgga

SEQ ID NO: 468310 - DNA, 681 bp, Homo sapiens
tgagtttctttattcttttctttcctatgatattgtggcaggaaccactgtggtaaaaagaaatggggtcagatgatgcccccaaagccctgatttccacacgctataatgacaagactaaattatgtatcaaggccatcagaagcagcacagtgaaaagaacaggaggctttggtaataataatccagcaggaaaggctgtgtattgggttaatcaagtgtctgacaaaagacctatttgcacagtaactgttcagggaaaagattttgaaggactagtagatactggagctgatgtctctattattgctataaatcaatggccccagcactggcctaagcaaaaggcatccactggtattgttggagtaggagctgcctcagaagtttttcagagttccttgattttaccatgtcaaaggacgaatggtcaggaagggacaatccaacctatcattacacctattcctatcaatttatggggtagagacttattgcaacaatgggatgctgaaatacctattcctatggatcagtatagtaatcatagcagacaaatgatgaaaaacatgggatatcacctgggaaaaggactaggacaatataaaaatggccaatcagaacctttagaattaaaagggcaaacagatcagaccgaattggggtgtcatttttaggagc

SEQ ID NO: 468311 - DNA, 1628 bp, Homo sapiens
aacaaagaaacattgaagatttaagagcccaactgggtggattcttggttttcattgtggctgagattttcacgctggctgcaatggcctatgaccgctatgtggctatttggagccctctgctctacgccgtagtggtgtctccaaaggtgtgtcgtctgctggtgtccctcacataccttcagagtcttatcacagcactgactgtctcttcctgtgtgttctctgtgtcatactgttcttccaacattatcaaccatttttactgtgatgatgtccctttgctagcattgtcctgttctgatacctacattccagaaacagcagtctttatcttttcagggaccaacttgcttttctccatgatcgttgttctgatatcctacttcaacattgttattaccattttgaggatacgttcctcagaaggacgacaaaaagccttttccacctgtgcttctcacatgatagctgtggttgtgttctatgggactctccttttcatgtatttgcaaccaaggagtaatcattcattagatactgacaaaatggcttcggtcttctacaccctggtgataccagtgctgaaccctctaatctacagcctcaggaacaagaacgtgaaggatgcactaaagaggttcctagataacccatgccgatcactcaaactaatgtaaatgtaaagctaaaactatcttcctttagtgcttttcgttttttcctgaaaactgctgtgttttaaaaaaaagtgtcaagaaatttttagaaattccattcatttcagtgggaaatgtttaattgttcttatgtcaacctcacatacgcaaacaagaaaacaatatctataattaataaaaataatttgaaaataatcacagtttatagataacttatagataaaatgtaagccactaaagggtttttaaaataatttccaaacaaggaaaagaatgcctgatagtgcgtgtggagacaatgtgaacttttatcttatttaacaaagacatcttatattatttccctgatcttaacagtttgacctgtttgatctgttagccaaacttttataaacttttatttagttttttcttttacactattaatcctttaactaactattctactaccctaattgttagtcaaacacagttacatttatatttccaagttaccatgaagctgttgtagcttctaacaagtgttctgatctatctttgggtaatggatagctatgactgctgcacaagttagaggttgcagaatactaagaatggaaagttgaaagtcctgtggagggttaattatgatacactcagaagtgaacagaggcattgactggggtggaagattcaggggatatgaagtgttcagaactttgaattaaaaaaaaaaatctttgtatcaatctagaggtaagagacttaaagatgaagattaatgataaagaaaaagaatgaaaaaatatttacagagctcacctaaatatatcctgaatattctcttctgctaccaaataatatggagtaattgagatgagattttaacttcccatttaaacaagaaaaagaaaatgaaagacaaaatatatgaaacagtagctttcatgacacagatgtcagacaact

SEQ ID NO: 468312 - DNA, 1359 bp, Homo sapiens
aatctctacagtcctgcagcagccaacgcctggctccacatgcccatgtactttttcctgagccacttatccttcgtggatctgtgcttctcttccaatgtgactccaaagatgctggagattttcctttcagagaagaaaagcatttcctatcctgcctgtcttgtgcagtgttacctttttatcgccttggtccatgttgagatctacatcctggctgtgatggcctttgaccggtacatggccatctgcaaccctctgctttatggcagcagaatgtccaagagtgtgtgctccttcctcatcacggtgccttatgtgtatggagcgctcactggcctgatggagaccatgtggacctacaacctagccttctgtggccccaatgaaattaatcacttctactgtgcggacccaccactgattaagctggcttgttctgacacctacaacaaggagtttttgtccattctagatctgtgtttctccacaaatttcactcccaaaatgctagaaaatttcttatcagagaagaagaccatttcctatgcaggttgtttgatgcagtgctatgttgtcattgctgtggtccttgcagagcactgcatgttggcagtcatggcatatgaccgctatatggccatctgtaatccattgctctacagtagcaaaatgtcccaaggtgtttgtgtccacctggtcattgtcccttatgtctatggctttcttctcagtgtgatggaaaccttaaggacctacaacctctccttctgtggaacaaatgaaatcaaccatttctactgtgctgatcctcctcttatcaaactggcatgctctgacacgtacagcaaggagctgtccatgtacatagtagccggctacagcaacgtccagtctcttctaatcattctcacatcctacatgttcatccttgtcgctatcctcagaagccattctgcagagggaaggaaaaaagctttttccacatgtggttcccacctgacagttgtcacaatcttctatggaaccctcttctgcatgcatttgagacgtcccacagacgagtccgtggagcaggggaaaatggtggctgtgttttacaccacagtgatactcatgctgaactccatgatctatggcctcaggaacaaggatgtgaaagaggcgttgaaaaaagcaataggaaaacaaacattgggaaaataaaaatgctaagctatcattaaaaatttgtgaagtaatgagatataatatcattgggttagatgtcacattttaggctacatttgcacaattcatttctaattttctgttaggtagctgactgagttaagcttcctgaaactagcgggttgaaac

SEQ ID NO: 468313 - DNA, 1390 bp, Homo sapiens
ttgccctggaccctgagacaagatgctgcatcttggaaaaatgctcaatttcaccgatgtgacagagttcattcttttggggctaacgagccgtcgagaatggcaagttctcttcttcatcatctttcttgtggtctacatcatcaccatggtgggcaatatcggcatgatggtgttaatcaaggtcagtcctcagcttaacaaccccatgtactttttcctcagtcacttgtcatttgttgatgtgtggttttcttccaatgtcacccctaaaatgttggaaaacctgttttcagataaaaaaacaattacttatgctggttgtttagtacagtgtttcttcttcattgctcttgtccatgtggaaatttttattcttgctgcgatggcctttgatagatacatggcaattgggaatcctctgctttatggcagtaaaatgtcaagggttgtctgtattcgactgattactttcccttacatttatggttttctgacgagtctggcagcaacattatggacttacggcttgtacttctgtggaaaaattgagatcaaccatttctactgtgcagatccacctctcatcaaaatggcctgtgccgggacctttgtaaaagaatatacaatgatcatacttgccggcattaacttcacatattccctgactgtaattatcatctcttacttattcatcctcattgccattctgcgaatgcgctcagcagaaggaaggcagaaggccttttccacatgtgggtcccatctgacagctgtcattatattctatggtactctgatcttcatgtatctcagacgtcccacagaggagtctgtggagcaggggaagatggtggctgtgttctataccacagtgatccccatgttgaatcccatgatctacagtctgaggaacaaggatgtgaaaaaggccatgatgaaagtgatcagcagatcatgttaaacaaaataaaatcaaatttgatttaattttatcttctattatttgtttggaaaaagtttattacccagtacctaggaacattaagataaagatattctgtgggttgaaaagaaaaataaaagtggtacaaattgagaaaatataaggaggaatgattcatttctgttgatggtctgttcagagactgctactttgaaaatagcaatactattgtatttcatgatttttaaatttttggtgtttcttaagaaacacaacatgacaaaaactattaactttcataatattgtttaaatatatgtatgaatggagttggggatatagggtcagttggcatgattggtccagtaatttatgccttcactggttttcttcatgaaaaattcctgaagtgttaatagaaatgaattttgggttttatttgtc

SEQ ID NO: 468314 - DNA, 1254 bp, Homo sapiens
ttctcttttttgtggtgttcctagcggtttacatgatcactctgttgggaaatattggtatgatcattttgattagcatcagtcctcagcttcagagtcccatgtactttttcctgagtcatctgtcttttgcggacgtgtgcttctcctccaacgttacccccaaaatgctggaaaacttattatcagagacaaaaaccatttcctatgtgggatgcttggtgcagtgctactttttcattgccgttgtccacgtggaggtctatatcctggctgtgatggcctttgacaggtacatggccggctgcaaccctctgctttatggcagtaaaatgtctaggactgtgtgtgttcggctcatctctgtgccttatgtctatggattctctgtcagcctaatatgcacactatggacttatggcttatacttctgtggaaactttgaaatcaatcacttctattgtgcagatccccctctcatccagattgcctgtgggagagtgcacatcaaagaaatcacaatgattgttattgctggaattaacttcacatattccctctcggtggtcctcatctcctacactctcattgtagtagctgtgctacgcatgcgctctgccgatggcaggaggaaggcgttctccacctgtgggtcccacttgacggctgtttctatgttttatgggacccccatcttcatgtatctcaggagacccactgaggaatccgtagagcagggcaaaatggtggctgtgttttacaccacagtaattcctatgttgaatcccatgatctacagtctgagaaataaggatgtaaaagaagcagtcaacaaagcaatcaccaagacatatgtgaggcagtaaaactgtagtggatattgttgtccctattataaatagggtcctgttataaatggtcacatgtaaaagtcctagctcagaaaacagtatcaaaagaaatataaaacttgctatccaactgtatgtcagagttctaatctctccttattatcctgatatacatttgtgggggtttgggcttttttgttttaacaacttaaacagcataaatttattatttcagaattgccatgggttatgagtgcaggagattattcttaactttacatataactttcttctgatctattgtcaaaacttagtaacaaatgtatacttctgttcataacagtctctgaggatcttttgcatttctgtgggattggttatatgcacacaacctagaaaattt

SEQ ID NO: 468315 - DNA, 1112 bp, Homo sapiens
cagcgtccaggaaatatgaggtcacacaagtgaattgaaggatggtaaatgccgatgattttattgccagtggaggtgtctctcagtgggaaggggagctgagaagaggatggggaggaattgagaaaatgctcaatttcaccgatgtgacagagttcattcttttggggctaacgagccgtcgggaatggcaagttctcttcttcatcgtttttcttgtggtctacattatcaccgtggtgggcaatatcggcatgatgttgttaatcaagataaaaaaaaaaacaatttcttatgctggctgtttagcacagtgtttcttcttcattgctcttgtccatgtggaaatttttattcttgctgcgattgcctttgatagatacacagtgattggaaatcctttgctttatggcagcaaaatgtcaagggatgtctgtattcgactgattactttcccttacatttatggttttctgacgagtctgacagcaacattatggacttatggcttgtacttctgtggaaaaattgagatcaaccatttctactgtgcagatccacctctcatcaaaatggcctgtgccgggacctttgtaaaagaatatacaatgctcatacttgccggcatcaacttcacatattccctgactgtaattatcatctcttacttattcatcctcattgccattctgcgaatgcgctcagcagaaggaaggcagaaggccttttccacatgtgggtcccatctgacagctgtcatcatattctatggtactctgatcttcatgtatctcagacgtcccacagaggagtctgtggagcaggggaagatggtggctgtgttctataccacagtgatccccatgttgaatcccatgatctacagtctgaggaacaaggatgtgaaaaaggccatgatgaaagtgatcagcagatcatgttaaacaaaataaaatcaagtttgaattaattttgtcttctattatttgattggagaaaggttattgcccagtacttaggaacattaagataaagatattctgtgggttgaagaaaaataaaagtgatgcaaatggagaaaatataaggtagaatgtttcacttctgttcat

SEQ ID NO: 468316 - DNA, 948 bp, Homo sapiens
agcctttgtggatttgtgctatacatcaaatgcaaccccgcagatgtcgactaatatcgtatctgagaagaccatttcctttgctggttgctttacacagtgctacattttcattgcccttctactcactgagttttacatgctggcagcaatggcctatgaccgctatgtggccatatatgaccctctgcgctacagtgtgaaaacgtccaggagagtttgcatctgcttggccacatttccctatgtctatggcttctcagatggactcttccaggccatcctgaccttccgcctgaccttctgtagatccaatgtcatcaaccacttctactgtgctgacccgccgctcattaagctttcttgttctgatacttatgtcaaagagcatgccatgttcatatctgctggcttcaacctctccagctccctcaccatcgtcttggtgtcctatgccttcattcttgctgccatcctccggatcaaatcagcagagggaaggcacaaggcattctccacctgtggttcccatatgatggctgtcaccctgttttatgggactctcttttgcatgtatataagaccaccaacagataagactgttgaggaatctaaaataatagctgtcttttacacctttgtgagtccggtacttaatccattgatctacagtctgaggaataaagatgtgaagcaggccttgaagaatgtcctgagatgaaatattgtcatgaccatggtgatgcctttgtttcctaataaacattaaatcgaaatctttggctcacatgtcctagcgttctgatggcaccatggctccaacatcctcatctatgggatatcttgctgacttttgtaggtagaagtaagcattttctgcattgtgtccataatctactttttaattagaaattttacttaatttcacactatattcatttctgtggt

SEQ ID NO: 468317 - DNA, 999 bp, Homo sapiens
ttgcattgggagatatacctaatgctagatgacgagttagtgggactgacagacgacccagtgctagagaagatcctgtttggggtgttcctggcgatctacctaatcacactggcaggcaacctgtgcatgatcctgctgatcaggaccaattcccaactgcaaacacccatgtatttcttccttggtcacctctcctttgtagacatttgctattcttccaatgttactccaaatatgctgcacaatttcctctcagaacagaagaccatctcctacgctggatgcttcacacagtgtcttctcttcatcgccctagtgatcactgagttttacttccttgcttcaatggcattggatcgctatgtagccatttgcagccctttacattacagttccaggatgtccaagaacatttgcatctctctggtcactgtgccttacatgtatggcttccttaatgggctctctcagacactgctgacctttcacttatccttctgtggctcccttgaaatcaatcatttctactgcgctgatcctcctcttatcatgctggcctgctctgacacccgtgtcaaaaagatggcaatgtttgtagttgcaggctttactctctcaagctctctcttcatcattcttctgtcctatcttttcatttttgcagcgatcttcaggatccgttctgctgaaggcaggcacaaagccttttctacgtgtgcttcccacctgacaatagtcactttgttttatggaaccctcttctgcatgtacgtaaggcctccatcagagaagtctgtagaggagtccaaaataattgcagtcttttatacttttttgagcccaatgctgaacccattgatctatagcctacggaacagagataaagcaagtggaggaatgcaccctctttaagtttttttaatggtcttttatctacgtacagactaaaagaaaaatgcccatgtgaaaattccgtaacccatgggtgaggtgggg

SEQ ID NO: 468318 - DNA, 862 bp, Homo sapiens
ggtctaagcacagaccaccctgatgcttcgtctgtccttctgtggacccaatgacatcaaccacttttactgtgcggacccacccctcttagtcctcgcctgctcagatacttatgtcaaagagaccgccatgttggtggtggctggttccaacctcatttgctctctcaccgtcatcctcatttcctacactttcatcttcactgccattctgcgtatccacactgctgaggggaggcgcaaggccttctccacctgcgggtctcatgtgaccgctgtcactgtcttctatgggacactgttctgcatgtacctgaggcccccttctgagacatctatacaacaggggaaaattgtagctgttttttatatctttgtgagtccgatgttaaacccattgatctacagcctgaggaataaagacgttaaaagaagtataaggaaagttattcaaaagaaactgtttgctaagtaaggtagatattttggtcataggtgttggaatctgttcttattatctgaccaattaatgaacatttaaaattaacaaatcaatctgtcattgagtgttttttgtcctttgtaatttgcatatgggacttaaaagtgtgttgtcagactttaaatgttttctaatctgatgggtaaacaatgaattctcatttggtgtttaaggttgaattgttattacaagtgaaactaagtatttttaagtatattgatgctaatctcatatttctctttcacttatatgtccatatactttgttaacttttcaggtagggtgatttgtctttatttcatacatttataatagttccttatgtaccaaatgctacatacaaatcttttggtgttatat

SEQ ID NO: 468319 - DNA, 1422 bp, Homo sapiens
aggaaaaaagttgatagccagaagcagctggcattgtcttgtcccaccatttgaatattttcagtgacagggaatttactacatccatcaaaaaactaaatccaggcacacatacacttgaagcaatggataaagaaaacagctcaatggtgactgagtttatcttcatgggcatcacccaggaccctcagatggagatcatcttcttcgtggtcttcctcatagtttacctggttaatgtagtggggaatattggtatgattatcctgattacaacagacactcagcttcacacacccatgtattttttcctctgcaacctctcctttgttgacctgggctactcctcagccattgcccccaggatgctggctgacttcctaacaaatcacaaagttatctccttctccagctgtgccacccagtttgctttttttgtaggttttgtggatgctgagtgctatgtcctggcagccatggcctatggtcgttttgtggccatttgtcgacccctccactatagcaccttcatgtccaagcaggtctgcttggctctcatgctgggctcttacctggctggtctagtgagtttagtagcccacactaccctcaccttcagcctgagttactgtggttccaatatcatcaatcatttcttctgcgaaatcccaccactcttggccctctcttgctcagacacctacatcagtgagatcttgctcttcagtctgtgtggcttcattgaattcagcaccatcctcatcatcttcatctcctatacctttatccttgttgcaatcatcagaatgcgttcagctgaaggccgccttaaggctttctccacctgcgggtctcaccttactggcatcaccctcttctatggcacagtcatgtttatgtacctgaggccaacatccagctactccctggaccaagacaagtgggcctctgtgttctacacggttatcatccccatgttaaatcccttgatctacagtttgcggaacaaggatgtgaaagctgctttcaaaaagctaattggaaaaaaatctcaataataacacaaaatgaaaatctgtttctgtcataggtaaatgacagtagtagaagggcatagaaaatgcaaataacttttcgataaacactacccaagttaccatctccttgctaagtgaatattaaattctgaagggtgggctctaatccttaactctgcaatctgaaagaaatataaactaaattagtatatttgaaagacatactgggcaaaatacattcatttcttatttaaagttggttcacatattaattagaaactgggacaggactcagtaagagaaagaaatagtcaataactctgaacaattttttttcccctggggtcatgaggaatgccaggtccaaatgttgaaatttttttta

SEQ ID NO: 468320 - DNA, 1152 bp, Homo sapiens
aaccgtgggcgagctctgggtgtgcgggcggcctggcgcggcgctccgctgtgtcagcgtgttatgatgccgtcccataccaacctggctactggaatccccagtagctacatcagcaaaggcggggcagaccgggccgttccagtcctgatcattggcattctggtattcctacccgtattttaccacctgcgcatcccttactatgcatccaaaggctaccccatgcagaggagcaatcatacagtgactgagtttatactgctgggcttcaccacagacccaggaatgcagctgggcctcttcgtggtgttcctgggcgtgtactctctcactgtggtaggaaatagcaccctcatcgtgttgatctgtaatgactcctgcctccacacacccatgtattttttcactggaaatctgtcgtttctggatctctggtattcttctgtctacaccccaaagatcctagtgacctgcatctctgaagacaaaagcatctcctttgctggctgcctgtgtcagttcttcttctctgcagggctggcctatagtgagtgctacctgctggctgccgtggcttatgaccgctacgtggccatctccaagcccctgctttatgcccaggccatgtccataaagctgtgtgcattgctggtagcagtctcatattgtggtggctttattaactcttcaatcatcaccaagaaaacgttttcctttaacttctgccgtgaaaacatcattgatgactttttctgtgatttgcttcccttggtggagctggcctgtggcgagaagggcggctataaaattatgatgtacttcctgctggcctccaatgtcatctgccccgcagtgctcatcctggcctcctacctctttatcatcaccagtgtcttgaggatctcctcctccaagggctacctcaaagccttctccacatgctcctcccacctgacctctgtcactttatactatggctccattctctacatctacgctctccccagatctagctattcttttgatatggacaaaatagtttctacattttacactgtggtattccccatgttgaatctcatgatctacagcctaaggaataaggatgtgaaagaggctctgaaaaaacttctcccataaatcaagatt

SEQ ID NO: 468321 - DNA, 715 bp, Homo sapiens
tgcaggtccttggtattctgagcgtggtatccataagccatgcagaggagcaatcacacagtgactgagttcatcctgctgggcttcaccacagatccagggatgcaactgggcctctttgtggtgttcctgggtgtgtactgtctgactgtggtaggaagtagcaccctcatcgtgttgatctgtaatgactcccacctacacacacccatgtattttgtcattggaaatctgtcatttctggatctctggtattcttctgtctacaccccaaagatcctagtgacctgcatctctgaagacaaaagcatctcctttgctggctgcctgtgtcagttcttctctgccaggctggcctatagtgagtgctacctactggctgccatggcttatgaccactacgtggccatctccaagcccctgctttatgctcagaccatgccaaggagattgtgcatctgtttggttttatattcctatactgggggttttgtcaatgcaataatattaaccagcaacacattcacattggatttttgtggtgacaatgtcattgatgactttttctgtgatgtcccacccctcgtgaagctggcatgcagtgtgagagctaccaggctgtgctgcacttccttctggcctccaatgtcatctcccctactgtgctcatccttgcctcttacctctccatcatcaccaccatcctgaggatcca

SEQ ID NO: 468322 - DNA, 1464 bp, Homo sapiens
agtgttaggagataaggttctttaggctttcacctccgtggacatggaagtgggaaattgcaccatcctgactgaattcatcttgttgggtttctcagcagattcccagtggcagccgattctatttggagtgtttctgatgctctatttgataaccttgtcaggaaacatgaccttggttatcttaatccgaactgattcccacttgcatacacctatgtactttttcattggcaatctgtcttttttggatttctggtatacctctgtgtatacccccaaaatcctggccagttgtgtctcagaagataagcgcatttccttggctggatgtggggctcagctgtttttttcctgtgttgtagcctacactgaatgctatctcctggcagccatggcatatgaccgccatgcagcaatttgtaacccattgctttattcaggtaccatgtccaccgccctctgtactgggcttgttgctggctcctacataggaggatttttgaatgccatagcccatactgccaatacattccgcctgcatttttgtggtaaaaatatcattgaccactttttctgtgatgcaccaccattggtaaaaatgtcctgtacaaacaccagggtctacgaaaaagtcctgcttggtgtggtgggcttcacagtactctccagcattcttgctatcctgatttcctatgtcaacatcctcctggctatcctgagaatccactcagcttcaggaagacacaaggcattctccacctgtgcttcccacctcatctcagtcatgctcttctatggatcattgttgtttatgtattcaaggcctagttccacctactccctagagagggacaaagtagctgctctgttctacaccgtgatcaacccactgctcaaccctctcatctatagcctgagaaacaaagatatcaaagaggccttcaggaaagcaacacagactatacaaccacaaacatgaaggttattctctttgcaaatgctgttattgaattttccagattattggcttataaatgtgttcatttgcatttctgtagttcaattaagttcaataagtcatatttaaaacattaaaatattgaccacatgactccttgttattcgtttgttatgatgtaaacaaaacaaagtaatatttaaaacttataatattgggttgtttggcattctgcaatatggtattttgccttggcagcattaaatctttcatagatttcattgtgtttgctccctttgggagatcttggggaacaaaataaattacgtgggttaatgaatatagtttgactttgaagtttggtaagcaatctttactaggtgacaagaatatctgaaagggtgaggcttctggaaatatgctcaagattttacaaatatttattttaagaaaatcatttcctcaaaatttcttcagaaagctctaattgagcatatagggag

SEQ ID NO: 468323 - DNA, 1081 bp, Homo sapiens
cctggatatttcagttgagggtgctgaattcatttgccgctttccttccgctctacttttggtagtcatgggtcgaggaaacagcactgaagtgactgaattccatcttctgggatttggtgtccaacacgaatttcagcatgtccttttcattgtacttcttcttatctatgtgacctccctgataggaaatattggaatgatcttactcatcaagaccgattccagacttcaaacacccatgtacttttttccacaacatttggcttttgttgatatctgttatacttctgctatcactcccaagatgctccaaagcttcacagaagaaaataatttgataacatttcggggctgtgtgatacaattcttagtttatgcaacatttgcaaccagtgactgttacctcctagctattatggcaatggattgttatgttgccatctgtaagccccttcgctatcccatgatcatgtcccaaacagtctacatccaactcgtagctggctcatatattataggctcaataaatgcctctgtacatacaggttttacattttcactgtccttctgcaagtctaataaaatcaatcactttttctgtgatggtctcccaattcttgccctttcatgctccaacattgacatcaacatcattctagatgttgtctttgtgggatttgacttgatgttcactgagttggtcatcatcttttcctacatctacattatggtcaccatcctgaagatgtcttctactgctgggaggaaaaaatccttctccacatgtgcctcccacctgacagcagtaaccattttctatgggacactctcttacatgtacttacagcctcagtctaataattctcaggagaatatgaaagtagcctctatattttatggcactgttattcccatgttgaatcctttaatctatagcttgagaaataaggaaggaaaataagctttaaaagtgataggaaaaaagttttgttaagttagacacagttgttaaaattcaacacaacaaagcatccagcacagctaatctgccaaaatttaaagtttctaaaatagggag

SEQ ID NO: 468324 - DNA, 655 bp, Homo sapiens
atccttagtttaaagttttacaatatgtcaatggccttcttctctgtgctccaactgaggaaatctctcaggagggcaatggcaaggctaaaagagcattgtaacactggggctgcaggcacccacccctggacactaccatggggctggagaccaaagcacacattctggctcctgcaactgctcatctccatgctcaccctcctggcattgcagaagagtaatgtgtggtcagagtccccacacagagtttctactggagcaccacctagtggagctgtgggaagagggccaccatcctccagaccccagaaaggtagatccactgacagcttgagctgtgcacctggaaaacccacagacactcaaggggatgtgaaaatgactgtgtgcagtatggattctaaggtagacccatatctgagaaacacaggactcctttgtcagcccattttggctcaaggatttctcatagcaattgcacatctggtacagtgactgagattggtgcttccatttggctaaggttgtggtagtcaattttctgccagtatctgtttggattttgtaggtcctggactggttgaactttattggtgtatgaaaatgctactaatttttgtatattgattttgtaacttaaaactttactaac

SEQ ID NO: 468325 - DNA, 600 bp, Homo sapiens
cagtacccagcatggttttaaggcttgagagaaagtatacaatcgtctcagaggggtgcaaacataaagtttccatcatgcttttgccatatcaatgcatggcaattgatgcatggagttgtcatacatattggcttcaggtcaacccaggaagttcacctgatcctgtggtgctcagggtttttatcagggctcgattgcatactgctcctgtaattgatggccagtataaccacaggggcccttataaacagaagaaagaggcagaagtgtggagtgagggtcttgaagatgctgtgatgctggctttgaagataggaaaggggctacagccaaggaatgccactgacttctacaaaccgaaacaggggaagaaaatggatcatttcctagagcctccagaaaggaacacagctctgctggtaacttgatttgagacctattttggacatctgatttccagaaccataatatgttaaatttgtgttgttttaagccatttatttttgttgtgatttgttatagcagcaatagaaaacagatacaccctattggtgacatatcatataatgatacatgtaggtttgaaataaaaggaag

SEQ ID NO: 468326 - DNA, 1520 bp, Homo sapiens
aagattctaagatggcccttgtggtagatagaatagtgggcccccaaaatatccattttctaatcctcaaaacccaggaaaatgtcgtcttaagggacatgagatgggaagattatcctagattgtgcaggttagttcacgttaatcgaaaggcaggctatctaggtgggccttacctaatcagcaagaaaatgggaacctcaattctacacccacaaggagctgaattctgccaacaacttgaacacgttcggaagatgattaagcccaagctccagcttggttttccaggcctttctgagggccccctgataaccaactgcatgtccccatattgggaaagaggtctcttcatatggaaccattaaacccaattcaaattcattcagtgtttctgtagcactctatacttcctctttcgcagtacttatcagacttgcaaatactgactcaacttctattttttccaatacactgaaaccacaacaaagctccaagaatctgcgattgttatgtaattcttaaagaaatgaataaaaccctttgcaaatacaacgcactttcagccccagctctatgctgttatgaacaggagctcaggggatattcattttggtgcaataaaagtcaacaacgaacaaagggcaaggcatctgaaatgccttgctaatcactttctcctccaactatctttgagatatgagcttgtcctatgaattaattcatggagcgatttgcttaacttgattcggctcctttcaggcctctagcccactttccttccttttgtggatgaggcccacttttccctcctccattttctgaatttccttcctatcttcttgctttccctaccttcctgaccagggtgtgtgtggacagacaggcaaagctcttcactgcccattggagcctggaagcgcaacacactaacattattttgaaaaattccaaggtcctctggatccttgggtgcctgtgctgggggtatggggaaggcagggaggcctgtgtttgtaaaaaaactattttattttaagcctgaattcctaggggttgcttctattttcttcatagtttaggagtcagctgatgtttggtcacaggttgtgatcaaacaccttgtattagtttttctattgctgacatgtaccacaagcttagtgtctaaacaaaataaacttactattttagtcctctttgggaatcattgggctaaaatcatggcattggcaaggctgtattcctcctcctcctccttgttctcctcctcctcctccttctcctcctcctcctccttctcctcctcctccttccttttcctcctcctccttcctattcctcctcctccttcctcttcctcctcctccttcttcttcttcttttcttctccttttccttcttcttctccttctccttctcttccctctccctccccctccccctccccctccccctcctcctcctcctcctcctcctccttctccttctccttcttcttcttcttcttgtcgtgctcc

SEQ ID NO: 468327 - DNA, 1055 bp, Homo sapiens
ttctctacagaatgtggatttttcccagaagagactttgtagggcaatttcaaggagctatgaagacatgattggtgaggaggtgccatcggatcaatactactgggctcctttggcccagcatgagcgaggaagtttagcaagcttggatagcctgcgcaaaggagggcctccacctcctaattggagacagccagagctgccagaggtgatcgccatgcttggattccgcttggatgctgtcaagtccaatgcagctgcatacctgcaacacttatgctaccgcaatgacaaggtgaagactgacgtgcggaagctcaagggcatcccagtactggtgggattgttagaccatcccaaaaaggaagtgcaccttggagcctgtggagctctcaagaatatctcttttggacgtgaccaggataacaagattgccataaaaaactgtgatggtgtgcctgcccttgtgcgattgcttcgaaaggctcgtgatatggaccttactgaagttattaccggaaccctgtggaatctttcatcccatgactcaatcaaaatggagattgtggaccatgcactgcatgccttgacagatgaagtgatcattcctcattctggttgggagcgggaacctaatgaagactgtaagccacgccacattgagtgggaatcggtgctcaccaacacagctggctgccttaggaatgtaagctcagagaggagtgaagctcgccggaaacttcgggaatgtgatggtttagttgatgccctcattttcattgttcaggctgagattgggcagaaggattcagacagcaagcttgtagagaactgtgtttgccttcttcggaacttatcatatcaagttcaccgggagatcccacaggcagagcgttaccaagaggcagctcccaatgttgccaacaatactgggccacatgctgccagttgctttggggccaagaagggcaaagggaaaaaacctatagaggatccagcaaacgatacagtggatttccctaaaagaacgagtccagctcgagatacctaggcct

SEQ ID NO: 468328 - DNA, 624 bp, Homo sapiens
gcgcggcagggcgcatatatgcccccctttctgggaaaagacggggaggggggcttctcctgggagactccaggcttcgaaattcctcgttccctatcctccggcccccgcacccctcctcctccccgccacgcaccctctcccctccccagccatctgttccactccgcagcgccgcgacaaacacggctccagctcgcttccgcccctgcccagccccctccccaagccccggggagtgggggagtgagcagacgcccttctcctaggaggccggaatttctgcctccatctcccaccggggtccggctggccagaggcaagcttcgagaccccccaccaaccaccaccaccgttgcgagggccgccagccgcagccacgcagcgccgcctgccgggcacaccaaggacctggcgcgcacgtggcgcttacccccacccccgggtccgctcctggctcgcgctcagcctccccagactattcgcaaattgaggatcccggacacagagtgcagagaccccggcaagcctactgaaagccagccgaacccgctggtgggtgctagccaattctgattttgtactttacaaaaacaaaaaaagtcagtgttggaagtcgggagt

SEQ ID NO: 468329 - DNA, 632 bp, Homo sapiens
tcgataaccactctatcagatgtttaggtatctttccagacttaagtatgccctgacaggagatgaagtaaagatttgcatgcagccgttcattaagatcgatggcaaggtcagaactgatataacctaccctgctggattcatggatgtcatcagcattggcaagacaggagggaatttctgtctgatctatgacaccaagggttgctttgctgtacatcatattacacctgaggaggccaagtacaagtggtgcaaagtgagaaaaatctttgtggacaccaaaggaatccctcatctggggactcatgatgctcgcaccatctgctaccctgatcccctcatcaaggtgaatgataccattcagattgatttggagactggcaagattactgatttcatcaagttcaacactggtaacctgtgtatggtgactggaggtgctaacctgtgtatgaagaattggtgtgatcaccaacagagagaggcaccctggatcttttgacgtggttcatgtgaaagatgccagtggcaacagatttgccactcgacctttcaacatttttgttattgcttagcctcacaatggtcctggcaagcagataggagtttccgccgaccacccaaggcca

SEQ ID NO: 468330 - DNA, 644 bp, Homo sapiens
tgagataagctgggtacctcagttggaaatgcagaaatcacccgccttctgcgctgatgttgctgggagctgcagaccagagctaaaattatattggctctaccttgaaaagtctgacttcccaccctttgcaagacaccgtcatatcttgcttggaccattgcaattgctcttaactggtgtcctgcttcgttattgtgggcagagcagccagagtggttctgttaacacacaagtaaaagtcagaccctcacgatggccctcaaagccctgctctattcagttggccactaccccgttcctctcttctatctttgtctcttttcctactcttctcatgcttctcactctgtgttacctacacctgcttcctcattccactgaggacatgccagccccagcaacaaataggaaggtggaaggaccacctgactcaggactgggattcccccagaggaaccggctcctcttggacacagttcctcagtttatagccctctttgcactgtgtatgctgaggggaaagccacatgtacacaattactaagcattttagttcatcttcaaagatgttcatggactgttcactgactgctctttgtctttacctttggagtctgtttcctattgctgttgagtgcatc

SEQ ID NO: 468331 - DNA, 647 bp, Homo sapiens
gctccagggagggggcaccagtgcttatagagtattttgtttgctgtcattctaagaggccaaggtttcaacgccagtgctccagagctgttattatgagaaagctctatgcctgcagatctgtgatgtgctgccagatgaacgacacatgtgagatccaacctccggatggagatccttccacattttctcaggggttcccactctggcatctctgccttcatgactcttcctcttctgatgtctccagttcaccagagttgtgctcagatattctgtccaaatgtgcggcctcaccctggcagccccacagccaaagtcctcagagcagagctccttggagaagccattctcaagctcccaacatctctttccatcaagcagacattttcactcagtgtgattatcacatcccatggttaaatctaattcacacattactaaacactcgcaacttaccagacatcagtgatctctggtacatgccagctcacagatcacttcttagccatggggctgagagccgctcatgaatgtgacaaaggcaaaagggatgatgttagctgtttattcatgctctcaccagagaagaaatctctgttcaaattgttcccataattccaggaatctgaagggatcttaatttt

SEQ ID NO: 468332 - DNA, 613 bp, Homo sapiens
ttatctgctcactgttttggttcttcgtagtggaggagtcactgttatgggcaacctgggaatgatcactctgatccatgcagacccacagctccacacccccatgtatttcttcctgagcgtcctatccttgatagactcctcgttttccacagtggacatccccaggctgctggagagcttcctcatctcaagccaatccatctcctttgcaggctgtatggtccagatggccctcatgatcctccatggtactgctgagtgtctgctcctggccatcatggcctatgaccgattcaccgccatctgccaccctctcctctatcacactattatatcccaatgtctgtgtgccctgctggtggtgacctgctatactgtttctgttgccaattcagctttgctgactgggtgcatctttaagctgccctactgtggccccaatgtcattaaccactatttctgtgacatcccccctgtgctccaacttgccggtgcagatactacgaggttgagaccattatcttctcattgtgtgccttgctcatcctctttaccatcaccattatcccagtctcctatgcctacatcctcgtgaccatttgcaggatgc

SEQ ID NO: 468333 - DNA, 568 bp, Homo sapiens
gaggcacagcggggataggggggttaggatctccttgaggagatggacacaggaaatgctgatgggcataaggaggagccaagggatttgttaccaggagcgaacacacagactgatcatctcccagttgttgcttctctcctcctttcctccctctctgacagcgctttgtggtgggaggctaaagggaattacacagtatccagtccggcgggctctcagctgagatgtgacggtacagcagtgcctgaggcaggattggagtcccgaacatgggaagaccaagaacatgcttggggcaccagcaaacataagcccaaagaagccaatttatatggaagtgagagtaggtgggagagagcccaaggaggccgaaagagcatggcttttgcaattaaacagcttcttgtggtttgctggcagttttgggtgtttcttggcttatagaagcatcacctggatctctgccttcatcttaacatgatcttgtccctgtatgcatgtttatgtctgtctttgtgttcaaacttcccctttttataaggacactagtaatattggattagtg

SEQ ID NO: 468334 - DNA, 629 bp, Homo sapiens
cagggctggagaacatgaccactgcccacctgtctgccttcaaacttcctgatctaactgccacttaccaagcctacctggcagccaaagccctgtgggttgcctatcagaacttgatgtcctgctctgagagagagggaccattcctgggaggcacgtatgccaatgcatgggaagccaggctttctcaggtgagtggccaagaagcctttcccagtccctgtccattccagctttctgtgagctttagactagcagagaggcagtgtggtgtgacgctgctgctaataatggtgatgacatcaaaactgccaagggccttagaaatctgctggtccagcacgaagcagggagatcaccaaaaaggggaggcagagctggaagagaacacagctgtcctgccatccaggtcactacatgccaatgctgatatgcaacaaaaaccatatgagattcacagtaggaaagagttaaccacaaagttagaaaactggtaaatctgcaatgtaaaacatccaatccagcacagacacccattcttcatgggctgctcagggataaggacaggaagggaagggaggtggtgttttcctcgtagtcagagagggtacatgtgcacattgtgcagg

SEQ ID NO: 468335 - DNA, 783 bp, Homo sapiens
agctcactagcaatggatccgaacaaagaagaaatccctgatttacctgaaaaagaattcagaggagctggactggggatgcaagtatgccaaggcacagcagccatactgcagcaggaccacggtgaggtgggaggagcaggtggagaaggcctggtggcggccctcagcagaacggatgctcaggatggcacaggtgatgaacacgtaggagacgcagatgagcaagaaggggacggtcagcacgaggatgctcacgacatagaggacagcctggtgaacacggatggcagcgcaggccaggcgcaggacgggaggtacatcgcagaggaagtggttaatttcctggcggtagccgcagaagggcaagcggtcataggccacgatcgccaagaggaaacagtcagcaccaccaagtgtgagaaagaagaacatttgggccccacatccagccaatggaatgggcttctgggccccaaaaatgttggaaagcatcaagggcaccacaacggtggtgtagcagatctctacaaaggacaggttggacaagaagaaatacattggggttcggagaacgctgctatagactagagggttaagcatggggatgaccatggtgtagaacacagatgagattttgtctgtgtccatggaatgaccagaacttggctgtttagaatttctatgtgtttcctttttatcattactttttgttatattcttattttgttcctgtatcatttccctgattttcttttatcatctgtgttctaattcacttag

SEQ ID NO: 468336 - DNA, 996 bp, Homo sapiens
tccctgacactgtcatactcaggcctctgttagccctttgcttcatggaaacctgtctatgcacatccatgtactatttcctgggcagcctttctgggattgaaatatgctacactgcagtggtggtgccccatatcctggccaacaccctacagtcagagaagaccatcactctcctgggctgtgccacccagatggctttcttcattgcactgggcagtgctgattgcttcctcttggctgccatggcctatgaccgctatgtggccatttgccacccgttgcagtaccctctcctcatgacattgactctttgtgtccacttggttgtggcatcagtcatcagtggtctgttcctgtccttacaactggtggccttcatcttctctctgccattctgccaggctcagggcattgagcacttcttttgtgatgtgccaccagtcatgcatgttgtttgtgctcagagtcacattcatgagcagtcagtgctggtggcagccatactagccattgctgtgcctttcttcctcatcaccacctcctacaccttcatagtggctgctctgctcaagatccactcggctgctggccgccaccgggccttctccacctgctcttcccacctcactgtggtgctgctgcagtatggctgctgtgccttcatgtacctgtgccccagctccagctacaaccccaagcaagatcggttcatctcactggtgtacacattgggaaccccactgctcaacccacttatctatgccctgaggaacagtgagatgaaaggggccgtagggagagttcttaccaggaactgcctttcccagaacagctaggaaagacgaggggacagcctatcaggcaagtatttggttccagcccaccaaatctgtatgaaactgagatttctatcatttggtgttaaaactcatctaaaagatggtataaattatatggatactgtttatgtgtgccaaagatttttaaatattt

SEQ ID NO: 468337 - DNA, 1262 bp, Homo sapiens
agaaatggtttgaataagccaagaagagctcagcgcgtcctattcttttgcataagacatgcctgtggggaaacttgtcttcaaccagtctgagcccactgagtttgtgttccgtgcgttcaccacagccactgaattccaggttcttctcttccttctcttcctcctcctctacttgatgatcctctgtggcaacacagccatcatctgggtggtgtgcacacacagcaccctccgcaccccgatgtatttcttcctgtccaacctgtctttcctggaactctgctacaccaccgtggtagtacccttgatgctttccaacattttgggggcccagaagcccatttcgttggctggatgtggggcccaaatgttcttctttgtcaccctcggcagcacggactgtttcctcttggcgatcatggcctatgaccgctatgtggctatctgccacccgctgcactacaccctcatcatgacccgcgagctgtgcacgcagatgctgggtggggccctgggcctggccctcttcccctccctgcagctcaccgccttaatcttcaccctgcccttttgcggccaccaccaggaaatcaaccacttcctctgcgatgtgcctcccgtcctgcgcctggcctgcgctgacatccgcgtgcaccaggctgtcctctatgtcgtgagcatcctcgtgctgaccatccccttcctgctcatctgcgtctcctacgtgttcatcacctgtgccatcctgagcatccgttctgccgagggccgccgccgggccttctccacctgctccttccacctcaccgtggtcctgctgcagtatggctgctgcagcctcgtgtacctgcgtcctcggtccagcacctcagaggatgaggacagccaaatcgcgttggtctacacctttgtcacccccttactcaaccctttgctttacagccttaggaacaaggatgtcaaaggtgctctgaggagtgccattatccgtaaagcagcctctgacgccaactgaaggcttaggggcactgggctgggtgtctgtctgttgctgtgtcaaagaactctaaatgacacagaactgtagtactttctcacactgtgcacttgatgtttcttttttgccatatttgccccaagttcacaattcatgctcatttttctgaagtgctttgactaagatatgaaaatttggacagaacttacagcgtaggaatgctagtttacttagctctactttaaggatttgcagctcacct

SEQ ID NO: 468338 - DNA, 1231 bp, Homo sapiens
tgccaacttttttttaaaattccacatataaatcggcagaaatatgcatcaaggaaaccaaaccaccatcactgaattcattctcctgggatttttcaagcaggatgagcatcaaaacctcctctttgtgcttttcttgggtatgtacctggtcactgtgattgggaacgggctcatcattgtggctatcagcttggatacgtaccttcatacccccatgtatctcttccttgccaatctatcctttgctgatatttcctccatttccaactcagtccccaaaatgctggtgaatattcaaaccaagagtcaatccatctcttatgagagctgcatcacacagatgtacttttctattgtgtttgtcgtcattgacaatttgctcttggggaccatggcctatgaccactttgtggcgatctgccaccctctgaattatacaattctcatgcggcccaggttcggcattttgctcacagtcatctcatggttcctcagtaatattattgctctgacacacacccttctgctcattcaattgctcttctgtaaccacaacactctcccacacttcttctgtgacttggcccctctgctcaaactgtcctgttcagatacattgatcaatgagcttgtgttgtttattgtgggtttatcagttatcatcttcccctttacactcagcttcttttcctatgtctgcatcatcagagctgtcctgagagtatcttccacacagggaaagtggaaagccttctccacttgtggctctcacctgacagttgtattactgttctacggaaccattgtaggcgtgtactttttcccctcctccactcaccctgaggacactgataagattggtgctgtcctattcactgtggtgacacccatgataaaccccttcatctacagcttgaggaataaggatatgaaaggtgccctgagaaagctcatcaatagaaaaatttcttccctttgatgccctggacctctacattcttttagtccacataatcagataaatgattcagcccagagcgtatggcacagttgtgatggttcaacttttgatgaacttgcaggtatctgtctcctattccaacctctgaaggggttggagcttttccacttagctcttgtcttggaaacaaaacctgtaactgccatgaagttcacagttgatgtgcagatataatatgtgaacagaaagcaagagcttgtaggtacc

SEQ ID NO: 468339 - DNA, 950 bp, Homo sapiens
atgatcctcctgatccgtggcgatcgtcggctccacaccccgatgtacttcttcctcagccacctttccttggtggacatctgctactcgtccgccatcatccctcagatgctggctgtgctgtgggagcacggcacaaccatctcccaggctcgctgtgcagctcagttcttcctcttcaccttctttgcctccatcgactgctaccttctggccatcatggcctatgaccgctacacggccgtgtgccagcccctgctttatgtcaccatcataaccgagaaggcccgctggggcctagtcactggggcttacgttgctggttttttcagtgcctttgttcgaacggtcacagccttcactctctccttttgtggaaacaatgagatcaacttcattttctgtgacctccctcctctattaaaactctcctgtggggacagctacactcaggaagtggtgattattgtgtttgctcttttcgtcatgcctgcctgtatcttggtgatcttggtatcctacctgtttatcattgtggccatcctgcagatccactctgctggaggccgggccaagaccttctccacctgcgcctcccacctcactgccgtcgctcttttctttggcaccctcatcttcatgtacctgcgagacaacacaggccagtcctccgagggagaccgagtggtgtctgtgctctacacggtggtgaccccaatgctgaatccccttatctatagcctgagaaacaaggaggaatggatttaggattttctgcatctactgagctgataatctagttttgtttttgtttattaatatgatggatagcattttctgatttttgaatgttaaaccattcttgtaatttgggggataaactacacttggttacagtatattattcttttcattatcacaaatgtaatatgaatcattttatctcatga

SEQ ID NO: 468340 - DNA, 1489 bp, Homo sapiens
gtgagatgggtttcagggaccactggtgtcatggcagagatgaacctcaccttggtgaccgagttcctccttattgcattcactgaatatcctgaatgggcactccctctcttcctcttgtttttatttatgtatctcatcaccgtattggggaacttagagatgattattctgatcctcatggatcaccagctccacgctccaatgtatttccttctgagtcacctcgctttcatggacgtctgctactcatctatcactgtcccccagatgctggcagtgctgctggagcatggggcagctttatcttacacacgctgtgctgctcagttctttctgttcaccttctttggttccatcgactgctacctcttggccctcatggcctatgaccgctacttggctgtgtgccagcccctgctttatgtcaccatcctgacacagcaggcccgcttgagtcttgtggctggggcttacgttgctggtctcatcagtgccttggtgcggacagtctcagccttcactctctccttctgtggaaccagtgagattgactttattttctgtgacctccctcctctgttaaagttgacctgtggggagagctacactcaagaagtgctgattattatgtttgccatttttgtcatccctgcttccatggtggtgatcttggtgtcctacctgtttatcatcgtggccatcatggggatccctgctggaagccaggccaagaccttctccacctgcacctcccacctcactgctgtgtcactcttctttggtaccctcatcttcatgtacttgagaggtaactcagatcagtcttcggagaagaatcgggtagtgtctgtgctttacacagaggtcatccccatgttgaatcccctcatctacagcctgaggaacaaggaagtgaaggaggccctgagaaaaattctcaatagagccaagttgtcctaaccatctccaaacttggaaaatcccgagaaccacctactctgtagtgtcagaattctggacgctcattatttatagcatgctcaatgtttaaatgaatatattatggtactaggtataaaaaagaaccagaacttttagctccagggagaggaaggaagacaaggaaaagtcaacctgaaaagagattggagtgggagttttgattcccaggacaagtgacaaaaggatttgaaattaaagcctgtgcaatccaaatatggcacacttcacctgtctgtgattataagagtaattttttttgcaaaatttttaatgaaagattttcatcatatagaaatgttaaaaataatatgtaggaagtttcctatactcagtactgagattgtgtaattgctaatatttgctgtctttacttggttacatagatgtaatctatccgtgagtttattcatcaatcaattcactcatcaaaccacctttttttgattcatttcaagcaaagctgaccctactcaaggtatgcctt

SEQ ID NO: 468341 - DNA, 942 bp, Homo sapiens
gtgtggtgggtatatgagtaaccgaattcattctcatgggctttatggaccaccccaaattggagattcccctctttctggtgtttctgagtttctacctagtcacccttcttgggaatgtggggatgattatgttaatccaagtagatgtcaaactctacaccccaatgtacttcttcctgagccacctctccctgctggatgcctgttacacctcagtcatcacccctcagatcctagccacattggccacaggcaaaacggtcatctcctacggccactgtgctgcccagttctttttattcaccatctgtgcaggcacagagtgctttctgctggcagtgatggcctatgatcgctatgctgccattcgcaacccactgctctataccgtggccatgaatcccaggctctgctggagcctggtggtaggagcctatgtctgtggggtgtcaggagccatcctgcgtaccacttgcaccttcaccctctccttctgtaaggacaatcaaataaacttcttcttctgtgacctcccacccctgctgaagcttgcctgcagtgacacagcaaacatcgagattgtcatcatcttctttggcaattttgtgattttggccaatgcctccgtcatcctgatttcctatctgctcatcatcaagaccattttgaaagtgaagtcttcaggtggcagggccaagactttctccacatgtgcctctcacatcactgctgtggcccttttctttggagcccttatcttcatgtatctgcaaagtggctcaggcaaatctctggaggaagacaaagtcgtgtctgtcttctatacagtggtcatccccatgctgaaccctctgatctacagcttaagaaacaaagatgtaaaagacgccttcagaaaggtcgctaggagactccaggtgtccctgagcatgtagatct

SEQ ID NO: 468342 - DNA, 1314 bp, Homo sapiens
acaaatgatatggtcttctgctcccagaagaagtcacgagtgagctctcatgagatctgatggttttataaggggctcttcccgcttcgctgtctcactctctctctcctactgccatgtgaaggaggtccttgcttccccttcaccttccaccatgactgaaatacccactcttacaataacaaacaaaatctagctgaccacaggattcttaaagaagaaagtaaagactttatgcaggaagcaggcctatggctgtaggaaggaacaacacaattgtgacaaaattcattctcctgggactttcagaccatcctcaaatgaagattttccttttcatgttatttctggggctctacctcctgacgttggcctggaacttaagcctcattgccctcattaagatggactctcacctgcacatgcccatgtacttcttcctcagtaacctgtccttcctggacatctgctatgtgtcctccaccgcccctaagatgctgtctgacatcatcacagagcagaaaaccatttcctttgttggctgtgccactcagtactttgtcttctgtgggatggggctgactgaatgctttctcctggcagctatggcctatgaccggtatgctgcaatctgcaaccccttgctttacacagtcctcatatcccatacactttgtttaaagatggtggttggcgcctatgtgggtggattccttagttctttcattgaaacatactctgtctatcagcatgatttctgtgggccctatatgatcaaccactttttctgtgacctccctccagtcctggctctgtcctgctctgataccttcaccagcgaggtggtgaccttcatagtcagtgttgtcgttggaatagtgtctgtgctagtggtcctcatctcttatggttacattgttgctgctgttgtgaagatcagctcagctacaggtaggacaaaggccttcagcacttgtgcctctcacctgactgctgtgaccctcttctatggttctggattcttcatgtacatgcgacccagttccagctactccctaaacagggacaaggtggtgtccatattctatgccttggtgatccccgtggtgaatcccatcatctacagttttaggaataaggagattaaaaatgccatgaggaaagccatggaaagggaccccgggatttctcacggtggaccattcatttttatgaccttgggctaatgtttacaatgaagctgtgagctaggtgaattgtgcagacatttacataattttaaactagttgatctatagaatgaattgtgggaat

SEQ ID NO: 468343 - DNA, 1741 bp, Homo sapiens
gaaccgtcttgaattttcttttctctgagcacctcttgcatgggtatggtggaggcagggtgtttcagtaaggatgatgttgtcatttgcctctgtgtttccagtaaaaggaaactggtattggagtcccaggaaacagcagtcggggaaaatataaaacatcaagtccaagagagtgagaaaaaagaaaagacaaactttctggtggaggacgcaagaagtatctcctactacatcaacacagatctctgtctttattccaaagtcaatgccaagttctctgctgagttccagagaatgaaaacacttcaagtgaaggacaaagctataactacccgagttcaggtaagaaacctcgtctacacagtcaaaatcaacccaactttagagctaagctcaggttttaggaaggagctccttgacatctctgactgtctagagaacaaccagagaaggatggccacctacctggcagaactcctggtcctcaactatggcacccacgtcatcaccagtgtcgacgctggggctgctcttattcaggaggaccacatcaaggcctccttcttccaagacagccagagcagtcgtagtgctgtgaccgcctctgctggacttgccttccaaaacaccgtgaacttcacatttgaggaaaaccatacctcggagaatgtcctcaccaagagctacctctcaaaccgaaccaactccagggtgcagagcattggaggggttcctttttacccaggcatcaccctccaggcctggcagcagggtatcaccaaccacctggtggccatcgaccgctctggcctgccgctgcatttcttcatcaaccccaacatgctacctgacttgccaggccccctggtgaagaaggtgtcaaagacagtggaaacagctgtgaaacgctattacacattcaataccaaccctggctgcacagatctcaattctccctacttcaattttcaggccaacactgatgatgtctcctgcgaagggaaaatgaccaacttctctttcgttggggtttatcagaaatgcagccagttctcagggaataaaaatgttgttctctgcccaaagttggagcagaagaatccactcactggtgatttctcctgcccctctggctgctcctcagtgcaccttctatccaagacttgcgaggagtgttgcaaccatctggagtgtcataagaagtgcaccctccttgtcttctgcaagaccgtgtgtgaagatgtgttccaggcggcaaagggtgaatttagggctttttggtgtgtggccagtagccaagtacctgacaactcaggactgcttttcaggggcctcttcaacagcaagagcataaaccccatgacaaatgcacagtcatgcccaactggctactttccatggagactctttgaaaacctcaagctgcacagttgggaacccctggtggttccagccacatccaaagatttaggggcaccttccctgaaaaagtgtccgagaggcttcagccagcacctagccctcatcagcaatggatgccaagtgtcctactgtgtcaaggctgggctctttacagaaaagttccttccccctgctagtctcccgcctttcacccagccaccccttatgagtgaggctgatgccaacactgtcatagtgaccagttctgagaatgcgagatcctagattaaagattcccagacccaccagtggaggctgggagaacaattagagctgc

SEQ ID NO: 468344 - DNA, 992 bp, Homo sapiens
tctcccatttggcctgtgcagaagacagatggatcttgcagaatgacagtgggttatcataagcttagccaagtggtgacgccaattgcagctgctgtaccagatgtggtttcattgcttgagcaaattaacacatctcctggtacctggtatgcagccattgacttggcaaatgcctttttctctattcttgtccataaggcccaccagaagcaatctgtcttcagctggcaaggccagcaatatacctttactgtcctactcaaggtaaaatttctgggggtccagtggtgtggagcccgtggagatattccttctaagatgaaggataagttgctgcacttggctactcctacaaccaagaaagaggtacaaagcctagtgggacgatttggattttggaggcaatacatttctcatttgggtgtgttactctggcccatttatcaagtgacccaaaaggttgccagttttgagtcgggtcccagacaagagaaggctctgcaacaggtccaggctgctgtacaagctgctctgccacttgggtcatatgacccagcagatctaatggtgcttgaggtgtcagtagcagatagggttgctgtttggaggctttggcaggcccccataggtgaatcacagcagaggcctctaggattttggagcaaggccctgccatcttctgcagatactattctcctttggagagagttcttggcctgttactgggctttcatgaaaactgaacgtttgactgagggttatcaagtcatcatggaacctgaactgcctgtcataaactgggtgctttctaacccaactagccataaagtgggtcatgcacagcagcattccatcatcaaatggaagtggtatatatgtgatcgcgcatgagcaggtcccaagggcacaggtatgttacatgaagaagtggctcaaatgcccgtggtctccactcctgtcaccccgccttctctccccaagcctgagcc

SEQ ID NO: 468345 - DNA, 1050 bp, Homo sapiens
tgccctcactttaacagtagacacctggccaggttgtgcatgcaccttttgttgcagcacccactggaatgtcagctccaccagggcagggccttctttgtcccatccactggacaggacctggctgtgagtatggtgggatctgcgcatgggcctgctggctgacagcctgcccttctccgtgctggtgaaaaagagggtgttcctggcctcgcccactgaggtggctaaggtctgcctgcagacacagatgcagcagttgcggcccttggcctcggggcctttgtctgtgcccctcgtgtgtcctgtgtctcctgtatgttcagtgtccaagtaccatgggctgctgcactgcctggccatggtggcccatgaggaggggctgcacagcctctacaagagcagctcagccctgcttttctgggacagccactcctttgccacctacttcttctcctatgctgccctctgtgggtggctcggccccactggccatagccagccagagattactgggcctgcggcaaggcccagccagcgtggccctggggagaacacatcacatctgctggtgctgcaggcgggggctgggggccagaggcagacctgtttctccccgagcactatcctggagcggcaagctgttctgcagctgtccctgtgtgctcagccaccctctaccttggatccccgctcccctacccattgctcttcatacaccgtaccctttcagacaaagttggctggtctcccttccaggctggggaccacagggcagcaaggccaagcttggtcagtaccacatctgtctgacaagaggacattaccagctggagtaggagtgctcttccggcagagcctacggcaccatggtggtgctggcagccggcctcacacctcatctccaaatacctgcggggccactgctcctgtccgtcctaatccagatgtgcccttgtctctcagggaaaaattctctcggaaacccctggactttagcaaaatgggggaggtatgggaggtgtgcagccctcctctgccctgaccagc

SEQ ID NO: 468346 - DNA, 1656 bp, Homo sapiens
acacagcaggatctccaggatctttactttagaatgacaagggacatcgcccccaggatcggatatcctaaacccgtcctgctgcattcttccttcttctctgacctgcagggcatccagaacaaaatgagtgccagtgaccccagctcttttatcttcctcaccaacatggccatgcagatcaagaccaagatcagtaagcatgcattttctggagagagagacaccatcgaggagcacaggcactttgggggcaactgtgttgtggacgtgtctttcatgtacttgaccttcctcaaggatgaagacaagctcgagcagatgaggaaggatgacaccagcagagacatgctcactggtgacctcaagaagatgctcatagaggttctccagcccgtgattacagagcaccaagcccagtgcaaggaggtcatggacgagttagtgaaagagttcactaacgaatgagttcagtcgtgctcattttatatatgcttataaagagacgtgatttatcaataatcccagcccaatcaaagtaccgctacctgtagtcttccgtcacatgatcattactgggcttggtttctctaagcctgtgtatgttatcaatactgtttattcctctgagtttcattatttctgtctcttgagggcaaaacattgtgggtgattggtgctgacattgcatggtcagatagagaagtccagctgtgaatctctcccccaaagcagccccaaggcatggagcctttggctggaagtccatgggccaacctgttctgtccatagaagactcctagggctcccagtatactcttaaaacccactctattttaaaatatatattctatgtatgcatatatggaagtgaaatatcattattgtaacctaaaaagtgctttgaaatgttgatgtggggaagtttattgagcgcaagatgtatttcagcccatgactcaccacgaaaaaaattgataggtaaaagctttgctacacatttgactaagaaatcagccagctttaaagctgcttttaatcataaagagtgaacagagttgggcagtttttattaaattgagtcttgggggtgaaactttccggtttacttaactccagaccatgcatgtattctactccggaaatcatgctcatttcccttgactagtgttttcccgccaatggatcctagaccctccatcctgcagagtcagcggtgtcttttcccctgactgtgtcagatgctgagcagtcattacctctgcaaatgtttcattttgacaattgaccgcaatggaagtcagtacagagcaatgcactggctgtgtccgggatgggtggacgtagctaggaagaaagtcacacaagcagccctagaggccctcactggtgtctggacaggctgcatttaatcacatgccatgttcaggcttggaagagaaattccaaatttcaggggagcccctggtcgatatatctgggtctctcctcttgagcgctctgccttcctgccgccccttggagtaaataaacttctttggctcccgcacgaggtgctgtgctctgtctgggaggtctgaggagggaacaaagtcccctcccttcccctcttcatggatggccttgagtctgctggggtcaaaatctggggaaaac

SEQ ID NO: 468347 - DNA, 583 bp, Homo sapiens
gctgtgagggctgccagcacactgtcacctctcagtaagtcacgcttaactgagtactggctgtttggctttgtgctcatgtggccccaggccctgaagggctttgcatattattggggctctgatggtgataaaaatgaatgtgtaggatatcaagataaccaggagagctataaagatattgaagctcacaacataaataagaacaagctcgctaatatgtctatcagagcaagagagaaccatgactgctggaatatcacagaaaaagtgatggacttcattggacttacagaaagagagactaaatgtgtccccagtgtggatggaggcattcaggaaaccacagagagacaagttactgagaaaaaagtacatgggattgtggagacaggaatcccagaatatcaatacaataattcccaggtttccaaccagagtgataatatagatgaaggggaacgttataaagaggggaacctgcagttctgagtcattgttatttggaagagtgtgataataattgacgtttcctctttttaaaaatgtttggtaaatttcaccagagaagttatctggttcc

SEQ ID NO: 468348 - DNA, 1428 bp, Homo sapiens
gtcatcttaagtttctcagataatactgatggagaattgtacggaagtgacaaagttcattcttctaggactaaccagtgtcccagaactacagatccccctctttatcttgttcaccttcatctacctcctcactctgtgtgggaacctggggatgatgttgctgatcctgatggactcttgtctccacacccccatgtactttttcctcagtaacctgtctctggtggactttggatactcctcagctgtcactcccaaggtcatggctgggttccttagaggagacaaggtcatctcctacaatgcatgtgctgttcagatgttcttctttgtagccttggccacggtggaaaattacttgttggcctcaatggcctatgaccgctatgcagcagtgtgcaaacccctacactacaccaccaccatgacggccagtgtaggtgcctgtctggccctaggctcatatgtctgtggcttcctaaatgcctcattccacattgggggcatattcagtctctctttctgtaaatccaatctggtacatcactttttctgtgatgttccagcagtcatggctctgtcttgctctgataaacacactagtgaggtgattctggtttttatgtcaagctttaatatcttttttgttcttctagttatctttatctcctacttgttcatattcatcaccatcttgaagatgcattcagctaagggacaccaaaaagcattgtccacctgtgcctctcacttcactgcagtctccgtcttctatgggacagtaatcttcatctacttgcagcccagctccagccactccatggacacagacaaaatggcatctgtgttctatgctatgatcatccccatgctgaaccctgtggtctacagcctgaggaacagagaagtccagaatgcattcaagaaagtgttgagaaggcaaaaatttctataagtttggaattttaacattgttgtatacacaaaaatgttgtttccctcatctcagactttcctcatgcaatgagttacatttgaaaccccacaatacatttaagttcatgaggtgatattcttacctctttagaagtcaattttttaataaaaataaaatattatcagaaatgtaatacctgaatgaggaaggctaaatggaaatgttagaatttttggaacttgctggtcaaaacttactaatgacattcggtttactcacttgttccccttgcattttttctaccacattccagtgcaaacatacttgttaaacagggacaccaacaagcccacaaaaaagtacatgtttatgcctcttgtgggcacataggcattagaaggagaaatttactcagaagtaaatggagtgtggctagtttttatataaaggattgtacacatatattgaaatatcattctttacccctt

SEQ ID NO: 468349 - DNA, 1865 bp, Homo sapiens
cagtcacggtgtttggagtgtgtcccaggtcctgctggagcagtccacttctttcagaggggcagctacataattcccaatggagaacaacacagaggtgactgaattcatccttgtggggttaactgatgacccagaactgcagatcccactcttcatagtcttccttttcatctacctcatcactctggttgggaacctggggatgattgaattgattctactggactcctgtctccacacccccatgtacttcttcctcagtaacctctccctggtggactttggttattcctcagctgtcactcccaaggtgatggtggggtttctcacaggagacaaattcatattatataatgcttgtgccacacaattcttcttctttgtagcctttatcactgcagaaagtttcctcctggcatcaatggcctatgaccgctatgcagcattgtgtaaacccctgcattacaccaccaccatgacaacaaatgtatgtgcttgcctggccataggctcctacatctgtggtttcctgaatgcatccattcatactgggaacactttcaggctctccttctgtagatccaatgtagttgaacactttttctgtgatgctcctcctctcttgactctctcatgttcagacaactacatcagtgagatggttattttttttgtggtgggattcaatgacctcttttctatcctggtaatcttgatctcctacttatttatatttatcaccatcatgaagatgcgctcacctgaaggacgccagaaggccttttctacttgtgcttcccaccttactgcagtttccatcttttatgggacaggaatctttatgtacttacgacctaactccagccatttcatgggcacagacaaaatggcatctgtgttctatgccatagtcattcccatgttgaatccactggtctacagcctgaggaacaaagaggttaagagtgcctttaaaaagactgtagggaaggcaaaggcctctataggattcatattttaattataaagaattcacaataagataattttttccacctcatattaatctttgtctaccaagcccaatatttgggcttcctcatggacagtttctattgactgttttcttaaacatatgaattggccatactttcttcattctttaagtgacactttttttgttgttaaaatctggacattttaaataataaaaaatagcatattctaaaaatcagatctctcctcccatctaggctttgtttttgttggtggtacttttgtttgtttagtgattttcctgagttacttatgttaattctgcatttcttgttgtgtgtggccactgaaatttctactcagttaggaatatactgtatatttatttatagaaaacataaaaggaaaatgtgtaacaataatataaagtattagagtgcataattggcagtataagtttgcaacatccttaaactactcgtaaaatggcacagtattacaaagaagcatattttcatgaattctaaacatatattgtaaactctagggcaataactaaaacaatttttaagagaggtatttaataataagttaatagtggagatgaaacggaatcataaagatcgttaataatttaaaaaggaaaagaagacaaaagaaacaaagaaaagatggaaaaaatagaaaaaaaactaggaaaatttataataacctagtattatgaattggtatttaataagaaagcctgagaactgagccaaatatgctcctctttcatggcttttctttttattttctttcccagcgaattgagttggaattcctctactgaacatagctgataaaacatcatggccagtgcataa

SEQ ID NO: 468350 - DNA, 730 bp, Homo sapiens
ccgctttccactcccaaatctcctttatcccagagcatttcttggcttctcttacaagccgtcttttctttactcagtcgccaatatgcagctctttgtccgcgcccaggagctacacaccttcgaggtgaccggccaggaaacggtcgcccagatcaaggctcatgtagcctcactggagggcattgccccggaagatcaagtcgtgctcctggcaggcgcgcccctggaggatgaggccactctgggccagtgcggggtggaggccctgactaccctggaagtagcaggccgcatgcttggaggtaaagtccatggttccctggcccgtgctggaaaagtgagaggtcagactcctaaggtggccaaacaggagaagaagaagaagaagacaggtcgggctaagcggcggatgcagtacaaccggcgctttgtcaacgttgtgcccacctttggcaagaagaagggccccaatgccaactcttaagtcttttgtaattctggctttctctaataaaaaagccacttagttcagtcatcgcattgtttcatctttacttgcaaggcctcagggagaggtgtgcttctcgggttggtggtatgtcccctaggagaacagtgaggcagaaaaggcagaagcctttggtatggggggaagaaatggtaaactacaagagaaatttcctgtgaagaaacagctacagatcctggggggcttcagatgtaaaat

SEQ ID NO: 468351 - DNA, 807 bp, Homo sapiens
tcagaaatctacaccacctcttgtatccatgcaagccgaggctcctatttctcataccacctcttccatgcagcccccagtgacccaacaggagaagaccccaccgcctagacccagcccgctagaggcaggcagtgatggctgtgaggagccgaagcagcaggtgtcttgggagcaggagttcctggtgggcagcagcccaggaggcagcgggcgggcactgtgcatggtgtgtggcgctgagatccgggcaccctcggccgacacagctcgctcgcacatcttggagcagcaccctcacaccttggacctgagcccttctgagaagagcaatatcctggaggcctggagtgaaggggtggccctcttgcaagacgtgagagctgagcagccgtccccacccaactcagactcgggccaggatgcccacccagacccagacgccaacccagacgctgccagaatgccagccgaaatcgtcgttctccttgactctgaggataacccatccctccctaaaaggagccggcccaggggactccgccccctcgagcttcctgtcggcaaagacatcgccccacaggagagctgttcgcaagcaccagccgaggtccgacacttcactgacaggcagcctgtcccgcgccaggcgttcagtccttgcaagcgtcgttcgtcccagcaacccaagcgtcacggggcccagacaagcaaggactcacccaaagacagggaagtggcagaaggaggccttccccgggcggagagcccctctccaggtgagccctcctgagagggaagcacagt

SEQ ID NO: 468352 - DNA, 1252 bp, Homo sapiens
catgagatttcagctcagaaaatgcaaaatgtctgacactgaaaatccatcttcgaatgaattggggagccagcagcagccagcatccaaggctggctctgaggagcaccgtccagtgcatctgtggttttccacactggcagggggaactcaggacacttgtgccctggccctaagaattatccttccattggcaccaacagctggtattcatcctccagttgcctcctcctcctccttctcttcactcagctggtattcatcctccagttgcctcctcctcctccttctcttcactcagctggtattcatcctccagttgcctcctcctcctcctcctcctccttctcctcctcctcactcagctggtattcatcctccagttgccacctcctcctcctcctccttctcctcctcctcctcctccttctcctcctcctcctcactcagctggtattcatcctccagttgccaccacctcttccttctcttcctcctcaatgcagtgaagtttacaccatgatgtgctgtggccctgctcaaatcttttgcctcctctccattggccctggggctgctgccttgacatgggtctttgttgctgtccctctccccagcgttctcccagctgcctccataattgtccacaattcccagcattcccagtgccttcaggacaaactgagactctccatgtggcacctaaggctctagtccctgccaatttctatttcctcttctccctctcccacctgaaaccctccttcatccagaattttcccagcctctgccaggaaacccttgttccctttctccttctggcaataccctggtctttctagttttggtttaaacaatgccctctttaggaagtcttccccagttgggtgacccttcctggggcttcccttttccttggtgcttatcaccctctactgcaatcagtgccagggacccagggcaccgaggcactggtgcctagagtgcaaggtacttttaggggctcatgaaaatgttttattttaaaattagatgaaaaaaatgtaagggtcaaagacaattttttttctcacatcaaaaaaataaatgcgtagggcccatgaaaatctactgaattatttaaatttttatttattttttaaatagaggaagatacctcatgaagacaaaagcacctaaggcctgagaaagtgagaatgtggccctgactcactgccattggtttccccttcccccagtggggttggggggt

SEQ ID NO: 468353 - DNA, 4393 bp, Homo sapiens
ggtaaacatgggttgtgacttgttacggagaaattgcccctgggcatttacgtgcacatgcatgcccacacgtcctcctgctgtggcccgaaagcatcctcggagcctgggctatgtcctccacacttgctgcctgaccagccccgtggggccggccccgctgggacaggttttcccgttaagcattaaccaccagcagataagggctctgagggaacgccctgacctgggatggctgctcctcgctatcacgggccagcagttccggccacaaggagagagttccccgtcaccagaggcagtgctgtccgagagctggacccgccttcgggtgtctgagaggaaggcctggtggctggccggccacaggaagtggtgggcgtcagcctgccagggagtggggcattgatgctgtgtgcgcgtgcgtgtgtgtgtgtgtgtgtgtgtgtgtgtgtgtgtgtgtgtgtgtgtgtctggagtcatggcagggtccctttctgtctgtctccttgctctgccccagactggggggctgcagaggtgagggtatctggcctcaacagctgcttattcccgatgggatggcctgggctgggcccctgaggccaggctgacttggacatggcaagaggggtcccaggctcttgtgggcaaagcaggggaggcgccaatgtggaggaacagagtctcctggctggctgctgctctctggagcgggtggagtcagggaagagctgagctggggagtcaccctgggcctggggtcaccgtaggccccatgtagcaccctggttcccctgcctgtaggtgacaggagccagcccagccaggtgtgctccctccccaggccctaggcaggcgggtacaggggccagcagctgcgcccgccccaccttccttcccacccacatgccgaagggtggccaggcaggcaggtggacgagtccaggcagcggctgagtcagtgtgtgtggaatgttctggccgctcccagctgcaccctgcccctacctgccaccacctcaccttcatcctcaggcgctgcggccctgagcccctgccaggaatgcacctttagcccaggcctgctcagtgagctccgccgacagccagccctgctcctcccgccatgaccctgcagacccctctgggcttccaagttcctgggggctgcagtgaacatgctccacctgcatggctggcaaaccatggtgggccccagctgtggtgcgtgctggggtagaggcaaggaagtgatgggaccgcagagatgagacccccagggatgagatgggacccccaggcagggcccagggtccagggcccaggagagagaagcagggagggagagagcttcctggtggaggacgcatcctacagtgggggcaagggtgctctgaggtccggtgaaggcagggactaggctgcccaggccctgcctgcttggctggggctgggggctgctgggaggtggctgggaggctgggcctgggcagctaagctggagctttggccagggtccagagcctccctcccttcagcttcctgctgcacagaaccctcgcccctggccaccccgtgctgcctccttgccctggcagacccagcactggctgctgctagtcagatggggtagcgggcaggggccggaggggccaccctcccagctgacccagcctcctgggccgcttcttccaaaccagcagggtagaaagatggggcacccaccagtctctcccagtgccccggccccagctggcaccacagctatacctgggcttattccagaccttgtcgccgggaccccctgtgagttgtgggattcccaagaggggtgtggggataacccagccaagtgggggctgcagctgtccacagatgcactcagcctggcctctaccccagggccccgctgggctctcattgccggcgcccttgccgcgggcgtcctcctcgtctcctgcctcctctgtgctgcctgctgctgctgccgccgccacaggaagaagcccagggacaaggagtccgtgggtctgggcagtgcccgcggcaccaccaccacccacctggtgaggagcggctccttgctcactcagtccagagagggcttgaaatccaggctccagagcccagggcagcgaggcgagttcagccccagggatggtttaacccccacagaggcagggcgttgaggaccttcctggcagggaaagtgggtgaacagaggtgagaaggaggccatgcaacaggggctgccccatgggcccgagggagccacagcgggttcttgaggaaggcagggggtaccccagatgccacgttttgggtgggtttggccggtctcacagagcgaagccgacgatttgtgcctgttgggtggcctggcctggaggcggggggtcttgacccatgtcatgcaagggctgcccgggagcccagggctctgatgaggcatgatgtcagcaccacctgccccttgtcccaactcactccaggtgcaacctgatgtggatggcctggagtccagcccgggggatgctcagcaatgggggtgcctgcagctctccctggagttcgactttggaagccaggaggtgaagggccccgctgcgcaggaccagcggttctgcgagtttccggaaagggtgacgggggaagggcagaccccatgccctgggtggtggggagctgacagggcaggggcccttggctgagcccaccccgctggctcccagatcagggtgggcctgaggcaggcagccgacctgaggcctgggggcaccgtggacccctatgcccgggtcagcgtctccacccaggccggacacagacatgagacaaaagtgcaccgaggcacgctctgccccgtgtttgacgagacctgctgcttccacgtgagtcagggatggtcggctgggtgggcctggacggctggatgggcctgggctgggtgggcctgggcagctgggtgggcctgggcagctgggtgggcctgagctagggcagcagggcctggctcacgccgctgcctcagatcccgcaggcggagctgccaggggccaccctgcaggtgcagcttttcaacttcaagcgcttctcggggcatgagcccctgggtgagctccgtctgccactgggcaccgtggatctgcagcatgttctggagcactggtacctgctgggcccgccggctgccactcaggtgaggtgctggtcaccaggccacagcccaaggcagagctggcagggaccctgccctatgggccatcggaaagacaggcctgatgggcagcattttcgggggtctgagccccaactcggccagaatcaccctcccgggctgaagcccctcttgctgcccacagcccgagcaggtcggggagctgtgcttctctctccggtacgtgcccagctcaggccggctgaccgtggtggtgctggaggctcgaggcctgcgtccaggacttgcagagccctacgtgaaggtccagctcatgctgaaccagaggaagtggaagaagagaaagacagccaccaaaaagggcacggcggccccctacttcaatgaggccttcaccttcctggtgcccttcagccaggtccagaatgtggacctggtgctggctgtctgggaccgcagcctgccgctccgaactgagcccgtaggcaaggtgcacctgggtgcccgggcctcggggcagcccctgcagcactgggcagacatgctggcccacgcccggcggcccattgcccagcggcaccccctgcggccagccagggaggtggaccgcatgctggccctgcagccccgccttcgcctgcgcctgcccttgccccactcctgaatgcaccacatgcctctgtctccccgctgagcccaggcacttgcccaggccgccctgcaggaccactgcaataaacgccttctcctgccactgtgtgtccggctggagcctggaggggatgcagaaatagggcccgggcccgctcaccagggtcccctgacaaggacgggggaggggctcctctccagactcagccaggccctgaggcctctgaccggtccctgcttgaccctcgggtaggggtggggaacctccccggggagcacagatctcccctctccgggccgcctgggaagaccggggaggtgggggccagagagtcgggaccacatgggatggggcgggctagagccagccctgtagggacagagtgggcaatggtgtctgggggctggtggcgccattctccttaggttgaaggatgtgttccaagtcgcccggcaaggggactgcagcagggcgttctgggcaggcgggaggggcccagaggcacgtgcggcgtgcccctcactcctggtcctgctccccaggcaggaagatagcatcac

SEQ ID NO: 468354 - DNA, 1102 bp, Homo sapiens
ataactacaatttaataagacatcctgctctctgcatcttgtcctatcaccctgactctcctacactctggccctaacaaccagttacttacccggtctcaatccccgaggaatgtcagtccaatattcgctcagtcctcaattcatgctgctatccaacattactcagtttagccccatattctatctcaccagctttcctggattggaaggcatcaaacactggattttcatcccctttttctttatgtacatggttgccatctcaggcaattgtttcattctgatcattattaagaccaaccctcgtctgcacacacccatgtactatctactatccttgctggccctcactgacctggggctgtgtgtgtccacgttgcccaccactatggggatcttctggtttaactcccagagtatctactttggagcgtgtcaaatccagatgttctgcatccactctttttccttcatggagtcctcagtgctcctcatgatgtcctttgaccgctttgtggccatctgccaccctctgaggtattcggtcattatcactggccagcaagtggtcagagcaggcctaattgtcatcttccggggacctgtggccactatccctattgtcctcctcctgaaggcttttccctactgtggatctgtggtcctctcccactcattttgcctgcaccaggaagtgatacagctggcctgcacagataccaccttcaataatctgtatggactgatggtggtagttttcactgtgatgctggacctggtgctcatcgcactgtcctatggactcatcctgcacacagtagcaggcctggcctcccaagaggagcagcgccgtgcctttcagacatgcaccgctcatctctgtgctgtgctagtattctttgtgcccatgatggggctgtccctggtgcaccgttttgggaagcatgccccacctgctattcatcttcttatggccaatgtctacctttttgtgcctcccatgcttaacccaatcatatacagcattaagaccaaggagatccaccgtgccattatcaaactcctaggtcttaaaaaggccagtaaatgagtcctgggg

SEQ ID NO: 468355 - DNA, 1240 bp, Homo sapiens
ggtccggtcttgctttgttagaggttggagaggaaagagaaaggaaaaacagcgggcccctctgcgtgatgtatgctgtggcccttgggggaaatacagtgatcctgcaggctgtgcgagtggagcccagcctccatgagcccatgtactacttcctgtccatgttgtccttcagtgatgtggccatatccatggccacactgcccactgtactccgaaccttctgcctcaatgcccgcaacatcacttttgatgcctgtctaattcagatgtttcttattcacttcttctccatgatggaatcaggtattctgctggccatgagttttgaccgctatgtggccatttgtgaccccttgcgctatgcaactgtgctcaccactgaagtcattgctgcaatgggtttaggtgcagctgctcgaagcttcatcacccttttccctcttccctttcttattaagaggctgcctatctgcagatccaatgttctttctcactcctactgcctgcacccagacatgatgaggcttgcctgtgctgatatcagtatcaacagcatctatggactctttgttcttgtatccacctttggcatggacctgttttttatcttcctctcctatgtgctcattctgcgttctgtcatggccactgcttcccgtgaggaacgcctcaaagctctcaacacatgtgtgtcacatatcctggctgtacttgcattttatgtgccaatgattggggtctccacagtgcaccgctttgggaagcatgtcccatgctacatacatgtcctcatgtcaaatgtgtacctatttgtgcctcctgtgctcaaccctctcatttatagcgccaagacaaaggaaatccgccgagccattttccgcattcctcctctggacatcagatgtgcctgctccatcttcaccttccacagtgattttaagtttcctgaggccttcccagaagccgagcctatgccagcatcatgcttcccgtaagcctgcagaaccattatttctttacagcaatgtgaaaatgaattaatacagcatagtaccccaaaggaatattggcctgctagtttcatcaggaatatattgtatctctgccaggttttgttatcaggatgacactggcctcatagaatgacttttgtcagatgtatgctttgcagatattttcttctgtgctaaacaaatctacaagaaaataaaaaccattaaaaagtgggcaaaagaca

SEQ ID NO: 468356 - DNA, 541 bp, Homo sapiens
ctgcaaggatctatctgcaaaagtgttccgagggcgggggttgctagcaaaagagctatggcagcagccactggcaagcattttggcaggacagctgagactgcactgcaagctggtaaggccaggtggagaccctgggagaggctggcagactggggctcattcagatcagacttgccctgtcccgtgggcaagagagctctgctctctccaggtaggatcctgaaggtctgtggcaagagtgggtcactacatgcctatgtttctcatcccgtccctaccagcactcagggccagaaaggagtcctggtgctcgactaccccatacaggctttccagcttctgcctgtttcagcatcctcctgtatccactctggatgccttctttccgaagatctgttcagtgtgtgttggtctcttgatgatctggtctcttcatgggagaagctcctcctggctgtggctagttaaccatcatggctctctccccaatcaaagaaaatttgtacttctattttttaggctcgttaggccttcctct

SEQ ID NO: 468357 - DNA, 1013 bp, Homo sapiens
gagctaccctgaggagaaaccctgatggggggctttgggactaacatctcaagtactaccagcttcactctaacaggcttccctgagatgaagggtctggagcactggctggctgcccttctgctgctgctttgtgctatttccttcctgggcaacatcctcatcctctttatcataaaggaagagcagagcttgcaccagccaatgtactacttcctgtctcttttttctgttaatgacctgggtgtgtccttttctacattgcccactgtactggctgctgtgtgttttcatgccccagagacaacttttgatgcctgcctggcccagacgttcttcatccacttttcctcctggacagagtttggcatcctactggccatgagttttgaccactatgtggccatctgtaacccgctgcgctatgccacagtgctcactgatgtccgtgtggcccacaatggcatatccattgtcatccgcagcttctgcatggtattcccacttcccttcctcctgaagagactgcctttctgtaaggccagtgtggtactggcccattcctactgtctgcatgcagacctgattcggctgccctgtggagacactaccatcaacagcatgtatggcctgttcattgtcatctctgcctttggtgtagattcactgctcatcctcctctcctatgtgctcattctacattctgtgctggccattgcctccaggggtgagaggcttaagacactcaacacatgtgtgtcacatatctatgcagtgctgatcttctatgtgcctatggtgggaactgaacaatgagatcacatggacacaggaaggggaatatcacactctggggactatggtggggtgggtgggggggagggatagcattgggagatatacctaacgctagatgacgagttagtgggtgcagcgcaccagcatggcacatgtatacatatgtaactaacctgcacaacgtgcacatgtaccctaaaacttaaagtataatt

SEQ ID NO: 468358 - DNA, 858 bp, Homo sapiens
tcgatcggcttccctgcctgcttccttcagatgttcatcatgaacagtttcctccccatggagtcctgcacattcatggtcaaggactatgatcattatgtggccatctgccacccactgcagtacctgtccatcatcactcatcaatttgtggccaaagctagtgtcttcattgtggtgcagaatgctttgctgctttcacctgttcctattctctctgcccagctccattactgtaggaaaaatgtgattgagaactgcatctgtgccaacctgtctgtgtccaggctctcctgtgataatttcacccttaacagactctaccaatttgtggctggttggaccttcctgggctcggatttcatcctcatcttcctctcctacaccttcattctaagagctgtgcttagattcaaggtggagggggtggcagtgaaggccctgagcacatgtggctcccactttatcctcatcctcttcttcagcacctgctggttgtggtgttgacaaatgtggccagaaagaaggtccccatggacatcctgatcctgtttaatgtccttcatccctttagtcctcctgcattaaaccctatcatatgtggatttcaaactaaagagttaaagaaggaattttagaagttgctgcagaggggcctttgaaaacacggaagggactctccatagaagcacctattactgtttctatttcagaagctgtgattccagaaaataaactaatgcttaaatactgagtatttcctacccatttctctctctccagtatcaggaattagtgagggctccttagtacctgacataaattcatttgcctagctcatgtaactaacattcttag

SEQ ID NO: 468359 - DNA, 1041 bp, Homo sapiens
ctcatgattcagcctatggcgtcacccagcaacagctccactgtcccagtctctgaattcctcctcacctgcttccccaacttccagagttggcagcactggctctccctgcccctcagccttctcttcctcctggccatgggagctaacaccaccctcctgatcaccatccagctggaggcctctctgcaccagcccctgtactacctgctcagcctcctctccctgctggacatcgtgctctgcctcaccgtcatccccaaggtcctggccatcttctggtatgatcttaggtcgatcagcttccctgcctgcttcctccagatgttcatcatgaacagtttcctccccatggagtcctgcacgtttatggtcatggcctatgaccgttatgtggccatctgccacccactgcggtacccatccatcatcactaatcaatttgtggccaaagctagtgtcttcattgtggtgcggaatgcgcttcttactgcacccattcctatcctcacttccctgctccattactgtggggaaaatgtcattgagaactgcatctgtgccaacttgtctgtgtccaggctctcctgtgataatttcacccttaacagaatctaccaatttgtggctggttggaccttgctgggctcagatttattcctcatcttcctctcttacaccttcattctaagagctgtgcttagattcaaagcagagggggcggcagtgaaggccctgagcacatgtggctcccacttcatcctcattcttttcttcagcaccatactgctggttgtggtgttgacaaacgtggccagaaagaaggtccccatggacatcctgatcctgctgaacgtccttcatcaccttattcctcctgcgttgaaccctattgtgtatggggttcggaccaaagagataaaacagggaattcagaagttactgcagagagggaggtgaatatgtaaagcatttctaatacctcctgttcttcctcttcagtgattttacctaggcagcgaagtagagaaatgtcagtta

SEQ ID NO: 468360 - DNA, 1451 bp, Homo sapiens
ccctctccactgaagcttcagacttcctcttgaattgttttgtcagatcccccagctggcagcactggctgggccaacaccaccctcctgatgaccatctggctggaggcctctctgcaccagcccctgtactacctgctcagcctcctctccctgctggacatcgtgctctgcctcactgtcatccccaaggtcctgaccatcttctggtttgacctcaggcccatcagcttccctgcctgcttcctccagatgtacatcatgaattgtttcctagccatggagtcttgcacattcatggtcatggcctatgatcgttatgtagccatctgccacccactgagatatccatcaatcatcactgatcactttgtagtcaaggctgccatgtttattttgaccagaaatgtgcttatgactctgcccatccccatcctttcagcacaactccgttattgtggaagaaatgtcattgagaactgcatctgtgccaatatgtctgtttccagactctcctgcgatgatgtcaccatcaatcacctttaccaatttgctggaggctggactctgctaggatctgacctcatccttatcttcctctcctacaccttcattctgcgagctgtgctgagactcaaggcagagggtgccgtggcaaaggccctaagcacatgtggctcccacttcatgctcatcctcttcttcagcaccatccttctggtttttgtcctcacacatgtggctaagaagaaagtctcccctgatgtgccagtcttgctcaatgttctccaccatgtcattcctgcagcccttaaccccatcatttacggggtgagaacccaagaaattaagcagggaatgcagaggttgttgaagaaagggtgctaacaaggaccactggatctctgaatatctaaaataagataatttattaatcacttaatgaaaatattcttggccctctctcgttttattccatgcttataatcatattttgtccaaaacactgacattccttaaagcagattttaaagtgaaaaatgtatgtttctgaacacacaactcaatatgtcatgaattttgtatcattaaaaatacaactgcggttattttgttgtgtctgttatgtgtaatgtccttttattcttattttcagaaaagggaatacattggagaaaaaaacacagtagttgaaatttcagtcctcagtggtggaaagttgctactggtctacaagtaaatttttgtaatgtgcattgcaagagggcaagggttttgccttgattcctcatgagtaacaattatcaatgagttttactggatatatgagattcttgaatcctcctccccaatgtgtctgtgcttagaacatttatctttcagatccaatatatcacaggttttgatatgcaaacaaatctttattaatgagtcaaaagattgctggtatt

SEQ ID NO: 468361 - DNA, 1345 bp, Homo sapiens
cggctttgcatgtggcccaacacaaatttacaacccaaggcacttcctctgcctgaggtgctgaccttgcctctttccctgacagtaagaacgagtctgaaaaacaaattgagaatctgacttccaatcaataatctttctccatgaccacagttggggacttctgcccacacttatagctacaggaaactggacaagaataagtgagtttatcctcatgagcttctcttccctgcctactgaaatacagtcattactctttctgacatttctaaccatctacctggtcaccctgatgggaaactgcctcatcattctggttaccctagctgaccccatgctacacagccccatgtacttcttcctcagaaacttatctttcctggagattggcttcaacctagtcattgtgcccaaaatgctggggaccctgcttgcccaggacacaaccatctccttccttggctgtgccactcagatgtatttcttcttcttctttggagtggctgaatgcttcctcctggctaccatggcatatgaccgctatgtggccatctgcagtcccttgcactacccagtcatcatgaaccaaaggactcgtgccaaactggctgctacctcctggttcccaggctttcctgtagctactgtgcagaccacatggctcttcagttttccattctgtggcaccaacaaggtgaaccacttcttctgtgacagcccacctgtgctgaggctggtctgtgcagacacagcactctttgagatctacgccatcgtcggaaccattctggtggtcatgatcccctgcttgctgatcttgtgttcctatactcacattgctgctgccatcctcaagatcccatcagctaaagggaagaataaagccttttctacatgttcctcacacctccttgttgtctctcttttctatatatcattaagcctcacctacttccggcctaaatcaaataattcacctgagggcaagaagctgctatcattgtcctacactgttatgactcccatgttgaaccccattatctacagcctgagaaataacgaggtgaagaatgccctcagcaggacggtctctaaggccctagccctcagaaactgtatcccatagaccttaggaaaagataggtctagcattatatcaataattataatggttaacattcatggaacatgtacagtatagcagacaacatgctaagtgcttcagattttattcctccatatgtttatagtcatcacaaagaatttcagggtcccaattttgaagcttcgttattaatgcaatgatgaaatcttttgtttccttttcatgggatttcatatt

SEQ ID NO: 468362 - DNA, 2981 bp, Homo sapiens
ccgcctgaaaactgctttgcaggtgcaacagctgctctcactggtgctccaggttatcagtatctgtctctccacttctccctagcaaagttcaagaaatattagtaagaggcctgaatatttggacaagatggcagattcatcatcatcttctttctttcctgattttgggctgctattgtatttggaggagctaaacaaagaggaattaaatacattcaagttattcctaaaggagaccatggaacctgagcatggcctgacaccctggaatgaagtgaagaaggccaggcgggaggacctggccaatttgatgaagaaatattatccaggagagaaagcctggagtgtgtctctcaaaatctttggcaagatgaacctgaaggatctgtgtgagagagcgaaagaagagatcaacttcatagttaacacaggggtccccaactcctgggccacagacccctactggtcggcggcccctcgggaatcaggtcgcatagcaggaggtgatggaacagaatacagaaatagaataaaggaaaaattttgcatcacttgggacaagaagtctttggctggaaagcctgaagatttccatcatggaattgcagagaaagatagaaaactgttggaacacttgttcgatgtggatgtcaaaaccggtgcacagccacagatcgtggtgcttcagggagctgctggagttgggaaaacaaccttggtgagaaaggcaatgttagattgggcagagggcagtctctaccagcagaggtttaagtatgttttttatctcaatgggagagaaattaaccagctgaaagagagaagctttgctcaattgatatcaaaggactggcccagcacagaaggccccattgaagaaatcatgtaccagccaagtagcctcttgtttattattgacagtttcgatgaactgaactttgcctttgaagaacctgagtttgcactgtgcgaagactggacccaagaacacccagtgtccttcctcatgagtagtttgctgaggaaagtgatgctccctgaggcatccttattggtgacaacaagactcacaacttctaagagactaaagcagttgttgaagaatcaccattatgtagagctactaggaatgtctgaggatgcaagagaggagtatatttaccagttttttgaagataagaggtgggccatgaaagtattcagttcactaaaaagcaatgagatgctgtttagcatgtgccaagtccccctagtgtgctgggccgcttgtacttgtctgaagcagcaaatggagaagggtggtgatgtcacattgacctgccaaacaaccacagctctgtttacctgctatatttctagcttgttcacaccagtagatggaggctctcctagtctacccaaccaagcccagctgagaagactgtgccaagtcgctgccaaaggaatatggactatgacttacgtgttttacagagaaaatctcagaaggcttgggttaactcaatctgatgtctctagttttatggacagcaatattattcagaaggacgcagagtatgaaaactgctatgtgttcacccaccttcatgttcaggagttttttgcagctatgttctatatgttgaaaggcagttgggaagctgggaacccttcctgccagccttttgaagatttgaagtcattacttcaaagcacaagttataaagacccccatttgacacagatgaagtgctttttgtttggccttttgaatgaagatcgagtaaaacaactggagaggacttttaactaccctgattttgatgacgagaaacaattcttgagtgactcaagttgcttagaaagctgtggtctcacagaggctggctgtgagtatctttctttggctctcatcagcaataaaagactgacacatttgtgcttggcagacaatgtcttgggtgatggtggagtaaagcttatgagtgatgccctgcaacatgcacaatgtactctgaagagccttgtgttgtgcaaagaggcatttgatgaggaagcccagaagctgctggaagctgtgggagttagcaatccacacttaatcattaagccagattgtaactatcataatgaagaagatgtgtcttggtggtggtgtttctgatttgaagaaactgacattcctttaaaaatataaatataaatacatacatacatagatatatacccagacttgggtgcttagcttcagatactctatgcccagagatagtgcacttggcagctgtcagataccattcatctacttctctgtaaaatgtctgttctacttcacacagtggtcgagaggctaaaataaaatgaaaagcataaaactctctgaaaagtatgtttttaattggatacagagcttaagaatgcaggtaagggaagcctggatatgaggctggaggatgcagacagggaagatcagttaaaatgccttgttttttccttacttccactgacatggcttagttcacagccctgctatctctggcacgttttattaaaatgtgtctccatatgtgttcttgggatcaccagtgtcaagatcacttgggtatccgtcttaaaatggagattcctgaaccccacactagacttaccaaatcagaatgtctgctaccagctagcaaccagcatttttgagaatttcccaggcaaattcttaagtatactaatagttgagagtcactagtttcaatagaaatgggagtctacttctacaatgaatactttctatagcttattgtaaagataaggaggattaatttcctttaagggaatataaggttatttgggctagagctagaaacagattctttcatttggcaagagcgtgacacaataaattttgtgtgtgtgtgtgaaagactgttctggttatttattgatcgtgtaacaaactatcccaaaacttggtggcttaaaacaataatgattttattaaatctcat

SEQ ID NO: 468363 - DNA, 910 bp, Homo sapiens
agggcctctaacctaggctctggactccatttagctctgctctctctctatgcagcatggggctgtgcaacgtaatctttgaggttcatccctctcccacattcttggaaactatttctgtctatccaagcactcaatgcacctgcaacccagaacgcagaggccttggaggaaagcagcaagcctgctggaaggggctctcgtgccaggccagggagatagacctttaccctggaggcaaccaggaaatgtcaaaactttccatcatgaccataaaggagaccagtcttaagacgaagatggcaccaaggaaggcggaatggaggaatggaaaaatctatgtcctcaatggcttcattaaactgctggtgctgtccccgaacaatgcgggcccttatcagctggggcagcagccctggcccgctcgctccggctccctccgcccagaggagcacgcagcctctcggtaattgatacacggcgcagctttgtctgaggctgtttgctctgctggtatttaaggcagcgcgggccccctgattgattgccattggccaagtttctgctgtcagtgaaggaccagccaatggcagcggttaacactcttgatggcccagtcttctgggcgccacgagaggcccaacatgcaggaacaaggcccgcttcggactgaggactgcactcagagatgacatgttcatgcttcttcctgtttctggtgtatatatatttatatatatataaatatatatattatatataatattatatatataatattatatataatatatattatataatatatatattatatatattatatattatatattatatataatatatataaaaatatataatatatataatataatatttatatatctatatatttatttgtgattaa

SEQ ID NO: 468364 - DNA, 2402 bp, Homo sapiens
tttgggagcctaaagaatgcaacacttcactgtgacagccaacagaacctgggaggaggccaccctacactggctgcttgctgccaatgagagaccagggaaggggcttccaggggaccccgtggagcccaggaagcacaggagacctgaagacaagacgtctcctgggcttcgtgttcgcttcatctctacaagcactgaaatcactttacaaaagcattttaagcgaggccgcatctgcggctgtcttgcatttcttgtggctgccttcttcagtccctgctataatcagctcaactctgtgcttgctggatcctggacctcctcctccaaacatgcatcaggtcctgtcctggcccagagaatgggactagagacgccgtgcagaccctgtctccgtccaggcttctgctggttcctctccgaactagatcctgtggcatcttcacaccataaccagggcattgatacaggggccatagaagtctccctgccctttgggaccaaaacctccctgtaggcaaaatcctgaagccaggctattctttaggaaagctcagtcagcacaaaaagttgtctccatccccaggagcaattgcaaggctggaggagtcagcattcccatgtgactgaagggtggggcgggtggggtggaagatggagagcaactgaccccctcactggaccctgaggaagatgcccttgcagggaggtggcagctgatatttcctggtccaaacactggcttccacttagttactagaatcaaagtctttttgcaagctggactttgagctataatagtggatgggatccattttaactaaaaccccctttcagagtcatgatgtaacagcagcaacagttacagagcacttatacatgccagacaccattctaagcacgttacgtgtatcagttctttccattcttaccacggcctgtgaagttgataccattattatctctacagagaaatgaattaaggcacagagagattaagaaccaaggtcttaatgtccaaggtcttgtgtccaaggtcacacagctaagaagtagcagaacgtaaactggaacctggccagtgtgctcaagtatcactgttgtactatatgcctctcaagatgttcgtgtttttgctcccctactctttaggcctaagctaccgtgaagtttgatcccagagtttcaaaaggccgagcaactcacaaacacctctgtctccagcaggagcctagagtgataattttgacaagtttgggcttgaggtttcagaagggagtggaattattttgcatgttgacgaatttggtcgagactcaagcactatatcagggaaagctgcattctgaaggactttgcgtgataaaagatttagggggccacaggaagaaacccttttattctaaatgcactgggaagccattgagggctcgacgtctgattatgtgtttaaaggatccgtttgtcttctgtgtaaatgaattatgcaaagtggaacaaaagtggaaccagggagattagttagaggacattgaataagatggtggcagagaagatggagagaaatggattgatatgaaatatgttttggaaatcaaattgataggattcagtgatggattagaggtgatggttgaagaagaatggtgcagaagctgcacccacagccagctccagtgagctcccacctctgatgacacgttcctggggttgggggctccctacctcccaaggcagatgaattccactctggaaacacctaagtgtgagaaaattcttcctatcatctgacacctgctgctcactggcccttctggagctctttaaaggcctctccagctgccacatccagccccttgggtttgaagttcatctgggtctttttccaaaattgaagtcagacctccaagtgtggcccgtcacccccagtcctcggaacactgtgcgtctgtcactgcagtccattgtgttcctgttaacagggattcgtggacaatctagtttgagtttaccaggacaggctttaatgacaatgtgtccctgaagcatggttattttcctatcagtgtccttgtggtggactttcagtgactgctaaagaggctttttgcagtgtgttgcctgtggggagcaacagagagtgtgttgagtcagcgctctggggttgggtctgagtcacagagccctgagattatccaggaagacacactcattttccttaagtatcggtcttgctaattatccactgagatatatggggagggaagaaggcacaaaccgaattacaggcctgcttgccagaggatgccttagtggcttagctcctgctggggtggcggtgggaaacaggagaggtttggcaacctcacacaggacctgtcctggaccctccaaacagg

SEQ ID NO: 468365 - DNA, 874 bp, Homo sapiens
tcctatatcagccggaaatgctctagcagacaagacaaattcccgtcatgcatataattacccattttggattcccaacatccatccagtccaataacgggccctcctttagcagccaaattacccaagacttctctacatccttgggaataaaatgggttctccacacaccctacaggcttcaatcttcaggtaatgttgaaaaagtcaactctgtctttaaagccaaactcaccaagctggctctagaaacccaccaatcatggacaggaaatcttcctttcacccttatgagactctgtgcaacacaaaatgcaccctctatttatagtccctttgaaatcatgtatggccaaacttttgtcttagggcctccacccttaccaaactctgaaccagtcagtaattacctccctgtcttaatccagacatggtctttcattcatgaagcagcaaatgaggccatgcctctccctatagtcatctctttgtcctctatacataactgtcttgcaggcacagacatgtttatctgccaacccgaccctcatgaaaagctacaaccaaagtgggcaggcccctacactttgatactctgcatgcccaatgcagtgagagtccaaggactcccccactggatccatcacaccagggtcaatctcacccccaaggctacttcttcctccaaaacattaatagctgagttgtcatctaggccaatttctcctaccaagcttaaattaacaaaaaattttttttcttagaaccaaaacacaaggcagactaatcacctgctttcagaaatggcctgtatctgcccaaccgtttgctgtacctgacttccaaccaaaagtcttagtacaggaatatccct

SEQ ID NO: 468366 - DNA, 2115 bp, Homo sapiens
tagtttacagctcctcatgccatagagactttgctgcaaggtgcttctggcaaatggatatccagaattcaccacacctatccatgactgccaggaactgttagagacaacagaaactggctgacctgatctccaagatgtgcctttaaaggaggtggatgccaccatgtttacagacggtagcagcttccttgagcagggagttcaaaagactggtgcggccatcactatggagactgatattctgtgggcccaagctctaccagtggtcacttcagctcagagagctgagttggttgccttcacacaggctctccgatggggcaaggacaaacatattaacatttacactgacagtaggtatgcttttgctactgtgcatgtgcacagagccatctatcaagagcatgggctacttaccttagcaggaaagactatcaaaaacaaagaagaaattctagccctgcttgaagccacagggattcctcagcaggtggctgtaattcactgcaaaggacatcaaagggaagacatggccattgcccgtggtaatcagagggcagattctgcagcccaggaggcagcacggcttccagtcgcacctctaatcttactgcctgcagtgtcttttccacagtctaacctacaagatcatccaatatactcagcagaggaagtaaaactggtttcggatccccaggccagtaaaaatcaggaaagttggtggattcttcctgactcaagaatcttcataccccaaactcttggagaaattttaattggtcgcctgcattctaccacccatttgggaggagtaaaactgacccagctcctaagaagctgtttcaagatcccccaccttcagaacttagcgaaccaagcatctctccagtgcaaggcttgtgctcaggtaaacgccaagcaaggtcctaaaccgagctcaagcaaccgcctctggggagacttgccaggagaaagtgaaatcatccctccacatgggctgcctgctgccatagggtctgataatggaccggccttcacctcatccatagctcaatcagtcaataaggcattaaacattcaacggaagttccattgtgcctatcgaccccagagctctgggcagaatgaaatgagaggggtatttaaaatatttgaacaaataatggtggaaaatttcccaaatttagcaaaagttaaactacacattcaagaatctgagctaacatcaaataagataatttcaaataaatccatggtggaggcaaatcataaataaatttttgaaaactaaagacaaaacaaaatcttcagagtagcccgagataaacaacacattccctacaaaaaaagaattgcggatttctcatctgaattcatggtggccagaaggaggtaggacattttctcaagtactgaaagaaaaaaactataaaaaaatctctgtcttttgaaactatattcatcaacaaagggaaatgaaaagcttatcagacagaaaaactaagagaaaatgttgctagcaaatctaagtttaaaaagattgctagagaaacttctctaactagaaagaatataacacaagaaggcttagaacacaggaaagaaaatattggaagttggcaaaaacagtcataaatgtaatagaatctgtttctcaggagtttttgaaatcatatttgatgtttggaaaaaaatgctctgtatttagaggaaatacttaacataattctatttaaaaatgggggatggtaaagggatctaagtagaatgaaagtttctacatttcacttgaaatggtaaaatgctgactaatagactgtgagaagttacatatgtacactttaatatctagaactaccactaagaaaatgataaaaagtagtgtgcttagaaacactataaataaaccaagatggaatctaaaaaatgtaaaatataaccaataagaaaatggtaatagattaatgaaaaactgagaaaacaaaacaaataaaatagcagcctaacatagcaatatttatcttaaatgtaaataatcaaagtacatgaatttaaatgcaaattgacagagtggaaagaacaagaaacatgatgctaaaatttgttatttat

SEQ ID NO: 468367 - DNA, 702 bp, Homo sapiens
tgcaacacgatgcacttccacagaggtctcctgctccgccaagccgcagggacccgtcgccaggcaacagtggctttcattgtgaagcgagcagtagctctctgcttgcgcctgacgccctgtgactggcgcatgcgcattcgcgaggcaggctcgggcgcctggctgaccttaatactctcgaccatagctcctcctcgggcatactccgtggtcgggtcccactggaggaggaggcgcttggactgtgagttgggcgctggatactgctcttctgattcctttcgggaaaaaggctgtgtgcaggcatcgggtctcatgggtctcgggatacagtctgcacgtctgtgtgggaaaggcaagaatcatgacaaagtcaagtccaaggtgaagcagaggtctcacacctggaactctcatcccacgggagcagatgaggttgagagggcggcttagaggccgtcaacaacctatcttctctgaagcctagtacctgaaggcttcctctacaaataagaactttggtctcacaattctttatgttaatgcagacattcctttttgtttattccaggtctttaaataaactcaaccaatcgtcattttgaaaatctttaaatctacctataagctggaagcccctgcttcaagttatatcacttttctggaccaaacaaatgatttcttgaaggaatttgattg

SEQ ID NO: 468368 - DNA, 525 bp, Homo sapiens
tcctagaaaagaaccaagtaacgtgttgaaatgggatgcggaacaagtgccaagctggtgcctggacctgctccctggtctcactgcagctgctctccaatccagattcagagaaccagcagacatggcgggtcaactttctagtcccggagcaggaggagatggatctggcagaggctgggaagggcagcgggggtagtgctatagcgctgctacaggcggggctggctgatgctggcagagcccaaattcagagatccaaccaggcccttggtggtgggcacgtggcactgtgggtgggtaccagcttgctgagatggctgctggtgagtagggggactcagcctggagcccccagcccccatactgcctgttggttacactgtggctgctgctgccaccactggcatacgttcagatggttccctgagttccacatcagggattcagacaaaaggagcttgcaactgaaagggtgagtcttataacaaaattatcagcctgctgtcaaccaggcgctctgcc

SEQ ID NO: 468369 - DNA, 635 bp, Homo sapiens
ctccatctgctccgccctctcgtatgctgcagctgggccagcatttggctctcacagcccagagtcatcatgaggacctaagacacagagatggagccctggggcaggttgtggggaagctgaaatcagaaaatcttaagtccaagatcttcagagacctgctttctgccaagagggttggggcccaggcccaggagcttcaaggagtacagcgtggaccgagagccattttcccccgcaccaagtttcaaatcaacaccccgcctcgaaaggagccagcaatagaaggaaccagtggagttggggccaaaaaaaaattccaaaaatatgcctatggattgagggctccaggtctaattggggacccgataaatggaaatgaaacaacatccctattgctcattttacctactgtcaccaaggtcagcagtgaggacgtaagcactgaatcccacagtgctctctcagctcccacctgtctgcagcccacagcccttatcccacagccttccttcgttcaaagctccacttctttgaatggcagacactatcctaaatgagtccccatactgctgtgaccattcttgtgtctcctcagatggctcctgtttattctcccaacacggaagtgtggg

SEQ ID NO: 468370 - DNA, 3303 bp, Homo sapiens
accccctctccatctccaccactatgggcctgggccaagtcaccatcatctcccccatggacaactgcagtagcctcctacctggtcttccttgcatctttcccccctctacaaagtattttaaacacagaagccagaaggtagttcatgcctctgctcagggctctcaggtggccttcacaacatttagagtggcgtttgaaaactttagtgtggatcagaatcacctaaaggtcttgttaaaacagatctctggccccacttccagagtttctaattcagtagcccccagagagcatcatggcatactcttcacctccttcaattctttgctcaacagactcctggtccatgaggacttccctagcatcttctttaaaactgtgtacagtacctgatcccttcctagcatccttcctcccatcccacgatcagttttttccatagcactatcaccaactgacatgctactctatttgacttatttgcttatccattttttatcgactcacccaccggctggtacaacaccagagccctgacaggacaggaagctcctctgttatcttccagtgctttgttgaataagagtgatgaaagtggaaataagaaaggaaaaatattcagctttctaccatgactaagatgttagctgtagactttttgtggatgttctttatgaggttgaggaagttccctccattcctagtatactaaaagtttttattgtaaatggatgttgaattttgtcaattgctttttttacatcaaatgatataatcatatgatttttcttctctagattgttgatagggtggattacactgattttcaagtattgaaacaggattgcataccttgaataaatttcatttggttgtagtgtattattctttttatacattgcaggatttgatttgctagaattttgttgagaatttttgcatttatgttcaagggatattagtgtatagatttattttttgtgtgccatctttggttttgatatcaagtcttactagagttttatcaattttattgattattttgaagaactggctttttgtttctgtctactctatttcattctatttctattgttttcttgtttaaaattttatttttgctcttgtcttttattttggtaaaatatacataacataaaatatctcattttaagcacttttaagtgtgcagttgatttttaagtgtacagtgacagtccagtaagtgttcagtgaatgtacagagtatacagtgagtgtacagtgagtgtacagtgagtgtacagagagtgtacagtgagtgtacagagagggtccagtgagtgtccagtgtccagtgagtgtccaatgactgtccagtgagtgtacagtgtccagtgagtgtccagtgagtgtacagagagtgtccagtgagtgtccagggagtgtccagtgagtgtacagtgtccagtaagtgtccagtgtccagtgagtgtccagtgagtgtacagagagtgtccagtgtctagtgactgtccagtgagtgtacagtgtccagtgagtttccagtgagtgtacagagtatacagtgagtgtccagtgagtgtatattgagtgtacagtgtccagtgagtgtccagtgagtgtacagagagggtccagtgagtgtccagggagtgtccagtgagtgtacagtgtccagtgagtgtccagtgagtgtccagtgagtgtacagtgtccagtgagtgtccagtgactgtccagtgagtgtacagtgtccagtgactgtccattgagtgtccagagtatacagtgagtgtccagtgagtgtagagtgtccagtgagtgtagagagtgtccagtgagtgtccagggagtgtccagtgagtgtacagtgtccagggagtgtccagtgactgtacagtgagtgtacagtgtccagtgagtgtccagtgagtgtacagagattatacagtgagtgtacagagtgtaaagtgagtgtccagtgagtgtacagagaatgtccagtgagtgtacagtgtccagtgagtgtacagagtgtccagtgagtgtccagtgagtgtacagagtgtacagtgtccagtgagtgttcagagtgtccagtgagtttacagagtgtacggcgagtgtccagcgagtgtccagtgagtgtacagtgtccagtgagtgtacagagtgtacaatgagtgtccagagtgtccagtgagtgtccagtgagcatacagagagtatacagtgagtgtccagtgagtgtacagagtatacagtgtccagtgagtgtacagtgtccagtgagtgtccagtgagtgtccagagagtgtaaagtgagtgtccaatgagtgtccacagagtgtccagagagtgtccagtgagtgtccagagagtatacagtgggtgtccagtgagtgtacagtgtacaatgagtatctagtgagtgtccagtgtccagtgagtgtatagtgagtgttcagtgagtgtccagtgagtgtccagtgtccagtgagtgtacagaaagtatacagtgaatgtccagtgagtgtatagtgagtgtccagtgtccagtgagtgtccagtgagtgtacagagagcatacagtgagtacccagtgagtgtacagtgagcatacagagtgtacagtgagtgtacagtgtccagggagtgtccagtgagtatccagtgagtgtacagtgtccagggagtgtccagggagtgtccagtgagtgtctagtgagcgtacagagagtgtccagtgagtgtccagtgagtgtacagagagtatacaatgaaaaatcatctgtcattctaattggtgggtttttatagataatgtgtcatttctctctggctgtttttaagatttttttctttgccattagatttcagaagtttaattatgatgtttcttgatatggatttcttttggtttattctatttggagttcacctagcctttggatctataaatttttgtcttttgccaatttggaaagttttcaaccattacttattctgagactccaatgatatgaatgttaggtatttgttacataaatccttaagaccatgcctttcttccgtctattttctctctattgttcagattgaataaattctattgatttgtcaagttcatagattctatgctctgtcatctccactctgttgattctatctggcatgtgtttttcatttaagttattgtatttttggggtctacgatttctgtttggctctttttttaaataacttctgttgctttgctaagatttttctatcttttcattgtttcaaaaaaatc

SEQ ID NO: 468371 - DNA, 1330 bp, Homo sapiens
agattgccttgcctctctgagcctctgcttctttctttgtaaaagaagtcggttcccagttccagtgtgagtctcctacatactatgattctcaaaggtttcaaagggcatccggagatgggggccctccccctggctctgaggacagcaggtaggtgtgtggagcctctgtgtgtaggtgtgcgtatgaattcgtttgtcccctgggagcagctggagactaagtttccctgcaataaaagtgagttagttgcttctttcctgataaccataatccattccacttcttccaaggaaatgacaggcccccaggtgatgcatccccatgactgggagaaattggctattttagtcctcttcgaacatggagcaagttcttggagctgtcctgcggcagcctgccaggcctttctgctattaagaacaccctattctagtttattccctggtttctgggctccccacaatgatctatatgagtttcagagctcaggagacaccctgcactgctctgcctgcaagctgggccattcttggaggtgggatataccagagcttttcaaacgtctccacccagcaaagttccctctggcagaggagcctgagagtgtcctccagggaggctgggggcagcgcctgaagcagccccaccacagcacatctctttgaagtcttatgttttatctcaggaattcacgtgaattctgcattctattccataatacatatgtttgttttaatataaaaatgttttaaccccaaatcttcaaataaaatcaatgccccaggaagatataacttgtttattctatacctttaaactgcctagtttgccactgcatgcccccaggggtacaagtactctagttagagaagcagttgcaataagggcgacaaccaaaaaagtgtaagtcttcacaacttcccctccccagtcttctggaaaagatctaagtctacctgcttagttgtcatgtctgttgttctggacactagaagaatggggagagatgaagaactgaggaagatgcagaggcaatactgatccacaatgtctggaagcttcaaaatgcttgttgaatgaatatttttccttcctgctttagctcagtctcatcatcgagaatcaagtcctaatcaggcagtctttgtctcagttcctaaccctactccagcaggttatgaaggttaacagcatgaacatctttattatttatctgtatattatttgtaccagcctcggagaatgaaaggtaccttccttctgagataggttgttcttagccgatgtgaccctgagaaatttgggagaaaacaacagttttgtttc

SEQ ID NO: 468372 - DNA, 736 bp, Homo sapiens
agctcttttgcaggcgaatagaagtgtgcagtatttggagtattgctttagctctgagaacaatgtggctaagtcaccagggagctgacttagacctccttccctttcttcctttgattttcccctcctctttctcaagcgctaaacagagacttagtccaaagagaaccaacccatgcttgatgataaaaggaacaatgggatttctgggtcatcctctgggcccacagacaggagggctgcagtccaggatgccagacaaaccaggttattttggagcaagccagcagcagaactgtaggctgagaacaaaggatttggcccatgtccatatccctgcaggggtcacgtaccagctgaacacatcagcctttagttatgttcccattttaggaaaaccagaaatagggaatctcaacataatttcccactctgaaaaccacagttggtgggagaaacatggttcctggtcatggctgatagatagggtgtttccatataaaccagtggcccaaatccaggtcctcatgctattagaacattccagcatcgcagcaactgtcctcagtcagaccacaggctcatgtattttcaaccaggcaacttggactgaaagaagctttcaatggagcccaacaaaatcatcacagccttagactggatctagatgatgcccaagaataaaaagtaaaggcaatgttctgaatattttaaacttttacacttttaaaatgtc

SEQ ID NO: 468373 - DNA, 621 bp, Homo sapiens
aatctatattaagctcccaggggatgccaatgctgccggtccaggaaccaggtctgcgcacaactagagatggaagaatcagcaccacactgatgcaagggactcattatgcagcctcagtgtgtccaactcgaaaggcactgtctgaacagggaatgcagctgtggcgagctgctcggggatctgcattcctagcctggctcttcaatgtacatccacctccccaactaagagaaaaacatggaccatttgctgtcgcagaaatagtcctggtcagggagttgaatgacttgagtcttctggacactcacagcttctgccagccatgggtcacttgtctctacacaagaatagccagcaaattctctgtccaccttatgaggttgctagaaagctcaaacaggataacatgggaaagaactttagaaggtagaagaagccattcaaaagctaatacaaaggactgtaaataaaatcattattagggtattacaatactcagcgaaacctgtggaccttatactgctccatgagctgttcagctgcctctctgataagagtatatgtaagctgacataggcaggcttaaagtggtcatctttgtgaaaaactaagaaaagc

SEQ ID NO: 468374 - DNA, 2310 bp, Homo sapiens
aaagatgattgaggggtgcctgctttatcccagactagggtataatggcttcaacaggaccaatctggcacctgccttgggttcattcgggggatgtgccttctgtgtcttgtcttcctccctcctcattcacacacctcttggcattatggtatgaagagagcacagggttaggaaatagagaactcacctcacctgccattgatgtggaacaaggcaaggaagatgcagctttgaggcagcaaccaattgatcatttgacaaaatttactgagcacttacatgtgctggaagctgtgctgggagctgtgctgaaccccacagggctgaagacaccatgggctctggtctccagaggtttgcagattgagaaagttcagggcatagaactgagtgaacggcaagctgggctcaatgtctgccaacccccaaggcctggcaccataggacacagaagtgtaaaagtttgaggttttatacttaggtctattatccttttgagttgatttttgtatgtggtgcacagaatggatcaaaatatgtagttttgcatgtgaatatacaattgttctaataccattaattgaaaagatttaaacttcttcccctggattgcttttataagcttgtcaaaacttagctatctctatatatgtttgtgtctatttctggcctctaatcagttacattgatctttacacaaatacctcactattctgattactacaactttacaactcttgaaaacagataatgctaatcctctaactttgctcttctttttcaaagttttgctgtctatttcaggttctttgcatttctagaaatattttagaattagtttaaaactttctactaaaaagcatgctgagatgttaaatgggatggcattgaatctattgatgaatttgcaaggaattgacattttacttttaacaattttgagtcttccaattcatgaacatagtatgtatatttccatttatttgggtgtttaaaaatgtctttaagcaatattttagggtctttggtgtacatgtctttcacaacttttgcagatcttgccttaaatattttatattttctgatgttctcataaataatattgttttctcaatttttgtttttgatttattgttagtatagtgttagtatattaaaatttaatttttgtatatttatcttgtgtctttcaaccttgataaactcatttgttagttctagtggcttttcatagatttcattggaatttctacataaaccatcatgctggctgtacatgaagaaagtttttctcctttttcaatcttggttccttttattttattttattttttcctattcttattacactggctagaacttcagcacaatgttgaatggaagagaacatccttttgctattcttggtcttggtgatgggtatgtgtgaagcattaatcttttttatagatgtcctttatcaggttgaggaagctgcttctattcttattttgctgtgaatttttgtcctgaatgaatgttggattttgttacattctttatttgcatctatttagatgatacagcttttcttcaaaatgcgtttctatggtgaattacattaaaaaacatattacattttagatgttaaaccaactttgaattcctggattaaattccacttagtcgtaattattatcttttaaatatattgttgaattcagctttccaaaaatttgtttaaaatttgtttaatttgtgatattgatctgaagctttcttttcttgtaatatctttgtctgattttggtaactgggtaacattgaccttatagaatgagttgagaagtatattctcctcttcaattatctagaagaaggtataaaatttgtattatttttctttaaatatttggtagaagtcaccaatgaacctatctggtgctgaatttttatttgtcagaagattctaactacaagttcaatttcttgaatagattgaaattcaggttatctatttcttcttcttcttcttcttcttcttcttcttcttcttcttcttcttcttcttcctcttcttcttcctcctcctcttcttcctcctcctcttcttcctcctcttctacttcctcctctccttcctcctctccttcctcctcttcttcttcttcctcctctccttcctcctcttcttcttcctcctctccttcttcctcctctccttcctctccttcctctccttcccctccttcccttcctttccctccttcctctcctcctcctcctcttcttcttcctcttcctcctcctcctcctccttcttctttt

SEQ ID NO: 468375 - DNA, 719 bp, Homo sapiens
cactcttttgcagggctgaaggaatgcatgttcatttaggatggtgtggagggacactgatggagattatgaatacctccatctgccaacagatgttaaccaaaatgttaatagtgattatctcttagagattttccccttggattctgattctaccactgagctctcatcagacaccgaagtccctgcgatcaattctgctcccgacctcaactctgttaatcctgacaatacccaacctggcatctggccttttaatgctttgtcttctgaccctgaccaggaggccaacggccaaggacagcagcagtgcagaatgagcttcagcccaacaaaagagggacacatagcttgggagcattttccagatgctgataccactgtctacatggacacacctttgtttgaacaccatcctcaactgtccacattggcaggcacactggtagtgtgcacccaccctcgacaatcacaatcctacacatatgctcacgactgtccatttccacatgcatactctccaccacttacataccccaataaccaaagcctccttgcacacttccagtgcacatgcaccctcacaggccacgcacacctcccggatacactcagcctcaacaagccatgtctgcaatgcacactctggcatacacatccaccgtaggcagcctatgtctgcatgcatactcccaacatacatattccctatgtatatt

SEQ ID NO: 468376 - DNA, 547 bp, Homo sapiens
aggcactctttggtcacaggagatggcagggaagtgggggaaatggagggatgattggctggggcatgggggttgacttgggagagtgttggatgtcacatcagttccttcaggctcaggggtgggtccagaaaataatgtatgcaaaatatcctggtaaactaaagagtgatttttatatgccagttgttattactcttattattattattaccgtcctgggaaagaaaggacctttactttcagtctggaacatggatgaagatgaagccctcccagacctctcccatccacatctgactcagataatccctgagtgtgttctacacaatgtagtagtccgtgattctggtcccctggctattggctgctgttttatgtatagcccaggtatcagctgaggcctctctctcccaccccaccaccccagatgttggtaagcttgacccaagttgccagtgctcagcctgcaggagtccagagtctcccccaatttgcacaagtttctaccactggttgctgtatgttcccgtggtctttgctcctg

SEQ ID NO: 468377 - DNA, 1340 bp, Homo sapiens
gaaaagtgaaaagctctgaaggtcccacaattcatggtatgtacaggggctcggaggagggaaactgcccagctttcccccggcacagctgcagggtccagcctctgggaaccatgcagcagctcccagcggccctgcacccaccaccagcatccgtttcacctgcagttgaagatccgtgaggtgcccagaagatcatgcagtcatcagtcccacggagcagcctgcgaggctgaggctcctcccactggaccgccccccaactggcaccactgctgcccctgcccctactctcagcttcacgtgactctcgggcagaagcagtggtggggcagccagggcagcgtcaagagtctgagccaggtgaggtgcggtcaggacccccacagggctgggagtcagggcaggggcagaacaaaccttggaggggaggatgtgtgcatagtgggcctggagggcggctgtggcctagtggacaggaagaagcagtgggcctggaagagctgcatgatcagggccggcactggtccagggtggatcgggggaccctgggggctcaggatccagcaaggggcggcaggagtaaaggaggaaggaatgacaggtgcaaataccttcccaccaaagcccttgttgccctctggctcctccccagagctgtccccactctcagtcggtcacccactccttgaacttgagatcggtgtcggtggtgctaaagccatcatcagcaatgacatcatcaccccctcctcctcatggatgaccgtgtgctcttccccctggcttgtgggcttggcctctgagctggacttctttcggtccttgttgcaagtgggccaccttcacctggaaggccaggttgtatttctgcatctcattgggccccagggtgtaccaccgctcgctcagcatctggctgacggtccggttatcctggttggggtgaccctggtgcgccccgccagggcctggtgccgcctgctgaagatcatgagcgccactcatgggccaccggatgtgctgcaggacaagttcgagcatcttaaaatgattcaacaggaggagataaggaagctcgaggaagagaaaaaacaactggaaggagaaatcatagatttttataaaatgaaagctgcctctgaagcactgcagactcagctgagcaccgatacaaagaaagacaaacatcgtaagaagcaatagtttctcttactattctgagagccttatcattctacatcccatcttcctgtgagtttgtctttgtagcatttaactctaattgcagttctcattttaaaaactggcttgcttattgtatattttccccaactaaa

SEQ ID NO: 468378 - DNA, 503 bp, Homo sapiens
ttccctcaagtttgagaagaaatactcctgacacagctgccttgctgggggcatagtgggagatgagtcagagaggcagtccgcacactaccaggaacagccttacagacactggtaaggggcttcaccatcatgctaaaagcaaagcaaagccattagaaagttttgatcagagcagcaacatgatgtgtttgggtttttttaaagagcattctggctcctgtatggagaatagatgcaggaataccagtcaggaggctactgcagcagtcaaggaaaaagaagaggccaggactggccagaggacacaggcattgaccatggaggagacagaacacgtcagtgcagagctggcgctgactctgagtgcagggccctgcaatatgttaccgaaaaccagagatccttcctttagcctacgtgattattccttgttcacagctaaagtcgagaggagcaaaacacatcagctatattcagtaatttctgtcataggataaatt

SEQ ID NO: 468379 - DNA, 723 bp, Homo sapiens
cagcactcacaaatacataggcccagttaaaagttatacaatgataggcctgcctctttctgttgctcagaacaagtcacagagccagcccagattgaaagagagaggaaacagacccctctctcagtggaagcagtggcaaagcttcattgcagaagagcacaagggaggaggacctattgctgaggccatctttggaaatataactgatcacaactttaaaaacactttccagattagtctgatgtgctcaaggtctgtgaaccacgtcccgggaagtctggtcccaccaccccctttctccttgctgtcagatgatgagcagcaccaggctgcccccaaggctgatgggggactaattattgatgcatcttggttttctctgtctatatcattcctatcttttgcattcaacaaatattcatcatacacccattatattgacatggggggaggggagggagagggttaaaaacaccagccagacagctttcccatcctcaggttacttgccatctaaaagtaaacaacttagccaactcttggggctgagtcattacatcccttctcctgattcctaattagaaagttccaagctaaacttaagaagataactgcgcattctctttttaataatgtgccgggaagatgtggaagatgtgttttagggctctataaatgtttaataataaataataagtggctggaatagtcagtgtttta

SEQ ID NO: 468380 - DNA, 593 bp, Homo sapiens
caaccactaccatatggctgacaaatgaatatgccctgccctcagaggtggaatatagagaggcagtaggccttgctgagctgtggtgggctccgcccagtttgagcctccctgcagctctatttacactatgagcatagaactgcctattcaagcctcagcaatggcagacgcccctacccctgccaagctccagagtcccaggtctaagagatttggcaaaggtataagcaacaaaataaactctgtggtagcaagagaagaaagcggtagggtccctatcgaaagtggcagattaggatttaactctgcagccaccattgacatcagtggcagtcaggtggctaaactgtttgcacattacgttgaaaatataccccgagaaaaatggacatttatcagtattgccttaggttttggttgtgatcatcagcagtccaggtttcgaatgctggctagccatattttaataaagagcttggtggagacattgggagtcttgagccagcctcaagaagtctggctacaactgaagccaccatgttatggagatcatatggagacactataaagacacagagagaagatgtgca

SEQ ID NO: 468381 - DNA, 689 bp, Homo sapiens
ttgtttgataagtgtctggtgttttctccttctgtctctctcccctgctgacttgtgaagaaggtgcttgcttctcctttgccttctgccatgattgtaactttcctgaggcctccgcagccatgtggaactgggcatggccattcctggctgtgctctcctacagatgcttctgcaccaaaccctctgggctccatatcagctgtcttcctgctgctaccacttctctatgcagctctccctgccaactggaggtctgccagggttccagaggcctgtggcaagagcaggttgctcattgccagttcaactcatttgttctcccagaggcatttggggccaggaatcagtccagaacttaacctccacaacggggagcttgtggtaaaaccagaaatgctgacatcctgctcttcctggcaatctaaccctctgggagatggtgaaagagaaagcaacaaatttggcaaagcaagaatcacaggctcttctgcaggagagagagaagaggttagatgcctctacccttcctgtcctgcacaggctattaggttagaaggtgttcacctggtgtcagttaaggagacctttccctattgaatgcaacgtgggcagtctttcctgtaccgtgagcaaggatagaactcttaatccatctcctaggatgatacatgaaagtcttctgtcct

SEQ ID NO: 468382 - DNA, 1139 bp, Homo sapiens
cctttgacctcacttggagagatatcatgctactgttagatcaaacgctggcctttaatgaaaagaatgtggctttagctgtagcctgtgagtttggagatacctggtatcttagtcaagtaaatgacagaatgacaactgaagaaagggacaaattcccttctggtcagcaagctctccctagtatggatccccactgggacctcaactcagatcatggggaatggagttgtaaatatctattgacctgtgttctagaaggactaaggcgaattatgaaaaagcccatgaattattcagtgatgtccaccataactcagggaaaggaagaaaatccttctgccttcctcaagtggctacaggaggccttgagaaaatatactcccctgtcacccaaattgcttgagggtcaattgattctaaaagataagtttattacccaatcagccgcagctatcaggagaaagctccaaaagcaaaccctgggccctgaacaaaatttggaggcactattaaacttggcaatcttggtgttctatgatagggaacaaaaggaacaggcccaaaaggaaaagcaaaatcagagaaaggctgcagccttagtcatggttctcagatgaacaaaccttggtggttcagagaggacagaaaatggagcaggccaatcacccagtagtgcttgttatcagtgtggtttacaaggacactttaaaaatgattgtccaaagagaaacaagctgcccccttgtccatgtccactatgctgaggcaatcactggaaggtgctgccccagaagagaaaggttctctgggtcagaagcctccaaccagatgatccaacaacaggactgagggtgcctggggcaagtgccagctcatgtcttcaccctcactgagccctggctaccttgggttacacttacaaggggaattgtgtcagaaagtctaatttcttttaagaccaggttgggtcattttctttattcctctctggtttatcaaaatccatcaaatgtgtcataactttgtcagtgcttatttagagttctgtttatgagcacacaactccaaagaggtgctttatctttttaaaacacgtggttatctctgaaatgtttaacctttgtacctggcaatgc

SEQ ID NO: 468383 - DNA, 556 bp, Homo sapiens
aaagagtttgaatttgctttaagcccaagtcatgtgaaaagtggacgccctcgtaagacgcctagaatatgcagatcaatggtaataagccttcgaaggccaccagtgaaacccagaatgagaccccaaacccaatcacccctctcaaggcaacttcttcacagaccctgattgtaaaggggtcagttggtcctagaaggtccggctgtgccaggggccctgaaggatttggtggaacagggcaggaggcagcaaggttctccttcaccaggaaaaggtgcctgcatcctccttcaatgctcttcttgagataccaccctttggctgtcttctggaagctctctagaaagctggacctgagcttgcagagagcgtacggccagcgtactctgcgtatgatctgcagcagtagcagatcggggttggagtgttcagatcaccttctgaatgcacgacaggacacgtgtgagcttcgagtgctagctggtgccacgtagaagcagtgtaaacttgagctccattttccccatttggagaaggggaaggtaaaacaata

SEQ ID NO: 468384 - DNA, 726 bp, Homo sapiens
tcctgcggctcctctgttcagaatcctccagtgcattcccatctcaatccggtcataaaacaggcactcagtacgtgtttccagaatgaatgcacgaagaaatttcccaaaactctacggcagttttgtccccatttcactcacgaggaaactgcaacccagaaaagtctgatcccagctggaaattcaccttcttcaggaagccttcccagattaaacccactcccatttctgagtgtttctgcacctggcaaacctcttgtcctgctaatcactatttctactacaaccatgattctacttatgggtatatatccaaaagaactgaaagcagggagagagatatttgcacacccaagttcatagcagcgttattcacaatagccaaaaaggtggaagaaaccaaactgtccatcaacagacaaatggataaacgacatgtgatatatacatacaatggaatattattcagtcttgaaaaagatggaaatttgggcacgtgcttcaacatggatgcgtcttgaggacattatcctaagtgaaataagccaactgcaaaaaggcaaatatggcatgattctactttacttataggaagtattggagttgtcaagctcatagagacagaaagtagaatggtggttgctaggggctagagggagggaaaagggggagttgtttaatgcaggggttcccaaccttggggccgtggaccagtacctgttc

SEQ ID NO: 468385 - DNA, 2784 bp, Homo sapiens
acgcaggggaattcttcggtaaaattccttcctcttacaaaatccagctcaccctgcacagtcaacctaattgtcaccgaatataggagaatggggaaactaggatttgcgtgttcaagggcggacaagccagtccaaacaggcattccagtcattgggtgggtgacagccaaagaagatccacctggtcacatcccaatttccccagggcatccgaagcaggtctgagcagccaaggataactacttagtctcctgctagaaaatatctcagttgttatccccactttatagatggtcaacttactttatctatctgatgattggctcctacagccagtaagtggtgaagctgagatgtaattccaaggctgctgatctccaaagccagttgtctttccaaatattagaatatactagtgtctgtggtctgttaaaaaaaatgatgacagtgcctttttaaataaaatttaaagcatccgcagaccctcgcggtgagtgtcacagttcttaaaggcggcgtgtccagagtttcttccttctggtgggttgacggtctcgctggcttcaggagtgaagctgcaggcctttgccatgagtgttacagctcttaaggcagcacgcctggacttattcgttcctcccggtggattcctggtctcgctggcttcaggagtgaagctgcagaccttcgcatccccaatagacgcaggaacccagctggcttcacctagtggatactccactgcatccgcagggggagctgcccaccagtcctgcgccctgtgcccccactcctcagcccttgggcggtccatgggaccaggcgctgcggagcagggggcggcactcgtcgggggaggctggggctgcccaggagcacacggcggcgacggggaggctcaggcatcgcagactgcagctgcagctgcagaccgagccttgccccacagggaggcagctgaggcccggggagaattgaagtgcagcgccggcgggccggcactgctgggggacctggcgcaccctcctccgctgctggcccgagtgctaagcccctcactgcccggggcgggaggcgccggccggctgctctgagtctaacatttaagtctttaatccatcttgaattaatttttgcataaggtgtaaggaagggatccagtttcagctttctatgtatggctagccagtcttcccagcactatttattaaatagggaatctttccccatttcttgtttttgtcagattagactttgtaacctccttttacaaatgaggaaactggctgggtgtggtggctcacacctgtaatcccagcactttgggaggtcaaggcaggagaatcacttgaactcaggagttcaagaccagcctgggcaacaaagtgagaccctgtctctacaaaaaatttaaagattagccgagcatggtggtacatgcctgtagtcccagctactcaggagactgaggtgggaggatcacttgaacccaggaagtcaaggctgcagtgagctgtgatcatgccactgcactccagcttggataacagagtgagaccctgtctccaaaaaaaaaaagaaagaaaaagaaaacaagtcatggagctagtaagtgcccaagagaacaagaataaacctagatccgtgggactccaagcctgtgcgcgctccatgcttgctttttccaccacaccacgttaacacaatttcctccttccatgagaccccaggggaaaggggcacctgagaagccctcgtggcaccctcccaggttgtttccacggctactacagtaagaaagtgttgctgggggaaggtcagctctctggcccacgccttccacctgtttctgctgtgttctttcctcagggatcccaacggcttcaatgactggaccttctccactgtgcgatgctggggggagagagcccgagggacctacaggcttgtcatcagggatgtcggggatgagtcattccaggtcggcatcctccggcaatggcagctgaccctatatggctctgtgtggagtgcagtagacatcagggacagacaaaggtgggtaaagccgcatgtgtcagagggaaggccagtcacaggggaagggccgcctagggagcccatcgccctctgaaccccagctgtgcttcccagttccagcgtcaagccggtagatggagccccgggctgggaactcacagtctgggcctctcctttttgctgtggggcttccctgtcttcacctgtaaggcaggaaaatgggtgagggcagatggtataggaaccatagtcagtggggcatcctcacctcttttcttctccacaggctgttagagagtgccatgagtggaaaatacctgcacgatgacttcgccctgccctgcccaccggggctgaaaattcctgaggaagatggttacaccatcacccccaacaccctcaaggtactagggccaagactcaagctgcgggtagatgggactgtcctgtctgggggatggagttcttagtgtgtttctcagggtgacctgcggggtgaaggactgggaagacctgggtcccagcagtggtttcatagcattgctcctaccctgctagcctaactcttacaggacaggccttgtcgggggagggggcagagggaacagtttgggtgaaaaaggcagtccctagaaggaaaaagactttctgagctcattgtcctggactgagaaaggctgtaggcttcgggaaacagtgcctcacaacaacaaatatttactgagcacctacaggtatgcc

SEQ ID NO: 468386 - DNA, 802 bp, Homo sapiens
ctgagtcatctaaacagcaaagatggtggcccactcctcccccggagggttccgtcctgtcccagacaggttctgccctgttactggtggctggctggaattccaagtcagtgggtcttgtgagctgccacataagtggggcctgcagaccaacacagctcagatgcctgtattcagcccccttcctagggttcggtacagacctctggccttgcctgagttgcagtcacctttgtcagggaacactggggttggagtatataaagttcctgggtctctgtgtgtgtcagcagctgctctactgagattccacaccgctctgtgtgccagtcccaaaaccctggtggagtgggctcacaaagggatctcctgttccaaggattgcaaagattccagggagatgtgtagtttcccagggccacacattcatttaccgcttcccttggctgggggtggggtttcccttggccctgtgtcactcttgggcgagctgtcgccctgtcctgcttttcttcattctccatgtgtcaagttgtttctctgatcagtcctaatgccttttcagtggacacagctagaaaaccggtcatttttaagaaaaaattaattatgaattcatactgacatttctaaatcaaagcttctaggtttttatttaacttaaaaaattttacatacgcatctcttttactctgaaaatttactcttttaatactttaaagttttatatttatatattttattagtccaataataatagtaattgtcatgctactcacaagaagaccaatgaatgtaattt

SEQ ID NO: 468387 - DNA, 913 bp, Homo sapiens
tcagaggaggccagcagatcaaggggtgttcaggtctgaccaaacctgtctgatgagcaagacaccctgcagatatcaggctaaagtctcctatggaagcaagtcgcatctaggggtatggccattgctggctttgctctgctacagacactcccatacccaaccctctgggctccacatcagctggcttggtgcccctaccacttctctaagcagctctctctgccaactcgaatgttcatggtggtcaaggagtctccccctgccagagttccagaggcatgtggtgagaacagggtgctccttgccagttcaactcacctattcccggagagctgttgtgggccaggaatgcttcctggtgtgtggtagccctgtgctgggttcccagcttttttccatttcagcttctgtatcttctttccagcttctgtatcttccctccatccactctcaggactttccctctgaagatctgtcagggacatgccagtcatcttggtccctcgatgggtggtgttccacctggctgcatctagttggccatcttaccctccactccgatgtcactctttttaccgtgtaaatgttcagttttctcagaatcatttattgaggattatcctttccctattttgtattcttggcagcattgttgaagattagttgaccctatatgtgtgtatatttatggcctatctattctgttttactggtatatgtgtcttttcttatgccagtatcacactgttttgatttctgtagctttgtacctaaagacttttgttgttctttatgaggtcctgtagttccacattgtaatgtttgagggctaaattttctcattattgtcctatacccttcaaagctggtcatttatgctcaatatgtcttctatttgaatcaaggcact

SEQ ID NO: 468388 - DNA, 730 bp, Homo sapiens
gaggccactgacaaccttcacacccggaagctgactggtccacgcatggccgaagcatgaggaaactcatcacggaactcattttccttaacatttggaattttacagtaaggacttcaactgtccttcctcagattgaggactgttcccagtgtatacatcaagtcactgagaatgtactacattcagcacaagtgtactacatgaatcactatcgatctgtcatgcaggaagacataggtagtgaggatgaagaaatgttactgcaatggataggtaaggagcatttagttcagagagaatataaaacaataattggggaaacttttgaattttgtgaaaatggaaaaaaggtattgagaaagactgtaccaacactagtgagaccttcctggacaattaaaaggcaaattatgtataatcagactgtcctgatgttaatttcaagttccctttcatcaccacagggctaactatgcttaactaaagtggttgtagttggttaaacaaagaagatagagctaatcctagttattccttcatggttctattttcactatcaaggtatatgtttaatgaacaattaaaattgctctaataatggattattcatcacctattatcagaaaaatatacaatgatatctgacagtattatagacatcatatttattgactcagtataattgaaattttaatgaactataaaaatctaaaatttttaattttaa

SEQ ID NO: 468389 - DNA, 587 bp, Homo sapiens
gcacacggtgcacgcaaccactgacctgtgcccactgtctggcactccctagtgagatgaacccgatcctttacgcatcaattccatcacttacttcccatgttgtgcttctacaaatagccatgtggcaaaatcacagcctccgattaagccagctgtccacgccgctgcaaggatgtgggcagctggacactgctggggaaaatcacaccaccaggctgaccaatgtcacatcatcagacacagctccccagtcctatctaggccctcaaggctgccgagatgcctaccaacaacctaaaatacacaaagcagttggcattgacttaatggtcagagtgtggctagtgaggaaattgctatcaaaggctggaaacatggcaatccattcatgtaatggcaaaacattcagtgaaattaatgcccatggttttttggggaagatctttgtacctaacaaacttgttgcaatagaagagaggtgaaggtgaatttttggtattattttttaatttcttgtttgttatattttatgtattcattgtgtgttttttttatttgagggtaccataaagcttgcaaatact

SEQ ID NO: 468390 - DNA, 480 bp, Homo sapiens
aaggattgaaatactacttatcagtagtatgctgattacctagatgataaaatcatctagctatggagttcatggagcagacccatgtcttagagatgctgacggctgcttgtggtggttcctgggtccagcagctttcctaggacatggctgcaagtccaagagcttcttcaggaacaccagcagggctggggaagcagccagaactaaggcagttgaggatactgcccaagttgccctccaaaaaaatacaccatttataaacacagtaattgaatatatcaaatttaaaatccacctacctttcaataccacagtaaaacaggaggatgcccaatcttctccatttgtctgggaccgaggggtttcctggggtgcagaactttcatgcaaaaccaagaaagtcattagcaaattgagacaagtcggttatcctacaggcaaggagaagacaagttaatgcaacaaatatttattaaa

SEQ ID NO: 468391 - DNA, 2636 bp, Homo sapiens
gaggacaagtcgacgagagatcccgagtacgtctacagtcagccttacgtttctgatgcccctggaagctgtttaatagattgtaatgaaaagacaaggaaaaaatcccagaaagaaacggaaggtttacattgtgaatatgtagcagagccggtaatggctcagtcaacgcaaaatgttgactataatcaattacaggaggtgatatatcctgaaacgttaaaattagaaggaaaaggtccagaattagttaaagaaaataagacccaaccgccagtagcttatcaatactggccgccggctgaacttcagtatcggccacccccagaaagtcagtatggatatccaggaatgcccccagcaccacagggcagggcgccataccctcagccacccactaggagacttaatcctacggcaccacctagtagacagggtagtgaattacatgaaattattgataaatcaagaaaggaaggagatactgaggcatggcaattcccagtaacgttagaaccgaagccacctggagaaggagcccaagagggagagcctcccacagttgaggccagatacaagtctttttcgataaaaatgctaaaagatatgaaagaaggagtaaaacagtatggacccaactccccttatatgaggacattattagattccattgctcatggacatagactcattccttatgattgggagattctggcaaaatcgtctctctcaccctctcaatttttacaatttaagacttggtggattgatggggtacaagaacaggtccgaagaaatagggctgccaatcctccagttaacatagatgcagatcaactattaggaataggtcaaaattggagtactattagtcaacaagcattaatgcaaaatgaggccattgagcaagttagagctatctgccttagagcctgggaaaaaatccaagacccaggaagtacctgcccctcatttaatacagtaagacaaggttcaaaagagccctatcctgattttgtggcaaggctccaagatgttgctcaaaagtcaattgccgatgaaaaagcccgtaaggtcatagtggagttgatggcatatgaaaacgccaatcctgagtgtcaatcagccattaagccattaaaaggaaaggttcctgcaggatcagatgtaatctcagaatatgtaaaagcctgtgatggaatcggaggagctatgcataaagctatgcttatggctcaagcaataacaggagttgttttaggaggacaagttagaacatttggaggaaaatgttataattgtggtcaaattggtcacttaaaaaagaattgcccagtcttaaacaaacagaatataactattcaagcaactacaacaggtagagagccacctgacttatgtccaagatgtaaaaaaggaaaacattgggctagtcaatgtcgttctaaatttgataaaaatgggcaaccattgtcgggaaacgagcaaaggggccagcctcaggccccacaacaaactggggcattcccaattcagccatttgttcctcagggttttcagggacaacaacccccactgtcccaagtgtttcagggaataagccagttaccacaatacaacaattgggagcccccacaaaaaatccccacaggggtatatggccccctgcctgaggggactgtaggactaatcttgggaagatcaagtctaaatctaaaaggagttcaaattcatactagtgtggttgattcagactataaaggcaaaattcaattggttattagctcttcaattccttggagtgccattccaggagacaggattgctcaattattactcctgccatatattaagggtggaaatagtgaaataaaaagaataggagggcttgtaagcactgatccaacaggaaaggctgcatattgggcaagtcaggtctcagagaacagacctgtgtgtaaggccattattcaaggaaaacagtttgaagggttggtagacactggagcagatgtctctatcattgctttaaatcagtggccaaaaaattggcctaaacaaaaggctgttacaggacttgtcggcgtaggcacagcctcagaagtgtatcaaagtactgagattttacattgcttagggccagataatcaagaaagtactgttcagccaatgattacttcaattcctcttaatctgtggggtcgagatttattacaacaatggggtgcggaaatcaccatgcccgctccattatatagccccacgagtcaaaaaatcatgaccaagatgggatatataccaggaaagggactagggaaaaatgaagatggcattaaaattccagttgaggctaaaataaatcaaaaaagagaaggaatagggtatcctttttaggggcggccactgtagagcctcctaaacccataccattaacttggaaaacagaaaaaccggtgtgggtaaatcagtggccgctaccaaaacaaaaactggaggctttacatttattagcaaatgaacagttagaaaagggtcatattgagccttcgttctcaccttggaattctcctgtgtttgtaattcagaagaaatcaggcaaatggcgtatgttaactgacttaagggctgtaaacgcc

SEQ ID NO: 468392 - DNA, 2061 bp, Homo sapiens
cagggccgaaagaacgaacatttgaagttctacaatgaacccatcagagatgcaaagaaaagcacctccgcggagacggagacaccgcaatcgagcaccgttgactcacaagatgaacaaaatggtgacgtcagaagaacagatgaagttgccatccaccaagaaggcagagccgccaacttgggcacaactaaagaagctgacgcagttagctacaaaatatctagagaacacaaaggtgacacaaaccccagagagtatgctgcttgcggccttgatgattgtatcaatggtggtaagtctccctatgcctgcaggagcagctgcagctaactatacctactgggcctatgtgcctttcccgcccttaattcgggcagtcacatggatggataatcctatagaagtatatgttaatgatagtgtatgggtacctggccccatagatgatcgctgccctgccaaacctgaggaagaagggatgatgataaatatttccattgggtatcgttatcctcctatttgcttagggacagcaccaggatgtttaatgcctgcagtccaaaactggttggtagaagtacctattgtcagtcccatcagtagattcacttatcacatggtaagcgggatgtcactcaggccacgggtaaattatttacaagacttttcttatcaaagatcattaaaatttagacctaaagggaaaccttgccccaaggaaattcccaaagaatcaaaaaatacagaagttttagtttgggaagaatgtgtggccaatagtgcggtgatattacaaaacaatgaatttggaactattatagattgggcacctcgaggtcaattctaccacaattgctcaggacaaactcagtcgtgtccaagtgcacaagtgagtccagctgttgatagcgacttaacagaaagtttagacaaacataagcataaaaaattgcagtctttctacccttgggaatggggagaaaaaggaatctctaccccaagaccaaaaatagtaagtcctgtttctggtcctgaacatccagaattatggaggcttactgtggcctcacaccacattagaatttggtctggaaatcaaactttagaaacaagagatcgtaagccattttatactgtcgacctaaattccagtctaacagttcctttacaaagttgcgtaaagcccccttatatgctagttgtaggaaatatagttattaaaccagactcccagactataacctgtgaaaattgtagattgcttacttgcattgattcaacttttaattggcaacaccgtattctgctggtgagagcaagagagggcgtgtggatccctgtgtccatggaccgaccgtgggaggcctcaccatccatccatattttgactgaagtattaaaaggtgttttaaatagatccaaaagattcatttttactttaattgcagtgattatgggattaattgcagtcacagctacgggtgctgtagcaggagttgcattgcactcttctgttcagtcagtaaactttgttaatgattggcaaaaaaattctacaagattgtggaattcacaatctagtattgatcaaaaattggcaaatcaaattaatgatcttagacaaactgtcatttggatgggagacagactcatgagcttagaacatcgtttccagttacaatgtgactggaatacgtcagatttttgtattacaccccaaatttataatgagtctgagcatcactgggacatggttagacgccatctacagggaagagaagataatctcactttagacatttccaaattaaaagaacaaattttcaaagcatcaaaagcccatttaaatttggtgccaggaactgaggcaattgcaggagttgctgatggcctcgcaaatcttaaccctgtcacttgggttaagaccattggaagtactacaattataaatctcatattaatccttgtgtgcctgttttgtctgttgttagtctgcaggtgtacccaacagctctgaagagacagcaaccatcgagaacgggccatgatgacgatggc

SEQ ID NO: 468393 - DNA, 723 bp, Homo sapiens
ctcatggctttctggctccctgatgtccacctgcaaggcggctggctgtctctttgtccgcctgcaaggcggctggctccattatgtggcttcttatttccctttctgtaaaatcccaagtcattgtaaggactgcttccatcaccaactccctgacttcgtcttctacctctctactcttcagtcactcaactctggtcacactggtctcctgctttctgaggactgcagcagggatttatcattctcaggaccttcatttttctttttcacgtgtatgacttgctccctcatattttatgggtctctgctcaaaatgtcaccttatcagagaggtcttcccttactacccaatgtaaataccataactcacgcaatcttccaaaactctctatctcccttacttggctttatttttcttttattcacttattctctgaggtattatatttccaactattcacttgttttctgtcttcttccgctggaaggtagtgagcattgtatccaataggtaggttttcaacccatgtgatatggtttggctgtgtccctactcaaatctcatcttgaaatgtaactcccacacttcccacatgtgggagggacctagtgggagagaaccctgactaatacaatgttctagaaaatattggcaatagcggtcaatgtaaatcctgtcccatcttttactagtaagcacttgaatatggttgttgtatt

SEQ ID NO: 468394 - DNA, 531 bp, Homo sapiens
ctataccctgcaaagccatagtgttggagctgcccaagaccataggaacccacctcttgcattagcatggcctggatgtgtatttattccgatgcctgtacccccactgtatcaaggagtctgtggccgaagggccaagagcccctggcaaaccactggtgtaaggccaaaagtccagaagctgaagaacttggagttcgagggcaggaagcatccagcacaggagaaaaatgaaggccggaagactcagcaagtctgcactttccaacttcttctgcctgctttattctatcggcactggcagctgattagatgctgcccacccacactgagggtgaagactagcctccatgagattccacaggaagctctggaacataaattgtactgcagagcctatttcaccctaaagcaaaggatcagagcttttgtacccactccccagtctgactttgaactaccaggcacaactgaagcagatgctggcaccatgcttcctgtacagcctgcagaaccatgagccaaattaaa

SEQ ID NO: 468395 - DNA, 1996 bp, Homo sapiens
gtggagaagcctcaaccggtcaccgcgcccgagggtgtgttgctgcctgtggctcaccgggctccagtgcttcgctttctaatcgagtgcccccaccctccgtcctaccccaacgacctccaatgctaaaccctggcagagcctggccgagggttcctcccctgcccgggccaggcccaggtgtctgggaggaggcagagagccggcagagggtggcagagctctagcctggtggctaagaggcgaaaacgcgtcctgtgctcatcgcaggggacaaagccgtgttccgagcccgggtgcaggggaacgccaaaccccacatctcctggaagagggagagcggcatccccatcaaggagtccgccaagatattctacgacagcattaacaaggaacacgtgctgaaggtgcgggggccaagcccaagtccagttaccgagaaggccagaggcagggacccccagggcgggccgccagtcttctcaccgatgagagccttaacggcggcccgagagccgggcagtgggaaaagcagctgtcattgcccgagaggcgcggcaggataagagaggccgagtcaggaaccgggatattgccggaatgagcagaggacccaaagtacccccggggcagagcagagcaggggcagagccagaacgtggcggggcgggacgcaatggaagcgaaggggcgtgtccacaaggcgagtgagccaaaaggaacgcgggaccaagacgaaagtctccctgtggttccttttccttcccccactaatggccggactttgatccagctggagccactgacttcggatgactctgacaactataagtgcattgcaagcaatgaccatgcagatgccatctataccgtatctctgctggtaacagaaggtcaagagaaaatggacttcaaaaagatgctgaagaagagggcaccccctgctcccaagaagaagcagaagaaggtggcaaatgagaaagagatgctggagattttgtccaaagtgcccaagaaagactttgagaaggtgtgcatggagtatggtttcaccgactttcgggggctgctcaggaagctcaaagagatgaagaagaaagtagaggtggaggccatccggattctgaagcccctggaagacaaagagaccaaggttgacaccacagtggtctttgactgcataatggaactgaaagaccccaaatgtcagatgatatggatcaagagggttggacatgcaccctccagcttaggctggcgctggggaatggagacctctggaagcttcctcctaaagcccttcatcagctttcctacctgttccatgaggcagggtactgagccactgaggatccagtactccctgggcaagtacgatgtgaagcagatgggcaccaagtacatgctggttattagcaacgtgaacatgaacgatgctggcatctacagcctgtccgtgggcgataagcggatgagtgcagagctcacagtgctggatgagccactgaagttcctgggagagatgaagcctgtgaaggtgacagagcgccagacagctgtgtttgagatccgcctctccaagaaagagcccaactttgtgtggaagttcaatgggaaggagctgaagagggatgacaagtatgaaatcacggtgtccgaagatggtctgacgcacacgcttaagattaaggatgccagactcagtgacagcggcgagttctctgctgaggcggggaacctggtacaaaaggcccagctcactattgaccaaggccagagtgaccggcatcaactggctgcatcggacatgatatagtgagatgatgtccgagctttaccaagaactaaaaggagttccgctttcaaagaatgagggagagtagagaacatccccagcagaggtaatactgctttcaaagaatgagggagagtagagaacatccccagcagaggtaatagcatgtataaatgtccagacattagaaagacaatgcag

SEQ ID NO: 468396 - DNA, 846 bp, Homo sapiens
cttatagtgccttttccaggcctgtccatggctacctgtgggccaatcagcatgcacttccttccttctcagcccataaagaccccaagctcagccagactcagacactccacaggacaaccagctgtggagaggagctgcccactccaaggtctcctctctgctaaaagctgggaagatgaccctccagacccactggatagcaggactgaaagagctgtaacacaaactggactgaaacatccctcttgttcgccacactgtgggcaacatgaaggagagaagagaggagagaagagctgtgacccttcagggagcccagacctaggagttccccaagctaggggcgtgacaccctctttgaggttccgtggttcctggcatctccaagcttccaggtaccaccgtgttccctggtaccctcagtggaagccatttgcagtggaagcccatgctggtgcctggagctgcctgccccactgcagccagtaggcctggctgtcccctcgctcattcatgcatcccttgccactctgtgcctggttttggatttctccctggttcaatattggtaggttatgtatgagtctaggaatttgtccatttcttctagattttcaaatttattggcatatagttgctcatgatagccactaatgatcttttgagtttctgcagggccaaaggatgctattcatatttatttcatatttatttggtgccaaattattattattttcaaatccttacatctgcaccttgaaagtaaactgcaatatccagcacagcattgtcagacagagctgctgtatggctattaagttcattactgcctggctaatactt

SEQ ID NO: 468397 - DNA, 745 bp, Homo sapiens
catcaccgtgggcctcgaacccgaaatggctctgctgaccgaacacctgctgaagccgctgcccgcggacaagcagatcgagactgggcccttcctcgaggcggtgtcccacctgccgcccttcttcgattgccttgggtccccagtgtttactcccatcaaggcagacataagcagcaacatcacaaaaatcaaagctgtgtacgacaccaacccagccaagttccggaccctgcagaacatcctggaggtggagaaagaaatgtatggagcagagcggctcaaagtaggggccacgctggcgctgatgtggctgaaaagaggcctccgcttcatccaggtcttcctccagagcatctgcaacgaggagccggacgagaaccacctcaacctcatccgcgtcaacgccaccaaggcctacgaaatggccctcatgaagtaccacggctggatcgtgcagatcttccaggcagcactgtacgcagcctcctgggcagaatgtgacggaggaggagtgcctggaaaagatccgcctcttcctagtcaactacatggcgaccatcgatgtcatctacgagacgtatacccagatgaacgctgagcttaactacaaggtctgaaaccaaccagcaagtctttgatgaccaagaggcatttctttcaaagctatagggcacaaacaattgaccatagaagactctgtttgcattcttctgcagaattatttccttcagggacagatttt

SEQ ID NO: 468398 - DNA, 495 bp, Homo sapiens
cagggcgagtccacagtgcaaagatgaagctctccactggcatcattttctgctccctggtcctgggtgtcagcagccaaggatggttaacattcctcaaggcagctggccaaggaatgagtgagcagagcttgactgccttggacagtcaggagagaggtaagctccttgcagagaagttagaggctgcagcccctcctcctcttgccctctctctgcctgtgtgcttagtgcgagggtctgagtggatggtagaaagtcctcccttggaaagcagagaatgggaaggtgggctgttgctcactggcctggtgattaatctccttgcttgcctggactacagcgatgccagagagaacgtccagagactcacaggagaccatgcagaggattcgctggctggccaggctaccaacaaatggggccagagtggcaaagaccccaatcacttccgacctgctggcctgccagagaaatactgagcttccttttcaa

SEQ ID NO: 468399 - DNA, 563 bp, Homo sapiens
aggaaaattatagtaaagactgagcttcaaatgggcttttggctccatgtaaagtttctaggggtagaaatggcctctaggaatactcagaagctgggccctggtatcttcacccccagtgggcacggcagcatcacagacacccatggcgggcagcaggagctccgctgccaggagactgtctccctggattctgactctctgaggtggcaacaatgtggaggaaggagggtgctgcccaccccctcccagagctggggatggttggtgctgggctactggaagtgggataaaggccctctgccaggactggtcactagggaccaactgctatacagtgaccccttcctggccctgttgttcagagaggcactgaagggcagcaccggaggcttctggcttgaggactggcaagatgagaggcatcttcccagaagagatgagcagggcggcagcaaggcaccggctcaggcgaagaagccctggggcaggtgcagaaggtggtagttcaaagaggcttctggagtcaggatggttggattgaagcccagttgcttaccagc

SEQ ID NO: 468400 - DNA, 1320 bp, Homo sapiens
gcgggcgatgctggcggtggcagtaggcgtgcggccggggcccgtgaccatgggcatcgccgagtccacgccggatgagctgccgtcggacgcagaggagcactgccagcggcgaccagcagctggagctgagcgggcggcggtttttgcggctgcccaagcagtgtgcgcgctgagccgcctgcagaagctgtatctgccggaggagatcgaggagctgcctgacggcctgtgccgcctgccgcgcctcacgcgcctctatctgggcggcaaccggctgctggcgctgcccgccgacttcgcgcagttgcagagcctgcgctgcctctggatcgagggcaacttcttgcggcgcttcccgcggccgctgctgcgcctggtggcgctgcagtcgctccagatgggcgacaaccggctgcgcgcgctgccggccgagctgccgcgcatgacgggcttgcgcggcctctggctctacggcaaccgcttcgaggagttcccgcccgcgctgctgcgcatgggccgcctgcacatcctcgacctcgaccgcaaccgcctgggcggcttccccgacctgcacccgctgcgcgcgctgcgcgtcttctcctacgaccacaaccccgtcaccgggcccccgcgcgtcgcggacaccgtgttcctcgtgggcgagggcgccgcggcgctggttcccgggctctgggcgcccccgggggcagcttccgcgccctggaagccgctccaggactgggcacctgagcctatgttctggctgatgggcttcagccactctgagaggaggggctctaggaagctttggctggccttcagctggtgccactgggccacgggctgccggggacgggcaatcatgtccttccagtgcttcacctcccctggcccgctcttccaggacagcctgatctattttcctggttgtctacccccacacccccaagcctgggcacgccaggcctctcggaattagactgccaacctattttgcagtggggtctggaaggtggggttggaggcagcttgtctccatggccttccctgccctatctgttgggtgatgtccagcccccctgaattataatcattcccaactcctgggcacttgctacatgtgagtactgagctagggacttcatacacatagatcatcaaatcctacaactgtgaggtaggattatatgattatctccatttttcagatggggaaactaaggtacgaagagttaagagacttacccacagtcacagggtttataagtggtgcagagggattgaaatccaggtctttggagctctatgctaccggcc

SEQ ID NO: 468401 - DNA, 620 bp, Homo sapiens
ctgtcccggttccgcgatccctggctctgggctcaggaggatgacgggaggggccccagcactccgagagctgggcgagttcaggtggccaggccctctccctcaccaaggcctctgggggagctgctgggctccttggttctgccagcctgagcgccagaatccaatcctgctctataataatcatcagagcagccggcagcacttactgagctccgagggactgccaggcccgggtgccaagtgcataacacgcattatcccgcttaatagtcacagaagtcccgttgtgatccccttaggaagcccccgggccttcgatggctccccatgcctgcagaaggagcagattgagcatcccgaacccccaaatctgaaatccaaaatgctccaaaattcaaaactttttgagtacccacatgactgacgctaaaaggaaatgctcgttggagcctttcggatttcagatttgggatgctcaacagataagaataacataaatattccccaaaaaatctgaaatccaaaacttgttttcgtttttgtttttgttttttctctgagacggagtttgctgttattgcctgggctggagtgcaatggtgcgacctcggcttacc

SEQ ID NO: 468402 - DNA, 563 bp, Homo sapiens
gtgtaaccacaacccagacccagcaaaagagcatgtcaggtctttttatgatgcttccagcacaaccccctgaagcctctctgtcttcctggctccatcatgaagtgtcagctgctggggtcactatgttgggtgccatccaagtggatgtggtcattttcatccctgccctggcgttctaaccccagtaatgtgaaggaaaaagaccagcaaagagaagcagctccacaaaacctgtttcagtgggttatgtttttattctacgttattggcttaagccacaggggccaggccgacctggttgtttgccctgtcgaagacggtaaagtactggcggatgaagacatcacccaggatccaaagctctccagattcggtggggacgttcatgccctggaagccactgatgcagctcccctcgctctggagaaaaggagaataaaagtggagctgggacaccgattcagccgtgataggcgctgggtgataaacatccagggagccctggtccagctgtaaggcacgtgcaaggaggagcttcctggctcagtgtccagggattc

SEQ ID NO: 468403 - DNA, 1402 bp, Homo sapiens
ggtatttacctcatagggttggaatgaggacaaaatcaggaggcatgggcaccaccacaggagtccagccctggcagacaagtgcaccccagaacacgacccagcccaagctcctggctccacaccagcacgagaagtcccagaagaagagcagccttcttaaggagctgggggccttccacatcaccatcgctctgctgcacctggtctttgggggctacctggcctctatagtcaagaaccttcacctggtggtgctgaagtcttggtatccattctggggggctgcctctaagatgttgtgcctgatgacaaacctcatcagcctcttttgcgtgctgtctggcctcttcgtcatctccaaggatctctttctggagagcccatttgagtccccgatctggagaatgtaccccaactccacggtccacatccagaggctggagctggccttgctctgcttcactgtcctagagctcttcctgccagtgcccacagctgtcacagcctggagaggggactgcccatctgcaaaggctccagtatttgaggaacttcttgcccgtttaatcctgcccttcacctttcccacagtgagtcccctgccctgctctggccagcagttctcgccctcagagaggtcaagtgccttgcctaaggtggcacagcagtcattgttgcgttctgcctggctccaatgggttctacggaaactccagggctttgtccttataatagtggggaggaggaaggaccacatccatggtgggctctgttgcccttttggctacacaatgctgctgaccaccctgggcctcattgccaccaaaaatcctgcaagactcctccaagaggagctcccagagaacaacagatcccctaccccccatctgtgggagaatgtggcttcgcgggctctgaagagaggaagggaaggaagaagggagccagggctcctcggcagcctcatttatctcggagtctgactcccctgtgagtccagagagccgtacgcgatgcagccaacccacctgccccagaggcatggctgctttctgggtggggcaaagagaaaagcctggaagagcatgtgtattatccatgtgtaccttcagtagtggcctctgcagccagtagagaaccccaccagcctcctctccttttcagaaatctcttgctccagccacacccaaaacctggcatccaccccgcaccgccacctccaaatgtcctaggtctccactcccctctgtctggttcttctgcttggaaatctggaagcccccatcccgccccatccccctcctcatccttccttcttatcctcaatacacaccttgttgtgtgtgtggtgccttgttgtggcctggctgtcatgtgtgctgtccaggtttttgttgtt

SEQ ID NO: 468404 - DNA, 621 bp, Homo sapiens
agggtgcgtctttttctccctttttcttattccaaggtgtagcctgtactcctagttcatcatcaggtcagcaagtcccacctgggtcccaaagactatcgttggggagtgggatgcttcctgtaaacagccacacactttacagctgcttcttctctccccgagcttcagagagtagagccgttcgaatgctgcactcctactgtggaatgctgagagtccccactggggcactgcccactagacccgtgagaagagggccaccattctccagacccaagaatggtaaatccactgacagcctctacaacgcacctggaaaagctgcaggcactcagcatcagcctatgaaaacagctgcagaggctttaccctgcagagccacaggggtggagctgcccaaggccttgggagcccacctcttgcatctgtgtaccccagatgtgagacatggagccaaaggagatcattttgaagctttagaatttaataacagccctactgggtttcagacttgcatgggacctgtggcccctttgttttggccaatttgtcccatttggaatgggaacatttacctaatgcttgtacccccattgtaccttggaagtaactaacttg

SEQ ID NO: 468405 - DNA, 659 bp, Homo sapiens
ttagaatcctctgcaagatgtgatgttgctcatagtagtgatgtactgggtgtatgagcaggcttattgtctcctttgggatcagacagggacctcgtccatctgcagaaatgctgatgtttcttgtatagagggagtgggactccactcctcatgcaatcctgaacccagagggcacacctcctatggtgatgctgtcacctcagaatgttccataaaagccttctacaggtgcacccttgccaagctcccatgggagaagctctggtggtgtcttcagtggtgggtgagagagataaaaagtccctttatgcaaaatggtgagagaaagctgaaacagccagctgagttccagacagttcatgctcagaatgcaaaacttcccaaccaagacagaaacagaaggatgtggcctgaaagccacatccttcccaatatgacctgcaaaacaggggcgcctaattttggacctgtagcaagagcatgctttcttcttgcctcttgaaagccagtcttcaagctctaagattctttcctctgctcggtttattttgttattaatacttgtgtttacattatgaaattcttgtagtgtctattttgtctgtcagctcttgcaatgttttattatgatttttagcttccttgcattgagttat

SEQ ID NO: 468406 - DNA, 696 bp, Homo sapiens
ttatcaactctctcccattggcggtagcgccagtgcctcggaaggcacccgttacttagcagacctggaaagggagtctccctttcccggggggagttaaagaagactctgctccaccatctcttggggaaggcctgacatgagtcaggcctgcccacagccatgcggaggcctaaccgtctccctgtgatgctgtgcttcagcggtcacgctcctggtccactttcatgttccaccctgtacacctggctctgccttctagatagcagtagcattattagtgaaagtattaaagtctttgatctttctgagaagagcatagaagaaataatgactggtttggaaaacactgtgactatggggtcgtggggaacacctgaccctcagcaggtgctagttttattcccagcgccagtgcaaatccaaccagggatccctacactcacgcgtgggccaacagagtgtgatctggcagtcaacttcctcaatttggggcctggcagccccgggagcccggtgggcgcttcctcggtggcgcccctcaccctgcctcgcggggttctaacgtccaagagcggggctgtccgagagacccgcgcggacacctgaggcgcggtggggctcccatggctccgcggagcctgcaggctcccaagacgagggtggggtggcggctgacaacaatgctgccctttg

SEQ ID NO: 468407 - DNA, 1506 bp, Homo sapiens
gcagggctcctgcctgctgtgtggagcacacagccctagttgtgcctccttgctgcagccgggatgatggcaggcgaactggagtggctgccaccatcaattgtaccacaatatagtcaaagaatggatatggcaaaatttcccagacatcagcatcatcttttaaatgcagttgaaatgagagatggggaaactgacaatgttaatgaatgggagatagaggtgaggatacacattgcgaatgaagacatgggcagtaacttctgcaacacaatcttggaactacttcagccccttgattattctggcttagagcaggagtcccagattaagcttccctacctgctgttgaagatgattctgaactgtttcctaagacagaaatgtactgatgtgttcttgttggatctttcagactttgacatatactgtactcttgattcacttcatgtcaaaattaaagcactgacagttgatgattgttcaaggtgggttgtgaaccaaaagcatgatagcaatagcagtttccttggctgaggacatttgcctcagggagtcatggctaagttaatcacagtccactgtatctttcttatgcctttgcgtcctcatagctcagttcccacatataagtgagaacatacaatgtttggtttgccattcctaagttagttcacttagaataatagtttccaatctcatccaagtcactgtgaatagtgttaattcattccttcttatggctgagtagtattccattatatatatatataacagtttctttatccactcgttgattgatgggcatttgggtttgttccgtgattttgtaattgcgaattgtgcggctataaacatgagtgtgcaagtatctttttcatataacagatcatctaattttaaaaacaaatatgcctttctgttcacttttacctaaatttgttccttttaaaaactttgaatgcttctttgaattctgtaaaaatttaactgtaatgtaattgatgaatctacttaaaatttattttgtaccctcaggttttaaaagtgaaggttatttttagatatctgctaatatttatctcaagaacattaccaaggcgatgactcatgcatatttcatgtgctgttgagcgagatgatagatcttcatcacaccctgcaatttcatttatccatccaaggtacttgtgtttggagagaacattaaatgtcatcctggaatgtctgtttaatgatgatactggtttctgttttaaaatgtgtcatcatacgtgttcattggatcttcaaccacctattttccaataaaattctgaaaacgagctgaaggggcactttcttaagcactaagttctgactagagctggatgcttttcattccacattctgtattgtttagtagaacaataatttatctctgcaaatattaggagatgcctgctatccttagacaaatagatcattattcatgtattaataattcttttaatatactgttgatat

SEQ ID NO: 468408 - DNA, 1547 bp, Homo sapiens
tgcctaagagaggaggttacctaggtctacatttctggccgtggggtgttctgatcagttaaactgctgaacattatgctaaggttggacattggatcaaatctgatctatggtgttctgttggtcataaggtttccaataatcttagtaatgagagggagagagaatgatagccgtcgtgaatgcagaaggtcagtgggacagcaccgctcactatcacatgaacttgaagacttggaaatccgtccaagagtgtcctatgttcagagggaggaagctctgcctcagagtttagaagatgtaaagggcctggggccaggaagatttccagaacagcaaaaatccaggactgaaaaagtcggctctagacacaaggtgctcaaggtcagtgacatgcatttgctctatcagagtgttacagaggcaagctccctggccagagctgcagctcaccagttcatgtggtatactgccacggaatttgtacagaagatgtttgtagagtgtactgaatcttggcttctggttgaaattagaggagcacctcttgtggaaaacctgcaacctaagcataatgagctgtctctaggaaatgggtgtcctgtaaccaggatgacgaatgatatctttgagttcacttatgctcttgagttttctggcatcatgaaatatgaatgcccatggggcattcttgttgagagtttcgtcaaatatcaaccagcgtttttgaatttcagaacttacatcccagtaagatgcgcccttgaaagaaagccttcctcatttgaacaaaatgtaatacagaataatactgataaatctaagaaaatagtccaaactcagtattatcaagcaggaaattggggtatcgaggaatgttacttaggtattccagaagaagacattgttatcacaggagatgacaactccttgtgtgttattgcccacgaagaccttccagtgggacaatatgtggagagggaagacggtgagattgaggatcctgaccctgcataggcctagactagtgcgtatatttgtttcttactgtttaagaaaaaagtttaaagagtaaaaaatgaaaagttttaaatatagaaaaaagcttatagaataaggatagaaagagtttttgtacagctgtacagtgtatgtgttttaagctaagctagctgttattacaaaatggtcaaaaagtaaaaaaaaataattttataaagtaataaagttaagctaaggttaattattgaagaaaaaattttaaaatgaatttacagtagcctaagtaatatatccttaagtaatgcatgtgtgtaagaggaaaattttaacacacctttcacagtaaatgatacagtgatacgttcacaattctttgggattttggcaatttggatgacacagttaacaaaattgacctagtgacatctatagatgaccatatcctgagtgtagaatatataatcttttaaatcttacatagatttacaaaaagttgacaagttttgtttcaaaggattgaaataatatactgtatgttttctgat

SEQ ID NO: 468409 - DNA, 768 bp, Homo sapiens
gggctcacaactctaacggggtgcgcctgagagggtcatgatcgattgagcaagcagcggctatgcttttcttttcgcgggaagcatagacagggaagctcaggagttcacctgtccttatgggcagtaagaagaaagatggtttaatagtgccaataacacaactacctgccgactcgtcagatgtccagactccaagtgcccgttccttcccggtgttcagccactgcattgatcctccacggggacctgccacacattgctctgacgaggcgtcccaccggggcagatgcctacccaagggtactctcaggatccacgtagctcgggctggagaattgacttacatgatcacaagggcagcctgcaagctgaggagccaggaagccagtccgggtcccaaaatctcagaagtagggaagctgataatgcgatttcagtctttggccgaaggcctgcgagcccctggcaaatcactagtgttaagtctaagaatccaaaaactgaagaacttggagtctgatgttcgagggcaggaagtatccaacaaaagaatttgagtccctctttcaaaatagcctccttttcctatgagaaagtacaaaatgaacttttcaggatgattctgtcatctccaagttcaatggatagcatgtctctaaggataagtgaatacagcaaaatttagttcagagaaccctgagggtccccaagaccttttcatggtccatgatatcaaaactattttcacaataatgctaaaacatt

SEQ ID NO: 468410 - DNA, 701 bp, Homo sapiens
catccagccacaactgggatcaaagaatatcacatatagctatgggagtggagccacttctaagagcctctattagggcaaagctgagtgggaatgcggagtcagagccaacacagagagtcccaattagggatatgcctagtggagccttgggagtggggctacctttgagatctcagaactataaggccactagcatgcaactccaacctaacagagctgaagcacggactgagtccagcaaagatatgggagcaggaaaggatcagctttataaaaaggatgaagcaccacacacaaggcctgaacgatcaaaggctgaagagatgctagactctggagtggagcacattggtggagggactggctgtcctgagcctccaagggccaccggctccctaggcctacatagcagctttggttcaccctttctctcagagctaatgtataaaaccaagctgcaccctgaccaccttgggcacatgttccgaggatctcctgatggctgtgtcacaggccatggtcactcatatttggctgtgacagtttttcgtaccttctttgtgttttataactttgagagttctgaggagtactggtgacgtgttttgtagaaactccctcaactggaagttacctgatatttttctcatgattagactgatgtttgggttttgtggaaggagatcacagatataaag

SEQ ID NO: 468411 - DNA, 805 bp, Homo sapiens
ggcttgccaccgagcttcccgctgctgcagctgaggcaagcggggagccgccgccaacacagcgtgctaccgcccggaagcgcttccacacgcgcctcaagctgcctcccggaagtccccgcgcccgcgcttcggctgcttcacggaagtccttgctcctttggctgcctgcggatgtcctcgcgcttgccagcctttgtcacccaagcagtgccttctagccccttttctgtagggctgctgcaatttactgggggtctgctccagaccctagtcaccttggtttttccagtacctggaggtatcaccagtgaaggctatgaaaccattgaggatctgtttaaagaagcagtctggctgcattttggtagaacagttgtgctgtgttgggggatcccttcagccgctgatcagtttgggctctctaagaactgcaggctggatcagctgaggtgtatagcagcaaaggtaatggccctccttgccctccaggcactccatcccagggagaaattaaaacctctgttcactgtagaacactggtgggggatagctggaggccccagctgggaggacctgcccagtgaggaagaatggatcagggttttacttaaagaaccagtctggccatgcactgaaaaaacagctgtgctgtgctggggaaccacctatgcctcagttgacttggaccctccaaatcctgcaggctggaatagccaagttgcccaaacagctaaggtggcagcctgccccgcctcccaggtactccgtcccagggagaaatcaaaactctgtccatagaata

SEQ ID NO: 468412 - DNA, 520 bp, Homo sapiens
gcggggtttcatgtggtcatcacatcctccagggccactgcgtgtcttcgagcaccagcattctgaagtcagggatggggtcttcctcatgggctgtcagcgacttactaggaaggctcaaggtctcattaacttagagccagatctggatgaggtgaccctgtgtacttctggcttacagcagcaccaccatggggcaggcagacgcccaagactgtggcagatgcagcccatggccaagggtgacagtggccagcctggagctggtggcttcacctccttgactttccacttcggcgtctgtaagctggggatactgataaccacaggcttgccggcagtgcgggggatgcaatccgtgcccaccaacagccagcgcttgcaaagtctgttggcccactggggacttatggcagctcatgcagcggaaactgctctggtcatcgccatttatagatgaggaaactgaggcacggccagttgcacaaacctgctcaagggctcctggatggtggggcct

SEQ ID NO: 468413 - DNA, 567 bp, Homo sapiens
tgatggtgatggtaatgctgatgaaggacgtgatgatgatgatgacagagatgattatgatgatgatggtgatgatagtgatgatgatggtgatggcgattatgatggtgatggtgataaaaacaatgatggttgatgatgatggtggtggtgatgacagtgatgatggtgatgtgatgatgatggtgatgatgataatgatgatgatgaaggtggtgatggtgcttatgatggtgatgaaagcaatgatggttgatgatggtgatgatgatagtgatgcaatgatggctggcgatgatggtgatggtgattatgatggtgatagtgatgatggtgacgatgatgaaggtggtgatggtgatcatgatggtgatggtgatgaaagcaatgatggttgatgatggtggtgatgatggtgatggtgcagattgtgacgatgatgatgatgatggtggtggtggtgacagtgattatgatgatgaaagctatgatggttgatgatggtaatgatggtggtggtggtgataatgatggtggtggttgaggtgacaatggcagtagaggaat

SEQ ID NO: 468414 - DNA, 1068 bp, Homo sapiens
aggtcgtagttccgcccaacacggtgcaactgtcacagacaggcaccacagacagacagacaggcaccaatcctttccccaggactcagctttcaggattttggcattcagattttaatctgacgattatgattgacaccaaatacaacaatacctcaaaaaaggcatatgaatggaatgctgaaaaaaggatccaggccccctcaaaaaaggcatatgaatggaatggcgaaaaaaggatccaggcccgagcgcggctcatgctcaaatcctgtctaatgcacaaaccacatttgcttgctttcgaatcgttgcttattacttatatgtggggggggaaaagaaagcagcaggcattgaaaacactccagaggttccagaggtggctgtttccagagacacttctggtcctgacatgctggggtctcgtcaccagggctgtgctgggggccccaagctctctgaaggtgtgctttctgggtcatgaggtgggggccccacagatattggtcatctgtggagggtagcagagcagccccagggcgccatcgatgctggcaggggaggactgcccgagggcctctacaggccaggccagggtgcagccacttcaaaatccctgaaagcaaatgtggaaccttgagtgagtgtccggttggaaaatgaccacagccttgtcctgagctgggcccttctcctatcactgccacactggggacccaatttcaagacgagttttggtggagacagaccacatccaaaccaccctctctgaccctctcctggtgccaagctctctggccagggagtaaaggggcccccactcttgcacttgccaagggtggagacaagggtaggctggcaagagcagtttagcgaggacagagtgagggaaggggtaattatttcctaccttggaaactctgtgtcccaccccagctgcaccacggccgggccaggccgggcctgcagcttctggtccttgccttgacctcctcaggatgggaggtggactccagagaaggccttgcccagtgcccatccccgtccttcttccttcctagtgga

SEQ ID NO: 468415 - DNA, 1087 bp, Homo sapiens
tccgttatcagagtctttcgtgagcacgaaggagtcaagattaaagaatgtgtttgtttaccctggactgcattactatggaaaatgaaccaaggcctggatagtgacaatgacagtgattacaagagggatgtagtagaaggttcaaaggagcggcacatgattggccatctgctgccagaaacttcctatggcattaaaatgcagtgcttcagtgaaggagaagaaagtgagtttatcaatgtggtgatctgcgagagtaaagtaaaacgtgttcctggagcttctgagtatcctaaaggcttgagtatccctctgaattcttcaggaagtgaaggaaatgtgaggccagcaaccagccctgccagaagcagtgacatattgaccctctggaatgtgttaactgtcaaaattgttgaaacaacaatagctgtttcatcaaaaccaacggcactttcagcagtagcccttttcctgtggtctctagggtggcactttgtcctcagtatggtgtgggaatcaggccctcagtcaaatgaagatgcccatatgcctggcttctgcatccccgattgtggccagttgcctcacgagaaaatcaagaacaatgtggaaccaatctctactcagcatacttgctgtcaggataatagaaacaatgtcagctctaatacacagaagatccagaagagttcagcagaggagacagctgtgtctcttcagaaatggacagcaacattttacattggaatcctcttatttttgccacctatctcagaggactgtgctgaaaagacaacatggcctccgcctggtgttcctttagacagcccctcagaggtcctccagcagccccaggaaactggaggatgtgcaaaaaaccagtcacgttctgacttcaagtctgtaaccaactgcacaaaacaggcctgtgaatgaactatgtgaaggactttaattccaattagagaaaatcattatttatttctttgtagtataatgtcatatgaatgcatcttgaaatgtgtgcccttttatattatttatgccttaaaagttttcttacccattcctttcttcctctcag

SEQ ID NO: 468416 - DNA, 1222 bp, Homo sapiens
agtgaatttttaatgtcattcaaagggtacatctttctatacttctgctgctcctgggagctttgctccatctctcatccagctcagactgttgctgggcctgatagtctttgcatagtcaaggtggttcttgaagaactcttgtctgcacgaggatttgggagacatggtggcaagaaacttaaccaactcaacctgcttccttgcaggagtgaatccgtgctgctgcacatgccccagcctgtgaatccagagctcactatagggcccatcacaggaccggtggacaggctcaaccacttccgagactttccaaagaggccccttactgcttataatcgcttcttcgtggagagttggctccagtactcccaaatgtaccctgggatgagaagccaggaactgaccaaaatcctgtcaaagaaatacaaggaactcccagagcagatgaaacagaaatatattcaggatttccagaaggcaaagcaagaatttgaggaaaaacttgctcgattcagtgaagaacaccctgatttagtccagaaggccaagaaatctggtgtctccaagaggactcaaaacaaagtgcaaaagaaggttcagaaaaatattgaagaagtgaggtctcttccaaaaacggatcgatttttcaagaaggtaaaatttcatggagagcctcagaaaccccccatgaatggataccacaagtttcaccaagattcctggtcaagtaaagagctgcaacatttgtcagtgagggagcgcatggtagagattggcagacgctggcaacgcatcccgcagagccagaaggatcattttaagagccaggctgaggagctgcagaagcaatacaaggtgaaattggatctctggctcaagactttgtcacctgaaaattatgctgcatacaaagaatcgacctatgctaaggtatacagaaaggcctctaggccagatggcggtgtttctacattatgaatgtggcatgataagctttgtttatatggccaacaattttctcatttgtagcctgttctttcccttacactcttacacctttcttttgctttggactcacggaatcagagatagaaaatacagaatactcagaagcctcattgcattttaataaaattccaaatttatttagttcttagaaagttttaaaatacatgtgcattaaaatatccttattatcagaaatacctatattttgatc

SEQ ID NO: 468417 - DNA, 1019 bp, Homo sapiens
caagaatcttaacctgacaaacatgaattctggaatcttacaggtctttcagagggaactcatctgccccatctgcatgaactacttcatagacccggtcaccatagactgtgggcacagcttttgcaggccttgtttctacctcaactggaaagacagcccatttcttgtccagtgctctgaatgcacaaagtcaacagggcagataaacctcaaaaccaacattcatttcaagaagatggcttctcttgctagaaaagtcagtctctggctattcctgagctctgaggagcaaatgtgtggcactcacagggagacaaagaagatgttctgtgaagtggacaggagcctgctctgtttgctgtgctccagctctcaggagcaccgggatcacagacactgtcccattgagtcggctgctgaggaacaccaggagaagcttttacagaaaatgcagtctttgtgggaaaaagcttgtgaaaatcacagaaacctgaatgtggaaaccaccagaaccagatgctggaagaagatgcctgcatttcaccatgaagaagaaaaacataatttggagatgctgaaaaagaaggggaaagatatttttcatcgacttcatttaagtaaagccaaaatggctcataggagggagattttaagaggaatgtatgaggagctgaacgaaatgtgccataaaccagatgtggagctacttcaggccaaaggtccctcctactttatccaccagccacaaaactttgtggaatggtcaaggagtgagtccgtgctgctgcacatgccccagcctctgaatccagagctcagtgcagggcccatcactggactgagggacaggctcaaccaattccgagaagttacaagcaaaactttttatgactttacatttgctggtaaagtaacttcttgatagacaattatttttttcttatttacacgtctatgcatgttttctcttttttttgcagtgcatattactctgcatcatgaagaagccaacagtg

SEQ ID NO: 468418 - DNA, 1744 bp, Homo sapiens
tctggaaaattctgcttgattggtcgctgcaagggggtatgaaattatcaggatgtggacactgcattatttgaaacttttcatcaacccagaccccaaaatgacatgttgctctttcttcctcagaaacatgaattctggaatcttgcaagaattccagatggaactcacctgccccatctgcatgaaatacttcatagacccggtcaccgtagactgtgggcacagcttttgcaggccctgtttctacttcaagtggcaagacatcccaatttttactcagtgctttgaatgcatgaagacaacatggcagagaaacctcaaaactaacattcatttgaagaagatggcttcccttgccagaaaagtcagtctctggctattcctgagctctgaggagcaaatgtgtggcactcacagggagacaaagaagatgttctgtgaagtggacaagagtctgctctgtctgctgtgctccagctctcaggagcaccggtatcacagacaccgtcccgttgagtgggctgctgaggaacaccggtatagccccgccaagggattctaccaggccaaaggtccctcctactttatccaccagccacaaaactctgtggaatggtcaagaaacatgaattctggaatcttgcaagtcttccagagggaactcatctgtcccatctgcatgaactacttcatagacccagtcaccatagactgtgggcacagcttttgccggccctgtttctacctcaactggcaagacatggcagttcttgctcagtgctctaaatgcaagaagacaacacggcagagaaacctcaaaactaacatttgtttgaagaacatggcttccattgccagaaaagccagcctccggcaattccttagctctgaggagcaaatatgtgggacgcacagagagacaaaggagatgttctgtgaagtggacaagagcctgctctgtttgctgtgctccaactctcaggagcaccggaatcacagacactgtcccactgagtgggctgctgaggaacgccgggattatgtgagtttaaggatagaagcaatcagagctgaatatcataagatggttgcatttttccatgaagaagagcaacgtcacttggagaggctgcaaaaggagggcgaggacatttttcagcaactcaatgaaagcaaagccagaatggaacattccagggagcttttaagaggaatgtatgaggatctgaggcaaatgtgccataaagcagttgtggagctattccagaccgaaggtccctcctactttatccaccagcaacaaaactatgtggaatggccaaggtatgagtccctgctgctgcaagtgtctgagcctgtgaatccagagttcagtgcagggcccatcattggactgatggacaggctcaagggattcagagagtggcctagaataaacttggatggcagagtcaatgatgagattagctgtggaaatgggaaaccgttttttggaggacagtagtaatgctgtgaacttgtgaaaacaaccaagtattcagtagcaactataatgtgtctccataacgttattttacagatgcgcatctgaaatctgaaatttgggagaacatactactagtgttcgctagtgagaaaatacagctggaaggaagaagggagggaagacgaaggagagagaaacagaacgcatttgagagaaaatgctatttagactaaaatagaatactgcagatagcac

SEQ ID NO: 468419 - DNA, 574 bp, Homo sapiens
gcagcagggatagccggcttggaaagtcatgcctgggagaccatgtgacactgcctggctgggtcctgggctgacagagccccttcctgggagcattctagaaagacagcgtggaaacgcgcgcggcctggtggtcccggtagcggccatggtgctcagccccgcggcctcaccctgccctctaactccggcggcaggcgcttttcctgcaccttggcctggcgcttcttctcggcctcctccgcctccggtttctcctccttggccaccttgtaaggccacttgggtgtccgcaggtggccggtgtccgcaggtggccactgtccttggtgctgcccttccgcgccggcctctggggctggaaggatattatgaattttgtgacagggtgtatatgccctgtgacattcagagtaacgttttcctacaatattacaaaggatattaaagggtgtacaggacctgtgatttacgagtaagatttccatagaatattacactgtgtgtacaccccgtgtgacattaggagtaacatcccacaaaacgataacgaataatttcacaaggtgtacac

SEQ ID NO: 468420 - DNA, 1046 bp, Homo sapiens
gggcggtgcaagatgcgctttgttaaacagatgcttgaaggcagcatgctcctaaagaacaccaaaagctcaattccaagagtcccccacgtgaacctcccaataatatttgccagatgtgaaagcctgagccccccatacaagaaaacattcagattttgcagtgatatcgggatcttcttgagggtcacatccaacattcatgcttctcaaatctccatgcaggaagatatgactattggctctttcaggctgcacatgaagggagaggaggcctacagagtctatgctctgagaggcattacttacccggcgttcctctgcagcccactcaatgggacagtgtctgtgattccggtgctcctgagagttggagcacagcaaacagagcaggctcttgtccacttcacagaacattttctttgtctctccgtgcatcccacttatttgctcctcagatctaaggaattgccagaggctagcttttctaacaaaggaagccatattcttcaaacaaatgtcagttttgaggtttctctgccgtgttgtcttcttgcatatagagcgctgagcaagaactgccatgtcttgccagttgaggtagaaacagggccggcaaaagctgtgcccacattctatggtgactgggtctatgaagtagttcatgcagatgggacaggatctgcaagtggatatttggagcgctttgtggcctctgttagaaaagcaagtattttcacaaaagatatagacggaagcattctcagaaacttctttgtgataattgcattcaactcacagagttgacttgaatctatttggaaatgattgtgtgtgttctgaggtaggaatcaatatttagttatttttaaaaattcaattaatccagcattgttctgagcaccttgtgtatttcaatgtagaagagcacactaataatgcaggattatttatctatgtggtgagaattccaaaatgaagcccagcatggaaggtcaaataatattaactcacaggatagattagtaaaatgaaatgtgatgggt

SEQ ID NO: 468421 - DNA, 620 bp, Homo sapiens
tggctgggtcccagccagcagcaccatgctggtggctggaggcttgcgcggggggccgaggctctgtctgggaaagtctgttgcgctatatttcccaaaaacaatacaagattatctaatatacctacaggttgtacatcagattcatttattctacattactgcacctttacaacttttgcccttcatttacctattttcttcccaccaatgtaaccacctttttgaatgcatgaaacttataaaaatagatttcaaatatgagtgggaccatgagatgcagcagtctccccagaaccctgctatttcagacaaagatgtcaggggagtctgccaagaagtggaactcagaatttcatttccaaatattctcaaggccataaggctaaggaaccttacacatgtggggcagaaaaaaagaaagatcagactgaattctgactcagactctcccactatgctttaaaatttggaaactgtaaatagaaattaattccgaaaaggaagtaataatttttgaataatcaaatttgtggattcaaaggattctcatgaactgtcttttaaataggaatagtgatttttatttattttatggctgtaggtgttataactgcagg

SEQ ID NO: 468422 - DNA, 1892 bp, Homo sapiens
tgccaaggacctacgtcttggaaattccatgaggtgatctgcaggcgacatcaaggccggtctagccattgtggtcagctcctacgtcttctcaatgctcaccccctgccgcaccaaagtctgcagcagccccatgcctccaatacgacctcctctaggacgccctcctccagtacgctctccacgccctggacgccgtgctcctcctcctcctggaaagtgtagaaagagtcgtcccaggtgatgctgcgggtgtcgggcagactggagaagtcctggaactctttgcagtcagcgcggtcctcctcgacctgtgtgcctaggagtggggacggcggtggcagggtcacgcagcgctccccgccaccctgtggctgggtcccagccagcagcaccatgccgggggcctgaggcgtgggcggggggcttaggctctgtcaggagggaaagtctgatctacaaaaagagtatttcaaaactgctctatcaacaagaaagttcaactatgtgagttgaatgtactcatcacaaagaagtttctgaaaatgcttctgtctagcttttatgtgaagatattcctgtttccaacgaatgcctcaaaacggtcccaatatccacttgcagattctacaaaaagagtgtttcaaaactgctctatcaaagggaacgttcaactctattccacaaaaagcgtttcaaaactgctctatgtaaagtttttatatgaagatattcccgtttccaccgaaggcctccaagctgtccaaatatccacttgcagattctacagaaagagtgtttcaaaactcctctatgaaaaggtgaagatattcctttttccaccaaaggcctcaaagaacttcaaatatcctcttgcagattgtacaaaaagagtgtttcaaaactgctctatgaaaaagtgtgttcaactcagggagttgaatacaatcttcagaaagaagtttctgagaatgcttctgtctagtttttatgtgaagatacttccttttcgaccatagccctcaaagcactcaaaatgtccacttgcagattccacaaaagagtgtttcaaaactgctctatcaaagaaaaattcaactctgtgagttgaatgaacacaccacaaagaagttcctgagaatgcttctgtctagtttttatgtgaagatatccccgtttcaaacataggcctcaaagcgttccaaatatccacttgctgattctagaaaaagagtgttttaaaatagctctattaaaacgaaggttcaactctgtgagttcaatgcacacatcacaaaaatgtttctgagaatgcttctgtcaaattttcatctgaagatattccagtttccaacgaaggcctcaaagcagtcctaatatccactttcagaatctacaaaaagagtgtttcaaaactgctctatgaaaaacaagtttcaacccagtgagttgaatgcacacatattaaagaatttcctgagaatgcctttttctactttttatgtgaagatattccatttctagtgaaggcctcatagcagtccaaatatccacttggagattctacaaaaagagtgtttcaaaaatgctctgtcaaaaggaagcttcaactccgtgagttgaatgcatacataacaaaaaagtttctgagaatgcttctttctaattttcatgtgaagatattcccgtttcaaacgcaggcctcaaagttctccaaatatcaccttgcagattctacaaaaagagtgtctcaaagctgctttatgaaaaggtaggttcaactctgtgagttgaatgcaatcatcccaaagaagtttctgagaaagcttctgtctagtttttatgtgaagatatccctctttcaatcgaaggcctcaaagcattccaaatat

SEQ ID NO: 468423 - DNA, 1954 bp, Homo sapiens
gtcacttaccccttctttggcacctttttggtgggtcagaggtctttctcctgttggtgatggcctatgaccgctatgtggccatctgtaagcccttgcattatttggttatcatgagacaatgggtgtgtgttttgctgctggtagtgtcctgggttggaggatttctgcaatcagtatttcaacttagcattatttatgggctcccattctgtggccccaatgtcattgatcattttttctgtgacatgtatcccttattgaaactggcctgcactgacacccatgttattggcctcttagtggtggccaatggaggactgtcttgcactattgcgtttctgctcttactcatctcttatggtgtcatcctgcactctctaaagaaacttagtcagaaagggaggcaaaaagcccactcaacctgcagttcccacatcactgtggttgtcttcttctttgttccttgtatttttatgtgtgctagacctgctaggaccttctccattgacaaatcagtgagtgtgttttatacagtcataaccccaatgctgaaccccttaatctacactctgagaaattctgagatgacaagtgctatgaagaagctttagagcagagacctcatatcaagtagtacataagtgagttacccaccaggaagagagccatttgactttacagccctctccttgggacccaggagttttttaaaatctgatgccatattccctttcttcaaagcatttacaattattattaaagaatgaacaatatgattgtgttaatagtaacagtctacctctctgctagaatgtaagatctgtaatgtcttgttttccattttatctgtaaagacgtaatgcataaaacaaggagtcaataatatgtagtgaattagttaagaaattttagagttacaatgatttttaatcaagttattcctgtatgtttttgcctttctttctgagacttaatttcatttttagttagattcttgtcctttaagttcattcttcttcttatactatttaaaatagttaatggtataatttatatcaatgcagtccttttcatccaattgaacttgtactgtatacagatttttaatgtaatatttctaccttttaaaagaaaaattgaaagccaaatggataatcataaatagcaaaaatggaaactgtacaaaataatataaaatgagaaataaatctcttgtccatatctgagtgcagtctcctagttctcttcatcagaggaagtcactattatctgtttcttaagatgtttcaggtaataatcttcaaatgtaaatatatgtgtgtgattttatctatgtacagaagcttgctacttcacatagaagggagctagggcctaggatgtgggcttcataactcttcccagtcccctatcctactgtggtcagttagttgcatccaggatgcaagacaaagccctctttactcttcacaattcactctcctctcctcaagcagaaggaaggagtcacttttgttgctgcaagctgcactgcctggggtcaggggaggggtggcacaagcacttccttggcagccctggctggtgtctccataggtcatgtgctcccctattgcactggctctaagtccaacccagcactaggacttgcctaggaattgcaggccttgtgtcctaggctgcctttgaagtttacctaagagcccagagcactttagcccacagtggtgagacttgccaagaaattctagttttgacttctgtgatgagtgattcccctctgtctagagctggtccaaatgcagtctccatgggtgggtgacagttgagctcagcatggctttgctctctgctgtgacaagctttcttgcaatttctaaatatttatttttcctaataaaccttaggactgttttgtaaagcttgaatacttttcataaaattatattta

SEQ ID NO: 468424 - DNA, 6418 bp, Homo sapiens
ggggtgtacaaacaaggaatacagatcataggcacgtgtatatgcctataatgaaaaagaaaatatcttcagatacaaaccagaaagaagctttcagttttgaaactctgtttttgtacattctgcaaatggaaatttggaagctcattgatgccattggtgaaaaagcaaatatccacagagaaaaactaaaaggaatctatcagagaaaccagtctgtgatgtgtgcattccctggcagaggccattggagaaaaagcgaattgaggccattggagaaaaagcgaatttcccaggataaaaacttgaaggaagcaatcgagaaactgctttgtgatgtgtgctttcatctcacagagaatgaacgagccttcattgccatggcacatttatataaaaagaaagggagagatgttgtgggaattaagggacaccgagtggagggaccagcggaagccatggcagaagaacttaaattgtgaagattccatggacagattttagttccccaaattaatacttttataattttttatgcctgtctttactgcaatcgctgaacataaattgtgaagatttcatggacacttatcacttccccaatcacttggaaatagagttttgatagaatctgcaaagggatatttgggaatgcattatgcctatggtgaaaaataatatattttcaggtaataacaagaaagatgtttactgagaaactgctttgtgatgtgtgctttcatctcacagagttaaacaattcttttgattcagccaagtgaaaacaccatttttgtagaatctgtgaaggggcatttgcaagcacatttaaaccttttgtgaaaaataaaatatattctgataaaaactggaaagaaactttctgagaaacggctttgtgatgtgtgcattcatctcacagagttaaatctttctttggattcagcagtttggaaaaactgtttttgtccattttgtgaaaggacatttggaactcattgacgaaatggagaaaaagcaaatatcccatggtaaaagctagaagaaaactatctgagaaactgctttgtgatgtgtgcatttatctgacagagttaaacctttctcttcattcagcagtttagaaacactgtttttgtacaatgtgggaagggacagttgggaatgcattgaggtcaacggtgaaaaagaaaatttcttcagataaaaaatagaaagaagcattctgagaaactgctttgtgatgtgtgctttcatctgacagagtgaaacctttcttttgattcagcagtttggaaacacggtttttgtagaatctccaaaggtgaatttggcaggtcattcacaccaatggcaaaaaagggaatatcctgagatataaactataacaaaactgtctgacaaactgcattgtaatgtgtgcattcatctcacagagttaaagctttcttttgtttcagtagtttggaaacactgtttttgtacattctgtgaatggacatttgggagcgtgttgaggcctacaatgagaaggaagataacttctgataaaactagaaagaagctttctgagaaagtgttttctgatgtgtgcattcaactcacaggttttaaactttctcttgattcagcaataaggaaaagctgattttgtagaatctccaaagggatatttgggagcgcattgtggcccatggtgaaaaagaaaatatcttcagataaaaactacagagaagttttctgagaaactgctttgtcatgcgtgtattcatctctcagttttaaaccttttttgattcagcattttggaaacacttcttttgtccattctgcgaatggacatttgaaagagcattgaggacattggccaaaaagtgaatatcccaggataaaaacaaaagtaatctatcagagaaaatgctttgttatgtgtgcattcctcttgcggagttaaaccttttttttcattcagcagggtggaaacactgtttttctagattctgtgaaaggataattttgagtgcattgaggcctatcttgaaaaaggaagtagcttcaggtaatgctagaaagaagctttctgaagaactgttttgtgatgtgtgccttcatctcacagatttaaaactttctttttattcagcagtttggaaacactatttttattcattgttggaaaggacaactgggaactcattgaggccaaatgcgaaaaagagaacatccatggaaaaaaactagaaggaagctatctgagaaaccactttgtaatgtgtgcaatcatctcacagaatgaaacctttcttgtcattcagcagtttggaaaaaatgtttttgaagaatctgtgaatggacatttgggagtgcattgaaacctatggtgaaaaagaaagtatcttttgataaaaactagaaagaagccttctgagaaactgatctgtgatgtgtgcattcctctcacttagttaaaacacacttttattcagctatttggaaacactgtttttgtagaatttgtgaagggatatttgagagtgcattgagggctatggtgaaaaataaaatatctttagataaaaacaagaaagaagctttctgagaaactgctttgtgaagtgtgcactcacctcaccgagttaaacctttctttggattcagcagtttggaaacaatgtttttgtccatcctccaaaaagacatttgggagctcgttgaggacaaaggcaaaaaagcaaatatcccagtgtaaaaactagaaagaagctatctgagaaactgcctggtcatgtgtgcattcatctcacagatttaacgttacttttctttcagcagttttgaaacaccatttttgtagaatctgtgaagggatttttgggagcacattgaggcctatggtgaaaaagcaaatatctcctgataaaaaccataaagaaagtttctaaataaatgctttgtgatgtgtgcattcatcccaaaaataaacatttctttttattcagcagtttggaaacactgtttttgtccattatatgaacaggtatttgggagctcattctagccaatggcaacaaagtgaatatccctggataaaacctagaaggaagctatctgagaaaccgttttgtgatgcgggcattcaccccacagagtgaaatcattcttttcattcagcagtttggaaacactgtttttgtaggatctgtgaagtgatattttgtagctcactgatgcttatggtgaaaaagaaaatatctcctgataaaaactagaaagaagccttctgagaaactgatctgtgatgtgcgcattcatctcacttagttaaaacacacttttattcagctgtttggaaacactgtttttgtagaatttgtgaagggatatttgagagtgcattgagggctatggtgaaaaataaaatatctgtagataaaaacaagaaagaagctttctgagaaactgctttgtgacgtgtgcactcacctcaccgagttaaacctttctttggattcagcagtttggaaacaatgtttttgtccatcctccaaaaagacatttgggagctcattgaggacaaaggcaaaaaagaaaatatcccagtattttaacctttctttgtgttcaagaatttggaaacactgtttttgtacattctgtgaagggacattttggaggttattgaggccaaaggagaaatagcgaatatcccaggagaaaaactagtaggaagctatctggaaatcactttgcaatgcgtgcatttatgtcacagagttaaacttttcttttcattcagcagcttgaaaatgctgttttggtagaatctgtaaaggtatatttggaagcacattgtgactttggtgaacaatgaaatatcttcagataaagactaacaagaagcttactgagaaacagctttgttgtatgtgcattaatctcacagagttaaatatttttgttcattcagcagtttggaaacactgttttagtggaatctgtgaagttatacttcggagcacattgaggcctatggtcaaagaggaaatatattcagataaaaactagaaagaagatttctgagaaacttctttgtgatgtgtgcattcatctcatagagttaaaccttttattggattcagcagtttggaaacattgtttttctccattctgcgaatggacattttagagttcatagaggccaatggtgaaaaagtgaatattccaggacaataactagaaggaagttacctgaaaaaccactttgtgatatgtgcattcattatgcagggttaagcctttcttttcattcagcagtttggaaacactgtttctgtagaatctgcaaagggatatttgggaatgcattgagtcctacggtgaaaaattatcttcagataaaaacgagaaggaagctttctgagaaactgctttgtgatgtgtgcattcatctcacagcgttaaaactttccttggattcaccagtttggaaacactgtttttgtagaatctatgaaggggtatttggcagctcattgaggtcaaaggcaaaaaagtgacatccgaggataaaaactagaaagaagctttctgagcaacagctttgtgatgtgtgcattcatctaatagtgttaaacgtttcattggattcatcagtttggagacacttttttaaccattctgagaatggacatttgggagctcattgaggccaattgtgaaaaaacgaatatcccacattaaaaactagaaggaagctatttgagaaactggtatgtgttgtgtgcattcgtctcatagagttaagcttgtattttcattcagcagtttggaaacactgtttttgagaatctgcggatggatattttggagcaatttgaagcctatgttgaaaaagaaaatatcttcaaataaaaactggaaagaaactttctgagaaattgctttgtgatgtgtgcattcatctcatagtattagacctttcttttgattcagcagtttggaaacactgtttttgtagaatctgcaattgaatattgggtagctcattgagaccaaaggggaagaagtgaatatctgactgaaaaaactagaaggaagctatctgagaaacaactttgtgatgtgtgcattcgtctcacagagttaaaactttcttttcattcagcagtttggaaacactgtttttgtagaatctgtgaatggatatttgagagcgcattgattcatatagtgaaaaaggaaatattttcagataaaaactagaaagaagctttctgagaaactgctttgtgatgtgtgcattcatctcacagagttaaacctttctttggattcagcagtttggaatcacagttttttccatttgttgaatggacatttggaaggaatttgaggccagtggtgaaaaagcaaatatcccaatagaaaaactagaagagagctatctgagaaactgcatggtgatgtgtgaattcatctcggtgagttaaacctttctttttattcagcagtttgcaaacagtgttttgtagaaactgtaaagggatatttgggagcgtattgaagcctaaggtgaaaaagtaaatatcttcagataaaaactggaatgaaggtttctgagaaagtgctttgtgatatgtgcattcatctcacagagttaaaactttcttttgattcagcagtttcaaaactcctttttgtaggatctgtaaaagggatattcgggggcttactgagtccaaaggtgtaaaagcaaatatcccaggataaaaactagaaggaagctaactgacaaacagctttttgatgtgcacattcatcatgcagacttaaacatttcttttcattcagcagatttgaaacactgttttggtagaatccgtgaagggatacttgggagctcattgaggcctatggtgaaaaaggaaatattttcagttagaaactagtataaagctttcagagaaaatgctttgtgatgcttgcattcatctcacagagttaaaaatttctctggattcagcagtttggaaatactgtttttttccattatgctaatggacatttcagagctccttgacaccaatggcgaaaaagcaaatatcccagggtaaaaatgagaaggaagctatctgagaaactgccttgtaatgtaagcattcttctcacagatttaaaacttccttttcattcagtagttgggaaatactgttttggtggaatctgtgaagggatatttgggagtgcattgggtcctatggttaaaaaggaaatatattcagaaaaaaactgggaagaagctacctgagaaactgttttgtgatgtgtgcattcgtctcacaaagttaagcctttctttcaattcaacagtttggaaacactgtttttatacaatctgtgaagggatatttgggagctc

SEQ ID NO: 468425 - DNA, 2424 bp, Homo sapiens
cgtgggaggcggaggttgcacatcctggtgttgctgtgccgtgggtcctgtgcggtcacttagccaagatgcctgaggaaacccagacccaagaccaaccgatggaggaggaggaggttgagacattcgcctttcaggcagaaattgcccagttgatgtcattgatcatcaatactttctactcgaacaaagagatctttctgagagagctcatttcaaattcatcagatgcattggacaaaatctggtatgaaagcttgacagatcccagtaaattagactctgggaaagagctgcatattaaccttataccaaacaaacaagatcaaactctcactattgtggatactggaattggaatgaccaaggctgacttgatcaataaccttggtactatcgccaagtctgggaccaaagcgttcatggaagctttgcaggctggtgcagatatctctatgattggccagttcggtgttagtttttattctgcttatttggttgctgagaaagtaactgtgatcaccaaacataatgatgatgagcagtacgcctgggagtcctcagcagggggatcattcacagtgaggacagacacaggtgaacgtatgggtcgtggaacaaaggttatcctacacctgaaagaagaccaaactgagtacttggaggaacaaagaataaaggagattgtgaagaaacattctcagcttattggatatcccattactctttttgtggagaaggaatgtgataaagaagtcagcgacgatgagactgaagaaaaggaagacaaagaagaagaaaaagaaaaagaagagaaagagtccaaagacaaacctgaaattgaagatgttggttctgatgaggaagaagaaaagaaggatggtgacaagaagaagaagaagactaaggaaaagtacatcgaccaagaagaactcaacaaaacaaagcccatctggaccagaaatcccgacgatattactaatgaggagtacggagaattctgcaagaacttgaccaatgactgggaagatcacttggcagtgaagcatttttcagttgaaggacaaaagaaaaagaacaacatcaaattgtatgtacgcagagatttcatcatggataactgtgaggagctaatccctgaatatctgaacttcattagaggggtggtagactcggaggatctccctctaaacatttcccgtgagatgttgcaacaaagtaaaattttgaaagttatcaggaaaaatttggtcaaaaaatgcttagaactctttacagaactggcggaagataaagagaactgcaagaaattctatgagcagttctctaaaaacataaagcttggaatacaagaagactctcaaaatcggaagaagctttcagagctgttaaggtactacacgtctgcctctggtgatgagatggtttctctcaaggactactgcaccagaatgaaggaaaaacagaaacatatctattatatcacaggtgagaccaaggaccaggtagctaactcagcctttgtggaacgtcttgggaaacatggcttagaagtgatctatatgattgagcccattgatgagtactgtgtccaacagctgaaggaatttgaggggaagactttaaacctctgcaaaaccatgaaagacatattggagaaaaaagttgaaaaggtggttgtgtcaaaccgattggtgacgtctccatgctgtattgtcacaagcacatatggctggacagaaaacatggagagaatcatgaaagctcaagccctaagagacaactcaacaatgggttatatggcagccaagaaacacctggagataaatcctgatgattccattattgagaccttaaggcaaaaggcagaggctgataagaatgacaagtctgtgaaggatctgctcatcttgctttacgaaactgcactcctgtcttctggcttcagtctggaagatccccagacacatgctaacaggacctacaggatgatcaaacttggtctgggtattgatgaagatgatcctgctgctgatgataccagtgctgctgtaactgaagaaatgccgcccctcgaaggagatgacgacacatcatgcatggaagaagtagactaacctctggctaagggatgacttaactgttcaatactctacaattcctccgataatatatattcaaggatgtttttctttatttttgttaatattaaaaagtctgtacggcatgacaacaactactttaaggggaagataagatttctgtctactaagtgatgctgtgataccttaggcactaaagcagagctagtaatgctttttgagtttcacgtcggtttattttcacagattggggtaacgtgcgttgtaagatgtatgtaacatgatgttaactttgtggtctaaagtgtttagctgtcaagcc

SEQ ID NO: 468426 - DNA, 1812 bp, Homo sapiens
tgagaaagaaacagaatggaaagaataaaaaatcgacgtgtagtgaatgggaaagtggaatattttctgaagtggaagggatttacagatgctgacaatacttgggaatctgaagaaaatttacattgtccagagttgattgaagcatttcttaattctcaaaaagctggcaaagaaaaagttggtacaaaaagaaaatctttatctgacagtgaatctgatgacagcaaatcaaagaagaaaagagaagctgctgacaaaccaagaggatttgccagaggtcgtgatcctgaaagagtaattggtgccacagacggcagtggggaattgatgtttctcatgaaatggaaagattcagatgaggcagactcagtgctggcctcaaaagaggcgaatatgaagtatcttcaaattataattgctttttatgaagagagactaacttggcatggttgtccggaagatgaagctcaataattgttcacattgtttatgtatgtatatatatgtgtgtgtatgtatattcgtatatggattctcatatgtatatatatataaaatttggatcttggttttttatatactagtgtgacaaaataagtacattctaatgggaatcaaatttgatatgttcattttgaaagtagcgttggaagagttgttgggttttttttttttcatccgtagcactggttactttgaacaaataaataaaagctttctgtagttgcttcctttatcagaaaagaacatttgttaccatggtatatcatttcctctgcattagagaacagcttttctaaatgtttggggttatgtccatagtcattactcaatcagaacttgtgttctcataagtctaaggaccattctaggttttttatttgttttttgtttgtgtatacataaaatgcgcacgcaaatttttttaaacattcaccagaacaaaaaatcacagtatttgctttaccggttcagcaaaagccaggaaaaaccacttggcagtaatcagaatgttatccaactgtatattgtttaccttattgtaaatacttgtgaacagtggtcaatagttttatgttcctttatgcaaaaaagtatctttgacatcaatacttttgttttcactagaactactttttgaatctcctttgcatttaactcaaaaagttcatttttagagaacatcatttacatttctgcatgttttgttagtgatagagcatttactgaatcctcatataacgggtcactggatatttgatcttaagcatacaaggacctattttcataatatcaagatctttgaggttttcatatgtgtatatttacaatttctacaatgttagcacttactctgttgcacattaaaatgacttttaagaagcttgtttacaacaatattcaacatttacaattatggactcatattcataataattatcggttcataatcataatgagtagtaaacctgtgttgaatttgtctccttttttatcaattctgccaggaacctctgagttatcccataccagcattaaacttaggcagttataggctaacataccttccctaaacagtcctcttttgttcaaaatgaaattgagaggctgttccataatatgaggcattttgaaagaccttgaatatataaaaactccctctgtcctaaagcaatggtccctagcctttttggtaccaggggccagtttcacagaaggaaattattccacagactggggttgggtggagaagggatgattcaagtacattgcatttattgcgcactttatttctattattattacatc

SEQ ID NO: 468427 - DNA, 773 bp, Homo sapiens
ccgcgggagatgtggggacgactccggaaatctcgggaaataggcaataactcgagctttggcaacgtcccccagcctagggaggcgctaacgcaaggtatctttccactgaagctgccctttgcctaccctcagccatcgctagcacagcagagcagaagaaccagggatgaatgtagaccagttgttatggagatgtccgtcgctctgaggagcgctagtgccctgggaagtccccagacgcatttcaggtttcgtcgttttggcactgacaccatgattttactcgctctgagttcccaccaaggggagcccaccaacggcgtcacaggccctggccgtggcgctattgactgcagggatgaggcacagcgatgctgcagaagatggtggatagctcttaagtttcagaccacccagccctttccaatttccagtttctttattccagtcaaaagtgctttgtttgaatatcattcttgcttgcttatgtagaaaaatcttacttacacgataggatgattagaagcaacagaacataagcattcagtggctgcttcaaggtcctccctctcccatcccagaaatgccttccttatggaaaataagttttacttcccaattatgtgcatggacctctgttcattgcagcccccattggtactgggttattattattagcactgtatggctcaaggagtcagaaaatagaccatttatttatttatttatttgtttattagctagtgggtttttcctacaatcatagaata

SEQ ID NO: 468428 - DNA, 1379 bp, Homo sapiens
gccatgtatctacgcgacaggctgctacttccaaagccatctctacttcttccttcacacacttacgctatgctgcccagcccccattgcagttatgtgtggacacacaacaagttctcaccaggggaatgtgagctgaatcatctttctatcttctgggtaaatacagaggactccgaggccccagaggaaggtgaaaccacaagacagccggaacctgtggccctaaataagtcctatgtacaatgcatcttcaatgcatcttcagaacttacacctagaattctgaatttccaggcttcccacactcacttgaggcaatggatgagaaatggccactgtcctattactgcagtggggaatgcagcacaatcaaatgagaatgtgaagttacatgatctggaaactgttgtcactacacaactgataactatggagtttgaatctatgacattcacaaggattaccaagaaagatattcccttacccagtctccttcctaagattgatttcaggtgaatgggctgaagagagggggagaacatggccaagctcagggaggacagatgtttcccgtggacgaataaaaaagcactcacacttccatctgactagagagctgtgaagtcagtagaaagtaagagggaagctgtatgttggtctttcccatggtggacactggaactaaagctgcaaccaaaaacatggggtgatttcagacttttcccaggaatggatattaaattttatgagatgattttagagcatctgccggatgattatgttgtttttttctttgacctattactgatggacaatattaataaatgtgctactaataagtgaatattatattccaagaataaaatctgcacaatatagtctaaacattatcttgtaatatactactgtatgattttcattggtttagtaaagacttttatatctatctctaaaatgtcattctgggaattataacttggacatcaagttccttacactctggttgccctttattggttatccttcttttttctttttaatgggccaatcaagcacactatgtaactaagatgaaagctctttaagagcacaggtctttgttttatttgctgatttatttactaagatcctagaagtatgcctgatacattattcgtattcaataaatactttttgattggttaatgaattctctcttatattgatatttatgttctttaataattttatactctgaattatatattttttattctttgtgtctttatctggttagctgaaataagacataggagtgcatatacaaaaattttcttccatctgaatatgagggtggtataccggctgaaccattgaatatctgagaatttatttcc

SEQ ID NO: 468429 - DNA, 3189 bp, Homo sapiens
gacagagcagacacatagcaccggcctcccagctggcaggggccggcccccagcacacatcgtgaaggacacacagcaccagcccccagcgcacaccatgaaggacacacagcactggcccccagtgcacaccatgaaggacacacagcactggcctcccagctggcagtggccggtccccagtgcacgtcgcgaaggacacacagcactggcctcccagctggcaggggccggcccctagcgcacgtcgcgaaggacacacagcacacctccctgagctggagccagcaggcaagggtcacatctctacaatcagggagaagaacagagaggctgctgtgggaacccagcaggcatccggctcaccggcacacccgaaagctcgtgtggagcagggccgggcacgtgcaggctgtgcccaccctcgcactcacgttcacgtctggaaggcagagaacggcccagcagggcagcaggcagtctctgccactccggccgccacagcaaaacacccccgtcggcggcttcaagcaaccgacatttagctcacagctctggagactgtgagtctaacaggccccggcagactgtggttcacagccagcgcctcctggccacatccgaacgtaatgaagcgaagaatttctggggatagacgttcgggccatggtgacctctctgggggtgcccctcagtgtgagaaggacggagagaaggcgccggctccacagtgcggccgagcttctgtgagagacccgttgccgttcgcaagtccgagcgacgtggctggaaaaccagagccctcgccaggagagagtgaggcttgacagacagcgcctctccctccgcaggcaccggccctgagatggtacaggagcaaatctacccactgggccccagctggccgccgcataggaggggctgggtcggccgagacgtctcagagggaagctggagtccccggaaggttctgtccagaggcccagtggagggacacacagacccacccccgagagcactgaatttgggtcagcgcctgggccatctgcagccccgaagcccacaccctggggtctccaagccccccccagcacaggctagcggctccaggcagaggcttttcttcctgaggggtgtctacccggccccccagcctgcagggcagagtcacagcgcagggctggcaggcctggcagggaggacaaagggacagaggccgagtcaagacgttgtgtctcccgagcagacggagcaggtggggcctcaggcctccagggccgcaggagtcatccatcaaactgagtgcccctcattgaaattctaacggcaatgcggccacaggcagggctcctccggggcatgccctccctgcctgcctggtgctcctgagagccagacccaggtcacaaggtcatgaggccgcacgcagaggccgtccccggggagctccgggtgggcgccctgcatggccttcctgaggaccacacgcccctcccccagacgctggacagacacacttctcatggggagctgggtttttctcgggtcccctccccacaagccctgctcccgttcacgcatttcctcacgttccgggactgtgagtgctccaagctcagcctgacgtttccctgccccggccttggtgccagccgagactccgaggcctgtggggtcctctcactggagggtgacgtcggggaccgagacctgcaccctgtgcttcctttggtactggggacttcagaggtgacccccgggacctcagaggtgacccccgccctgctctcggacactacagccctgatccccaggacctcagagaaggaggacatttagacagagctgtgcacgagggggacgctgtctaccagccaaggcaagaaagaaagcagcactgtgtatttccataagcagcaaagacgccatcctaaaccatgcggacagtggtcacactgtgtgtttccataagcagcagagacgccatcctaaaccatgcggacagcggtcacactgtgtatttccatatgcagcagagaccccaccctaaaccatgcggacagtggtcacactgtgtgtttccatatgcagcagagaccccaccctaaacatgcggacagcggtcacactgtgtgtttccatatgcagcagagaccccaccctaaacatgcggacagcggtcacactgtgtgtttccatatgcagcagagaccccaccctaaacatgcggacagcagtcacactgtgtgtttccgtatgcagcagagaccccaacctaaaccaggcagacagcagtcacactatgtgtttccgtatgcagcagagaccccaccctaaacatgcagacagcggtcacactgtgtgtttccatatgcagcagagacgccatcctaaaccatgcggacagcagtcacactgtgtgtttctgtatgcagcagagaccccaccctaaaccgtgcggacagcggtcacactgtgtgtttccgtatgcagcagagaccccaccctaaacatgtggacagcggtcacactgtgtgtttccatatgcagcagagaccccaccctaaacatgcagacagcggtcacactgtgtgtttccatatgcagcagagaccccaccctaaactgtgcggacagtggtcacactgtgtgtttccatatgcagcagagaccccaccctaaactgtgcggacagtggtcacactgtgtgtttccgcatgcagcagagaccccaccctaaaccgtgcggacagcagtcacactgtgtgtttccgtatgcagcagagaccccaacctaaaccaggcagacagcgtcagctctggggaggtgaaggggctgggccatgggacagccatgggggatctaggcactatctgtgtcgttgtatcatctatgtgtggcttgtgaaattaaaactgtaaaatagaaatttatagaatgcttgtatccatatttttgtgtgatattgtcctgtggttttctcttttccattttttttcttgctgtatgttactggctgtgtctatgtgtattactgggtgtctgcctctgtgtatttgtgtgtgtctgtgtctctatgtgtctgtgtcactgggtgtgtgtgcacctgtgtgtttttctctgtcagtgtgtgttactgtgggtgtgtctgtgtgtgtctggatgtgtttgtgtgtgtgtatctctag

SEQ ID NO: 468430 - DNA, 556 bp, Homo sapiens
cagcgggaataaatgatccgcccctggccagtgctcacccgactgaccagagcgcagcccggtgaccgaagcgcacggggcgatcgcgaggcgccccctccctctccccgcgccgcctccagcgcgagtgacggcgcgccctccgggctccggagcggcggcgccgaacaatccccggcagggctcgcctcgccggtgacatcactcctgaagatactcctcgctcccagcgcctgccttccccaggcgtccgttcgtgtgcccgtctccgcctttccgcctcggaagagcgctcatcactggctggggacagagccgggcaccaaggagcgacaggatcccgaagagagagagagaaggcagcgagggaaggaggaccccggcaggcagcagcatgaaattcagcccagcgcactacctgctgcctctcctgcctgcgctggtcctcagcaccagcttcttcagcccaaaggattagatatcgtatcattgctggctgcttgaaggagaaatattaacttaaggaccttttgggccaagactatggggtttcttc

SEQ ID NO: 468431 - DNA, 645 bp, Homo sapiens
ctctctctgggcaccagcacaagatccatgttgaaccaagccgagccccaagagcccctgtacagctttagcagagcaattataccttttataggacaacatcaaattgaggaagcagggaaccaaacacaggaaccaagtgaggagaattcccagaatgatgacagaacttccaggtcttccaccatgcagcacaacttatgtagaccagcatccagagcaaagtacaggacaggaaatctcagcaaagtctctgagggggaaatggaattggcaggtgttctgtgtataaaattgtgtatagttgtcaaaaaagtagggccaaggcgtagctatatatttactctaaacgaatgggacaaagaggaggttttaacaccagtgtatgaggtcccaccacatggccagcaaaatccagatgtgaagaaagagagcacacaaaatgaaagaaaaaggcctttggaacttcatattccaatttccagcagtcaggctgaggaaacttctcagttacaaacacaggtgatgtattatgtaaaaggtgtatgattgagaggtcttaatatcaagcttcctcacgtcttcagtgaatgacaaatctgtacttggcagtcattgttaagaaaaggatggttgtctccaaat

SEQ ID NO: 468432 - DNA, 711 bp, Homo sapiens
tgagaactcatgaatacaaagaaggcatttccttctaagggcaccacctggtccaaggttagcccaggatcttatgccacaatccagaccatccccgaagtgccaccccagttccagagctcccaagcagattggttctgttgttactgtgttacaagtcagtttttccttttattcagtcctacttccttcatcccttttcagggaaattaaagtgacagttaaaaatagtgacaactggctggtagatggggacctgctctgggtgcatatccatgaaactcactgtgcatcatataaagatggccagctagacataggtaatatgtgcctcctcctaggagaggaaccaggatacaagccacgtgaaggctcaagaatcagtcctcccagactcacaaacactagagccagtgaaaaaattctcccctatgaaagcaatttcaaaaacttggaaaaagtgactgctatacaagatgcaccaaaatcaatggagggacacaggaaacatgaaaaatcagggaaatatgataccatcaaaggaccaaaattatccaataacagatcccaatcaaaaataattcctctttaaaagttcagataaagaattcaaaatactgatcttaaagaatctcaatgagatgcaagataaacctgaaaatcaatacaaagaaatcagaaaatcaatccaggatattaatgagaaattta

SEQ ID NO: 468433 - DNA, 679 bp, Homo sapiens
agaggatttcacacaaaatgaaaacaaagtatctttctgacagacagcgtatgcaggtgagggtcactgagaaggggctctccagtgttagctctaaactggctgcagaatgtgtatcctccagaaaatacaggggattgccaatcgatggaatcctgggagccccaatttttgggtatgtttgcatcaggaggaacaggaaagtcacaataaaaggggatggatccagcgagggtgaagaattggagctattaatatcatctagcgcagcagctgagaagagggtcaaaactgggtattgcaggagccatgttaaagctatgatgtactacttggatgccaggcttagagctcagtatggagcagaaatgtttcaggaaaagggtggagcagaatttgaaggggatggcagatggacacatggccacacatctggctttctcttgaatttcttaataccttgggataactgctgacatgattccccaagtttgaaaatcttgcgtaaagttgcttaagtaatggattcatgtttaccaacctagttttagctacatcccactggttttgttatgtcagatgcattcatttagtttaaagtgtttaaactttccattatgatttctgactaatcagtttttattaatttaaaaatttattaattccgcttataattttc

SEQ ID NO: 468434 - DNA, 502 bp, Homo sapiens
ggacactgtcatgggttccatgatgctctccaacaaggcccagttgcctagaaggacgcatggtttagcgggcaggcctggggctctgctgccctgtgtcacctcaggatgctgttcccacgtcccagctgcatcacaggcccagttgcctaggaggacacgtcgtttagcggccaggcctgggcactgctgcccggtgtcacctcaggatgctattcccacgtcccagctgctccagcttcagctgctgctcaaactgctccaggaggatccatgttcctcggcatgcctgaaaatgaaggtggaaaccaggaagcatgctgactggggcatgacttacggtggggaccaaggcttctatccagagcgcataggcaaagctctctggtgtgatgagggttccaggctaacgtccccaccactgtcatccagtggtcctggagggaactactgagaaagagtaggatatctatgagagaaggcatctccacttcttcatcag

SEQ ID NO: 468435 - DNA, 822 bp, Homo sapiens
tgcagatctgcggcatgaagggagcctgtgccatgctgctgaaagcagctccaaccgatgcatgtgtactgctcctcaaccccagactgtcaacactcactcctgctgcttgggctggagacactggcctcacctcctgcctgctggtctctgagtgtctcaccgaaggacaagggatgttcttgcagaacaaggagaagtattcctttttctgtttgccaaggagaggggtccctagagctccgtggggctccacactccacttgggaaataagatgctcctctgccctcacaaatatgcgtcctgtccctcatcgtatttggtaacttcccttagtagtcagggctctgcagagaacctggagaatgcctgtgccaccatcagcagtgagactaagccccattgttacggcacacgggttggatctctacgtgatatcccagatgcctgtgccaccatcagcagtgagactaagccccattgctacggcacacgggttggatctctacgtgatatcccagatgcctgtgccaccatcagcagtgagactatgccccatcagggcgactgcgagcagagcctctggacttgcttctattgaggaagttcagagacaagtttgatgtttaattacagcaaggatatatttctcagctaagctgatgcgcgacactgcctgttcgtttctttagttctgatactcattatattcatttcctttttcagtatcaaccttcatgtaaatgattttattgtaaaaatggaaaaagttaagatataaataaacttaacagatcaaaatattcctgattatatgtaca

SEQ ID NO: 468436 - DNA, 734 bp, Homo sapiens
ggcagcctgaggctgatgtgagcactgggctgggagtcagcggttctaagtgtgagcactgggctgggagtcagcggttctaagtgtgagccccagctctgcaacctaccaacctatttgggactctccacttctcatctgaaaatgcataggccagaaatagctgctgccctgtctgctgttatcatctcagtcagtgaacaagtgtgtggggatcatcagtctgtaccaggtacccctgtagacatgggactggcattgtgcgttcagacatgggccctgactgcacgtctcacatcccagtggcgaggagacagacagcaaacagtcacagtgggcccctgggtgtgggcggagggaacagctgaccacagcaatgaagaagagatgacaagaagctaccggggccactggttcctcggctccctggtcctggaggaggctgggctagacttgggaggaggggaggaggtgtctcctgctgccaccaggaccatggctgccctccctcacttgccgtgggcctccctccctctgcccttccctccctcgccacctgggggtactcagtcacttacttccacactcgttctttaatgtccatgagcaaacccggagatgagggcggctatactcaggacaggatcagggtccatgatgttgggtgtttacagtgtctcccaaacacatcgtgacagaggaccaggaacctccagagagggcccttcccagcc

SEQ ID NO: 468437 - DNA, 922 bp, Homo sapiens
gtgtgcattggcagagggacagtgccgcagtggggatggggtgctcaccctctctggaaactcctctctcctccccccaaatcacttcatgcttggggcctttgctgctcctcctcctctgcccatggggcttcttagtctccagagacctaagttcacatagggctgggcaagattgagatcaggggactcctaacacagccaacttgtctcagagtttccaagaagacccccatgcaggggcaagggtatggaatgtaaattgagtcaccatgggggatgcaggaaagagggtcctggtgctgtgtttcttctccactctgtgcctctgtgctggaggtgagggagaagagtccaggacagtgtttgaaatgctcgaagggatcccagggagttgccagttccactgctctggggctctgcaggctccagcagaggctgttaccaaatccagcaaccacagctttacacaccatggggtctccagcaatggacaatggacacactgtccactactgaggccccatggagaccagcacagaagcagtgcctgggtccaaggagcctccttccatcagggggtctacgggaggagtagccaggccaggactggcagggagagcaccccagcaggggagggcctgtgtggaaactacacggcagaggaagactttgagcagctaaagggggtctccagaactgactcatcttatacctgcaagtttgtgtcctttgacctttgaccatcatctccctgtttctcctacccccagctctttgtggctttcattctactctatttcaatgattccaacttttctagattctacatataagtgagatcatgtagtatgtgattttctgtgcttgctttatttcatttaacataatgtcttctaggtttatctatgtcattgcaaat

SEQ ID NO: 468438 - DNA, 5323 bp, Homo sapiens
gtagtttgatttagctgttccacaatgtatatacatttatcaatcttcttgtacaccacaaatatttataaattttgtcaattgaaaaaataaacaaaaatgtaaaacaaattatttaatgaatttcttaaacaatatttctgggacttggaattgcatcaaatatatagatcaatttgggcatatttggagggaagctgtaccctgcaaaggggcagagctgctgaagaccatgggaacccacctcttgcatcagcatgacctggatgtgagacatggaatcaaaggagattattttggagctttaagatttgactgctccactggatttaggacttgcatgagagctttagaccttttgggttggcccatttctgccatttggaatggttatctttacccaatgcctgtaccattgtatctaggaggagttggtgatcggggatttaggcatcgtggcaatgttttatttttcaagctgtgtgataagcctataggttatcatgttattattcttgtgcatgttatactcttcaatattacatactgaattttgaaatataagaatgttttgattcatgtagtttggcactctgttattacgtgtacatgtttgaaattgttatgtctacctggtgattaactcttttatcattataaaatgtcttgtctttccctaagaatttttgtgtcaaattctattttgtctgatattagtataagcattccagctctttttgatgactatttgcatgctgtatctttgcttttaatcttcgggtgtcattgaatctcaagtgttcaacttgtagacacaagatagttgagttttttttttcatttattctgccaatttttgcctgtttattaatatgtttagtctatctatattcaaagtatacatttaatattcacccccataatacattgttagtgttttggctttaaatattgacattttaaaatgagaagcctactttcataatctttaatatgtttgaaaaatgtattatttaccttcctagggatattttactggatagagaattctagaagtatgtctatgtttcttttaactcttttattatgttgttccattgaattttgccttacctagtttctaaccacatagctatggcctttcttgtatttggtctattagcccaaaacatggccttgtgcctaggcttacaacaaatatttatgaaatccatacgtatacataagaaacaaatgtgttatcaattaatattaccagtttagtagccttggaaaatgtctcataaaaactttatgtcagagtttcccttatctggaaatcaaagagatgagcgaatatcattaaagttttttatactctaaaattgtttctccgattttctttgattttcacaactatctgctgagaaagaaagatactcattttaattttcagattataagtgagaaaaacatttttcaaaaggattaagcaatctgtttaaaattgcatagctaattagtaaaaaggcttgggctcaaagttgtttgactttatactttatttcgagaaatacattattatatggagaaatcccttctactgtagcttaactcctcctttaaaaaaggaaaacaagcaaacacaaaaaatctttgtgtttatatcctgcttcttcaagagattgtgagcttcttgaaggccagagctgtaaattatatatttttgtgatttccccaaagtctcaaatgtgttctacacagtgcagtaaataatttgatataattctctgcaggaaaattgatccagtgctgaaaaccagtaaacaattctcattaactgtctctgtacctcatgtgtcacacagaatttgtcctatggtaagtgattaaacctggttgttaaagcaatgaatgatttatctagcagaatgtcaagttttgaagccctcccacctggaccctttagcctcaaggctgccataccacagcccaggttctgttgagaaagatgttgccggacagtctagaagggtcctgatgtttttctcatgatgagatgagtttatgcgtttagaggactaagggcacagtggtaaaatgccgctcatcacaccgagtcaagggtacgtgccgaccccactgaccgctgtgcatgtgccctgatcgccggccagaggagcgctggccgggcggtttctccactgtatgcaaaggccccccttccacgctgcattctaggaagaaagtcactatgggcagctcacatttcagagtaagaagtgttgaggcaggtggtcatagttgattgttaaccagtgttgaggcaggtggtcatagttgattgttaaccggtgttgaggcaggtggtcatagttgattgttaaccagtgttgaggcaggtggtcatagttgattgttaaccagtgttgaggcaggtggtcatagttgattgttaaccagtgttgaggtaagtggtcatagttgattgttaaccagtgttgaggcaggtggtcatagttgattgttaaccagtgttgaggcaggtggtcatagttgattgttaaccagtgttgaggcaggtggtcatagtttgattgttacccagtgttgaggtaagtggtcatagttgattgttaaccagtgttgaggcaggtggtcatagttgattgttaaccagtgttgaggcaggtggtcatagttgattgctaaccagtgttgaggcaggtggtcatagttgattgttaaccagtgttgaggtaagtggtcatagttgattgttaaccagtgttgaggcaggtggtcatagctgattgctaaccagtgttgaggcatgtggtcatagttgattgctaaccagcgttgaggcaggtggtgatagttgattgctaaccagtgttgaggtaagtggtcatagttgattgctaaccagtgttgaggcaggtggtcatagttgattgttaaccagtgttgaggcaggtggccatagttgattgctaaccagcgttgaggtaagtggccatagttgattgttaaccagtgttgaggtaagtggtcatagttgattgttaaccagtgttgaggtaagtggccatagttgattgttaaccagtgttgaggcaggtggtcatagttgattgttaaccagtgttgaggcaggtggtcatagttgattgttaaccagtgttgaggcaggtggtcatagttgattgttaaccagtgttgaggcaggtggtcatagttgattgttaaccagtgttgaggcaggtggtcatagttgattgttaaccagtgttgaggcaggtggtcatagttgattgttaaccagtgttgaggcaggtggtcatagttgattgttaaccagtgttgaggtaggtggtcatagttgattgttaaccagtgttgaggcaggtggtcatagttgattgttaaccagtgttgaggtaagtggtcatagttgattgttaaccagcgttgaggcaggtggtcatagttgattgttaaccagtgttgaggtaagtggtcatagttgattgttaaccagtgttgaggcaggtggtcatagttgattgttaaccagtgttgaggtaggtggccatagttgattgttaaccagtgttgaggcaggtggtcatagttgattgttaaccagtgttgaggtaggtggtcatagttgattgttaaccagtgttgaggtaggtggtcatagttgattgttaaccagtgttgaggtaggtggtcatagttgattgttaaccagtgttgaggcaggtggtcatagttgattgttaaccagtgttgaggcaggtggtcatagttgattgttaaccagtgttgaggcaggtggtcatagttgattgttaaccagtgttgaggcaggtggtcatagttgattgttaaccagtgttgaggcaggtggtcatagttgattgttaaccagtgttgaggcaggtggtcatagttgattgttaaccagtgttgaggcaggtggtcatagttgattgttaaccagtgttgaggcaggtggtcatagttgattgttaaccagtgttgaggcaggtggtcatagttgattgttaaccagtgttgaggcaagtggtcatagttgattgttaaccagtgttgaggcaggtggtcatagctgattgctaaccagtgttgaggtaagtggtcatagttgattgttaaccagtgttgaggtaggtggtcatagttgattgctcaccagtgttgaggcaggtggtcatagttgattgctaaccagtgttgaggcaggtggtcatagttgattgttaaccagtgttgaggcaggtggtcatagttgattgttaaccagtgttgaggcaggtggtcatagttgattgttaaccagtgttgaggtaagtggtcatagttgattgttaaccagtgttgaggcaggtggtcatagttgattgttaaccagtgttgaggtaagtggtcatagttgattgttaaccagcgttgaggtaggtggtcatagttgattgttaactagtgttgaggtaggtggtcatagttgattgttaaccagtgttgaggcagatggtcatagttgattgttaaccagtgttgaggcaggtggccatagttgattgttaaccagtgttgaggcaggtggtcatagttgattgttaaccagtgttgaggcaggtggtcatagttgattgttaacgagtgttgaggtaggtggtcatagttgattgttaaccagtgttgaggtaggtggtcatagttgattgctaaccagtgttgaggtaagtggtcatagttgattgttaaccagtgttgaggcaggtggtcatagttgattgctaaccagtgttgaggtaagtggtcatagttgattgctaaccagtgttgaggcaggtggtcatagttcatagttaaccagtgttgagacatgtggtcatagttgattgctaaccagtgttgaggtaagtggtcatagttgattgctaaccagtgttgaggcaggtggtcatagttcatagttaaccagtgttgaggcaggtggtcatagttgattgctaaccagtgttgaggcaggtggtcatagttgattgctaaccagtgttgaggtaagtggtcatagttgatagttaatgagtgttgaggcaggtggtcatagttgattgttaaccagtgttgaggcaggtggtcatagttgattgttaaccagtgttgaggtaagtggtcatagttgattgctaaccagtgttgaggtaagtggccatagttgattgctaaccagtgttgaggtaagtggtcatagttgattgtcaaccagtgttgaggcaggtggtcatagttgattgctaactag

SEQ ID NO: 468439 - DNA, 1255 bp, Homo sapiens
ttaatttccagtaaggaggtgtgggagcagacgtatgactgtggagttcagcacacatcccctgaccatgcctgccagaagctaccacaggaatggaatggaaatggctgctgagggcacactactgtgtcaactcagagtcagcgtctatcatataagaggacagggcatcatcctctgcactgactggggcatccacttcccagaggaggacactgaggcccagagaagaaagtttgccaaagatgacaagggcagtctgtgtctgcactgggcccagcccctgagtcttgacgttcctacttcagcccctcgtgtgcccccaaggacttgtactatgggaaacattctgagggaaattgccatttccctcaaaagaaacctgaggctattcctgaaaacaccaagtccactgagaatcttccttgagttgccctttgctgctggagttgattttagtgctctcggactccagggctccagccgcagttagaaacacaggcttttgactcttcttaatctgatgattgagaatggggatttctcaatgggccttcagtcctgcctcacccaggacctgggttcaacagcccaccctggtaggcaattgtgcaggctaaggcagatgatgcctaggcagcagtgggctctgtgtagtgattaaaacaattgcagcagctgcagctgccgtgtactgagagacgactgctgttttccatccgttttctcatttaatcctatagcagcacttttctcatgaggaatattcccagaacctgccaaggtctcccagctagtcatggagcaggtggagccaggaacaagcctgtccaggtgcccacaactcattgtaccgccctggggaccaaatatagcttctaacccaaagggctgctgtgagcaccaaggaaatcatgtgggtgcatgtaccagctacactaagcagaggtcttgtgatggttatgtattaggaaggaggacatgagttctaagctcactagctttcttttctcccaatgcaaacccctcccgattaacttggttcttcagttggaaatgtttgcaatgggagttgctgatgaagaaacttgctttcgtgatgggctggctgattgatcaaaaagaccatacgggattctgttttccccaagtaggaactgccccggctcttcaagcttcattaagttttaatttaatcattgccactttgcactggaattgtgttttatgagcacattaccagaagttgaaatct

SEQ ID NO: 468440 - DNA, 833 bp, Homo sapiens
aagggagtgaagtccgtggagatgcctttcatgggtcttttgttttgcaggggttttccaagactagataggtgtatatatagtgctgctttattggggcagattggagcaggaaggagaaataatgagaatgtcataataaagggtcctgacctggacagaggcagccccatctggttccccgtctctcctgcattccacatattgggaccaagagcacatgacttttctgctccactgataataatgagtagacatctggacccagagctttcatgcaacaatttgctcaggggagaaagatgggggttggtggaggcacagagagagcctcctgcagtggtgcaggtgtggaagaagtgtcaacttggctgtggggagtctggaagcctggaccccctgcgcagacccctctctcaaatcttgtcaccctcaaggtactggtaaagactcattgttgagagagacagagcgagagagagagagagagagaaatcctctaccctgagaggaaggggagaaaacagttctgagctccgaatcttctatcagtaccatgctatcttcagctacaagaggagggacagatgaaaaatcattgctgcaggcaagatccaccaatgaatgctaaatttagtgggcaaaagtctaagatacaactggtgtttacatggcttaaagctatctcccccggaacatttagcaacttaaaaagaaaaaaataacacctttacagcatggaaccctaccagacattgtcttaaccaagcaatcaaggtcgacatcattagtaaggacatactgactttaggtatccctgataccattgctct

SEQ ID NO: 468441 - DNA, 1074 bp, Homo sapiens
caatggtttatacagaaaaaaaataaatgcttggttagtgctagttttcaaaataatgaaattattttgtttgttcacaaacatcctccactggcaacaattagttttcctaatattctttttaacatttcattacaaaataacgaagtcgaatatatttgctgggtttcattcattatggttattaaatttaatgatgtttaaattgtcccatcttcagctggtgggagcctctaatgttgcctcctgagcctttctgacacgatcttattattctgtaatctcttccttgctttctagtaggacaaaatgtttcaggctgaaattgtacattccctgcctgagacctacaatcagccatttttccaaggagccctgggtccgtttgatgataaatgatttataatgatcacaatttggatgtcacaggttttcatcactactgaattgtccattgtttctagcttccagtagatggagatagataatatgcatttataaattacagggtttttacctcacttcatcagtcttacatctgattcttctttatcttatgctgagaatgctggttctcaatgacaccactttaattgatcattttcttcttatcacaatcagtcacaaaacaaggtgtgacatgaaaaataggaacatcactttggaagaggtgagtgttgaattcaagaaccaacgcatggagatatttacttttcttctcaggttgaagaccaaatgcctgtttgtggccaatggagctgagtttggtgactatgctgaaaatctgccatccgctgctcctgagtacggtctgtatgccatgtcctttagccttggtgcagctgaaagctgcagatctggagacaggcatgggaaaggctgggatctcaggaataatctgaagatcagccccgtcattaagccgatgtggagccgaacacagcgtcctgctgatactgtggaaagtgccagagtgaacatttttatcaaatgctggtctcaagaacttatttcagccttggaggaatcaaccgactagcaccaacgaaggaggtgactaacagacttctggtc

SEQ ID NO: 468442 - DNA, 560 bp, Homo sapiens
ggattttctcaggccaaagcagcactgacagccacaggccttgagtctttctctgcattgggctgcctggagttaagggaagtgacaatggacactcttgtggctgccacagctggcagtaagctgggtcacacccaaagctcatggcctcccacaccattgcagtactgggacttgcccaaggcccacaattgctatggcctgattgctgctgatgtttattcaaggcctgaggtcactgtgatggttacagaaattgcatctgagaacaacagcttggaattggaggctttgggcttcttcctggtgctttattttactctggctgagctggttcctgttgcgagacaaagtcccctatactctgttgtctccttttcccaagaagaagcagtttgtctctcaagcttcattgcctggaattataggagaagtaatgcaggcacttttgtgaccaccacagctggtgttttactgggttgtactccaagcccacagagcagcacagcaccgggacttcctcaagggccacaatccctacggcttggctgccactgaaa

SEQ ID NO: 468443 - DNA, 1358 bp, Homo sapiens
agctggggttcatgggcagagtggtgagcgacggagaactggggttcgtgggcagagtggtgagcgacggagagctggggttcatgggcagagtggtgagcgacggagaactggggttcgtgggcagagtggtgagcgacggagagctggggttcgtgggcagagtggtgagcgacgcagagctggggttcgtgggcagagtggtgagcgacggagaactggggttcgtgagcagagtggtgagcgacggagagctggggttcatgggcagagtggtgagcgacggagaactggggttcgtgggcagagtggtgagcgacggagaactggggttcgtgggcagagtggtgagcgacggagaactggggttcgtgggcagagtggtgagtgacggagaactggggttcgtgagcagagtggtgagcgacgcagagctggggttcatgggcagagtggtgagcgacggagaactggggttcgtgggcagagtggtgagcgacgcagagctggggttcgtgggcagagtggtgagcgacggagaactggggttcgtgggcagagtggtgagcgacgcagagctggggttcatgggcagagtggtgagcgacggagaactggggttcgtgggcagagtggtgagcgacggagaactggggttcgtgggcagagtggttggctgccccactgtcagcctgttctgaaagtaggaatgaccctcagctgagctgagatgttgctggtggagactctaagactgtggattctgactccctgggctcaggaaggacggtgctgggaacaaggtgcagacaaggcacgacgaagctggagtgcctcataccacccccatgaaagcgacgaaggactcccagaaccattcctgggggcccgtgggaacgaggactttgggggcacaaggacgagctgaagaagtcttcctgattgtggttgtcagagggaggacatggcatcgtggtgggccagagtatcggcctcaacaccacccacttttcaggctgcagtctccaccgtggccgctgtgtgcattggagggcacttggcagcatccccagcctccccactagaaaaccagatgccaggagcatatgcgcccctcctcaaggtgcaaccaccagaaacgacgccagacattgccaaatgtcccttgagggtggggacaaatgcccctcatcccccttgaggactgcagctggaactcaatgaagagcagcggacggccttggaggcacctggattcctcccactcactgatgccacaaacctgtaaaacgacttgtccagggccacacatcttaaaatctcccactgtcaatcactagaccccatttcttccagag

SEQ ID NO: 468444 - DNA, 1165 bp, Homo sapiens
caggtcctgatcatgttctgtttcttcagctggctgctggcaacacagatgttcaaactgtcacgaacatttatcaagctgtgtgaagcctgctccccttcaccttctgccaagattggaagctctctgagggcctcacaagaagcagatactggtgccatgcttcttgtacagcctgcagaactgtgaggcaaataagcctcttcttggtataaattacctgcctcaggcattcctttatagcaaagcaaatggacgaagacagaggactctggttgagagctccgattctccatcttcacacttctcagggaagaggcaagagctgccctgtccaatggggtaactgctacctacatgttgctatttacattcaaaataactaaaattaaatacagtttaaactctagttcctcagtcccctggcgctacttctggagtgctctgcatcgtcaggcagcggtggctgctgcagtagacaagcagatagagcacatctccatccccacagaaccagaatgtgtgctggcctagaaggaccgggggaaatccccgacccgctgagcccctcaaggcactaatgctcatcctaagcaatgcactggctccccgactgctggtccaggggaggagaaaagagcccttccgaatggatgtgtctcaggctggttctcagcctcaagaggagtgcatcccacgtgtcctgcccagctttctctgcccctcctccttcctgggctcagtactcccccgctcaggagtacatctccagcaagctcttcgtgaaggggatctattcaactctccagggtaacacaattctgtcagctccttgcatatatctcacaccatgttatcagcctaggaacagctgtgagctcctgcaggagtgctggcagacagacctgagcacctcacaggagaaaaattgccctgcaccttggagggaggtgctgggccaggcacagtgcctgggtagcatgggcagtggaatcccgtggtggaaggcacagctcagagcagtctctaagccagtccagggagggcatggtgtggaaagttcccagagctgaaaactccccaggccgctttcctgcgtcaacgctctgtagctttcttttgacagttggttactttttcacttcttgtgaagccatccagggat

SEQ ID NO: 468445 - DNA, 723 bp, Homo sapiens
ggtggacggcgtgtgggtgaccttcatgtgaggagaggagttaaccaatgcagggaatgaagaacggaatggatgaatgggcagtgcagtggcatagttaggatacccattttacagatgagcacactgaggcccgaagaattttctcagtgttcctatgtctaccgcacctacaagctgcccttcagactaggaatcctggttcctaactcagtgtccctatgtctaccgcacctacaagctgcccctggtaacaacgacagtgtgaagtgggcagcagagccccacaccaactctgccggcagcatcaccttagactccccagcttctggaactgtgaggaacaagtgtctgctgccctgcagggacagctcaaaagctgccctggacctagatccagctgcctgccaaggaccaccctgcgcccacctccctgctgcaaagcctgccctggcctctgacctgaaggtgggaggccagaagaagctgcccagggctgcagcttttactctctggaatggagacctgtcttgggagattttatcaaaacttctgttcccagatctctctttccagacaccttgatccccaggatctaaagctgcctcctcggaactctattctcagtcaaagccctgtctcctgagtgggccccggtcctccttgctttctgccagcctctgcaaggtcccagcccccttgcacatgcccacagctgtgagc

SEQ ID NO: 468446 - DNA, 692 bp, Homo sapiens
ctacagcctgtcttgttctgaatgctagcacaacttttagatatcattgactgctgtttcttttcaaaaggtaccgttcagacagaatcagctctttgccctgggcagacaggaaggtggcttgatccaccattgctaagaagggctggagactgtgagtcaaatgaaaagcatgagaaagaatgtgtgcatcctctagaggcaaagactggctccctggctgacaaccagttaccagctgtgcaattgcccacaaatgctcacattcccactgctaatgccaatattgtcctcaattcagttttttcacttagagattttggtgtaacctggataatacgatttgctggactcactttgtatgacaaaagaaggtgtgcaggaaaagcattattaagattaattttttccatagaaataaatcctaaagttcatttatcttccatatcaaaaacacaagcaaaagatgcataaactgattagattatttagtgtctggagaaagaatgtactgcttctgttatgttattactcacaatacctcaagttactatgaaacaaacgacaaagaatcataacacaataaagttcatagtactttacaattcccatgctcaaattatattggaaatacctgtaatctgtagttacgttaactcaagaatttttgcaaaaagctgtgatccttaccc

SEQ ID NO: 468447 - DNA, 1194 bp, Homo sapiens
ggtagtgtggcccgcagggacgccgacctgctggagcgtcgtgccagcatgggctgtggcaagcacgtgggccagcaggaggttcccgctgcacagctgtgggaggaggacacgggagaacacaatgacatgagtgactgtcctgcttggttaggaaagggaaacgtaaagttgtggaattctgttgatgatggatgtgagagtggtgaagccctgcgggatgatgtagaggacttccacatccctggaggccccccgagagctgggggtgagctgctgggtgatggcagtaagaacatgtggtatattattgatgaacgtggggactctgaggagtcctcagaggaggacacggcagagcccaatggcttcattgattgcccatcacgaggggagagggagaagctgggtgaggctcgcatggaccttggggtgtccgtgctgggggaccgttcataagaagagccagacaagaccctactgttcttaggtgcagacatgattaggaaacctgcagctccgaggggcccccactaatgttctaactcgcagaaggaaggagtgtgtgtgcgtgtgtgcgtgtgcgtgtgtgtgtgtgtgtgtgtgtgtttgtgtgtgtgcggtgtgaggtatgggccccttaaggaaatggaaatcaaccaaccaatgggacagacagacagacagacagacagagattcacttgcccaagtgttctgtcctgtcctctgaatccgctttcaagtcgcaagacgctgtgagctccaagtccacgcagagtccgccaaacgctccggccgctgatccgctccgcgaagatctgagtacaggccagccagggtgggtttaaatagcctcgggcgcagcctatcagcggaaagggcggagcttcactcctcctttccatcagtcacccccaactttcccaggctacacctcgtaggaaactgttctcctgctttgatttcatgcgccacctttgggacactctaagaacttacaggttttcttggccagatttattaggaattgtgtgcactgaaacactgaaaaccaactagtgggttctgtgcttcccacgttgtggttttgacaccagcagcatccttgccacatcaaacccccgagaccgcagatctgtgttgtacaagaatactactgaccctgagcatggcagttgaaagagtcttttcg

SEQ ID NO: 468448 - DNA, 513 bp, Homo sapiens
catgtcttcacccccagccctcagggactctcctgtgtgtcccagctactctccaaccatgcccagatttcagcgggggtcagttccaggcacccagttcgaagccctggccaatctactagcccacatgacgcagttacctggccatttctccacggttcccgtgagggccccacacccaggcgcacaagaacccctcctgcattccgtcctcacacgcaggcctgtccatctacttgctactgtcacactcttgccagcagaagaggcccctgtaatggccgatatcaccacccagtctatcctcaccccacagctgtgcagcgggaacctcctgctggcccacgtgcttgccacagcccgtgctggcacgacgctccagcaggtcggcgtccctgcgggccacactaccggtgacatggctagcatgaccctccttcctggcagtgacactgttgatgtgaaccccagtttcacatctgtcatttgtaaataggaccattttcccttttc

SEQ ID NO: 468449 - DNA, 1224 bp, Homo sapiens
tcctccaggccaccagaccccttgcagccttcttcgttatgattgcatgtgctttgtcacagggctcttctctgagatctgtcttctctgagtggaatccatggccagtacaagtaatgtgactgagttgattttcactggccttttccaggatccagctgtgcagagtgtatgctttgtggtgtttctccccgtgtaccttgccacggtggtgggcaatggcctcatcgttctgacggtcagtatcagcaagagtctggattctcccatgtacttcttccttagctgcctgtccttggtggagatcagttattcctccactatcgcccctaaattcatcatagacttacttgccaagattaaaaccatctctctggaaggctgtctgactcagatattcttcttccacttctttggggttgctgagatccttttgattgtggtgatggcctatgattgctacgtggccatttgcaagcctcttcattatatgaacattatcagtcgtcaactgtgtcaccttctggtggctggttcctggctggggggcttttgtcactccataattcagattctcgttatcatccaattgcccttctgtggtcccaatgtgattgaccactatttctgtgacctccagcctttattcaagcttgcctgcactgacaccttcatggagggggttattgtgttggccaacagtggattattctctgtcttctccttcctcatcttggtgtcctcttatattgtcattctggtcaacttgaggaaccattctgcagaggggaggcacaaagccctctccacctgtgcttctcacatcacagtggtcatcttgttttttggacctgctatcttcctctacatgcgaccttcttccactttcactgaagataaacttgtggctgtattctacacggtcatcacccccatgctgaaccccatcatttacacactcaggaatgcagaggtgaaaatcgccataagaagattgtggagcaaaaaggagaatccagggagggagtgaaaaaagagcttagggatgaaaaagtgatacaaaatgtatgtctgattactctctgttcttgaaatggattttgattttagtgggatattcaagaatgacagaaacaaatataaaggcttaatgatactgctgctgtgattctgcttagtagccaaagacacttggtatgctggtgtaatgtttgaaggacagag

SEQ ID NO: 468450 - DNA, 948 bp, Homo sapiens
gagggtctgcggcgtcattcttgaagtcactacctctccttcatggagatctgctactcctccgctacagcccccaaactcatctcagatctgctggctgaaaggaaagtcatatcttggtggggctgcatggcacagcttttcttcttgcacttctttggtggcactgagattttcctgctcactgtgatggcctatgaccactatgtggccatctgcaagcccctcagctacaccaccatcatgaactggcaggtgtgtactgtccttgtaggaatagcatgggtgggaggcttcatgcattcctttgcacaaatccttctcatcttccacctgctcttctgtggccccaatgtgatcaatcactatttctgtgacctagttccccttctcaaacttgcctgctctgacaccttcctcattggtctgctgattgttgccaatggaggcaccctgtctgtgatcagttttggggtcctcttagcatcctatatggtcatcttgctccatctgagaacctggagctctgaagggtggtgcaaagccctctccacctgtgggtcccatttcgctgtggttatcttgttctttgggccctgcgtcttcaactctctgaggccttctaccactctgcccatagacaagatggtggctgtgttctacacagtgataaccgcgatcctgaaccctgtcatctactctctgagaaatgctgaaatgaggaaggccatgaagaggctgtggattaggacattgagactaaatgagaaatagaggctgagtctttgtattgatacttgggtttagaatgactgttgagtccaaactgaaggagcagaataggttgaaggaaagttcacaggacctgttagttgcagattattctacctggcctctctctttaaaaagttcattttcataacttgaatagtatttctttttgtggag

SEQ ID NO: 468451 - DNA, 1043 bp, Homo sapiens
aggcataagaaagaaactgagaagaggaaaggaaaatcacaaagcctcaaccactgttcttggaggaagctcctgtgctttaaaatatggttgctacaaacaatgtgactgaaataattttcgtgggattttcccagaattggagtgagcagagggtcatttctgtgatgtttctcctcatgtacacagctgttgtgctgggcaatggcctcattgtggtgaccatcctggccagcaaagtgctcacctcccccatgtatttctttctcagctacttatcctttgtggagatctgctactgttctgtcatggcccccaagcttatctttgactcctttatcaagaggaaagtcatttctctcaagggctgcctcacacagatgttttccctccatttctttggtggcactgaggcctttctcctgatggtgatggcctatgaccgctatgtggccatctgcaagcccttgcactacatggccatcatgaaccagcgaatgtgtggtctcctcgtgaggatagcatggggcgggggcctgctgcattctgttgggcaaaccttcctgattttccagctcccgttctgtggccccaacatcatggaccactacttctgtgatgtccacccagtgctggagctggcctgcgcagacaccttcttcattagcctgctgatcatcaccaatggcggctccatctccgtagtcagtttcttcgtgctgatggcttcctacctgatcatcctgcacttcctgagaagccacaacttggaggggcagcacaaggccctctccacctgtgcctctcatgtcacagttgtcgacctgttcttcataccttgctccttggtctatattaggccctgtgtcaccctccctgcagacaagatagttgctgtattttatacagtggtcacacctctcttaaaccctgtgatttactccttcaggaatgctgaagtgaaaaatgccatgaggagatttattgggggaaaagtaatttgagaagagaagtagatgatttagttagggaaaataggagga

SEQ ID NO: 468452 - DNA, 735 bp, Homo sapiens
atcatcatcgaatgtaattgaatggaatcatcattgaatggaatcgaatggaatcatcatcgactggaatggaatggaatcatcatcgaatggaaaagaatggaattatcatcgaatggaatcaaacggaatcatcatcgaatggaatcgaatggagtcatcatcgaatggaatcaaaatgcatcatcatccaatggacttgaaaggaagcatcatcgaatgtacttgaaaggaagcatcatcaaatggaatcaaatggaatcatcattgaatggaagcaaatggaatcatcatcgaatggaatcgaatggaatcatcattgaatggaatcaaatggaatcatcatcaaatggaaccgaatgtaaccatcatcaaatggaatcgaatggaatcatcattgaatggaatcgaatggaatcatcatcaaatggaaccgaatgtaaccatcatcaaatggaatcaaatggaatcatcattgaatggaatcgaatggaatcatcaaaaaattcatcgaatggaatcgagaggaatcatcgaatgaattccaatggaatcatcatcgaatggaatcgaatggaatcatcgaatggccacgactggaatcatcatcaaatgggattgaatggaatcatcaaatggacacgaatggaatcacaactgaatggcaatgaaaggaatcatcgaatggcatcgaatggaatcatcatcgaatagaatcaaatggaataactgaag

SEQ ID NO: 468453 - DNA, 959 bp, Homo sapiens
tatcagctcctggagcttctctcaagtgggcggcagcagcagcttccggggtggcctgggcaccgcatggctctgggtggaggctatggtggggccagtggtatggggggcatcacagccatcatggtcagccagaacctgctgagcccccttaagctggaggtgaaccccaacatccaggctgtgtgcgcccaggagaaggagcagatcaagaccctctacaacaagtttgcctccttcatcgagaaggtgcggtccctggagcagcagaacaagatgctggagaccaagtggagcctcctgcagcagcagaagacagctcagagcgacatggacagcatattcgagagccacatcaacaaacttcggcgccgctccctggacatggacagcatcatccctgaggtcaaggcgcagtacaaggagatcgccaatggcagctgggctgaggctgagggcatgcatcagatcaagatgccaacacgaagctgtcgagctggaggccgccctgcagcggccgagcaagacatggtgcagcagctgtgccatggagcaccaggagctgatgaacgtcaagctggccctggacatcaagatcgccacctacaggaagctgctggagggcgaggagagctagctggggtctgggatacagaacatgagtgtccatctgaagaccaccagtggctactcaggtgggctgagctcgacccacgggcacctcacaagccctctacaacaggccttagctacagcctgggctccagctttggcactggtggaggctccagctccttcagccgcgccagcttctccaggtccatggttgtgaagaaggtggaaacgcgagatggcaagctagtgtccaagtcctctgatgtcctgcccaagtgaatggccatggcagcccctaccagcctgcccctcctgcggctgccccagggcccgtggaggaagcc

SEQ ID NO: 468454 - DNA, 580 bp, Homo sapiens
cactcctcagcccttgggcggtcgatgagaccgggcaccatggagcagggggcagcgctcatctgggaggctcaggcaatgcaggagcccaaggtggagggcagggagattcaggcatggcgggctgcaggtcccaagccctgccctgcagggaggcagctaaggcccagtgagaaatcgagcacagcagctgctggcccaggtgctaagcccctcactgccccgggcttgtgggccgtccggctgctccgagtgcggggccggccaagcccatgcccacccggaactcgcgctggcctgcaagtgctgcgcagccccagatcccacctgcgcctctgcctccacacctccctgcaagctgagggagctggctctggccttggccagcccagaaaagggttcccacaatgcagcagtgggctgaagggctcctcaagtgcggccagagtgggcaccaaggctgaggaggcgccgagagaaaagggggagagtatcacatcaagggaacaccccatgggacaaaggaaactgaacaacagccttcagccctagaccttccctctgacagaggctacccaaa

SEQ ID NO: 468455 - DNA, 674 bp, Homo sapiens
aggaggtgcctaatgagagaactcgttcccctatcaaaaataccatctgcaagttacttgtgtacataggaaaaagtccttcgcatttctggtataagaatttaaattaaaagaggaatgaagcagttttctatccacaatatttgtgaggatgttttatactcctgcttaaagtttaagttgctgattacttttcaaatagataatttggtggccatccacttcaccagagacgctttcaagaacatcagtaagctctttgccaatgagtccaggagagacctggaaccagccatggacctgttagtgctgtctcacggacaccagaccaacatcctggacatcatcctcatacaccaggaagctcttacccaaagtcacggagaacaggcaacatgtggcagaagggaaaacagaggtgcagaggctgatggcgttcattatcacaggaacaggatttctttggccacttcggctgaaattcacacttccatccaattcactcaagcgagagacttgaaatcacagatggaccatttcttgcaacaagagatactatcttttcaaaaagtcacctaaaatttgatagtgttgaatgactagctattctattgtggactttttccagttcacgggtactttctacagcagaatgataacagtatcaaagagct

SEQ ID NO: 468456 - DNA, 766 bp, Homo sapiens
tttggttcagaaatttgctcaaagaaactcggagagctcaaaatgcaaatccgtggggctccaaaatccaagagacaacttacactccccagctactctgagagatcagaggacacaagtggatcctgtgggcaccttacttgttcactcagcactcctggggcagctgacagtgtgaacaagcagccctgggaggagaggatgcttggcggcgatgccacagtcatagtggttagacatccatctctcacgttaaggggtgcttgccagtcagctgtgactgtgtctcaggtaactcgggaccaaatgaagatgtttatacagcaggaatttaagaaagttcagaaagtgattgctgatgaggagcagaaggcccttcatctagtggacatccaagaggcaatggccacagctcatgtgactgagatactggcagacatccaatcccacatggataggttgatgactcagatggcccaagccaaggaacaacttgatacctctaatgaatcagctgagccaaaggcagagggcgatgaggaaggacccaggcaaaaagctcctgctgagatcactgtgaatctgacccataccgattctgcgatcaaacaggaagcgtgttctgaaggagtaggagctgaaggagaaaaatatagcgtttcttctggaccttgacaaatggataggtctaggcttcttcagattggaaaaacaggaaagctgtctaagcaaagagtgtttaagttcaggggtacatgtgcaggac

SEQ ID NO: 468457 - DNA, 636 bp, Homo sapiens
tccccgaagccttgcagcagtacagcccaggtaagttgctgaggctgatgggtgtttctgaggcgattggacagtgtcagtcttcagctgctaagctgagaagatctgggaagtcagtcagagagccttgggccagagttccagggcatctcagagtggctgccaggcgagttggacagtctgatttccagtggtgtcctgcacagatgagacatggcttaggaggaatcccaagctgcgagcattccttaacccaaacagaggctaacagagaagaaggaggaatggagggtggaagtctgtccatagtgaaggaggcaagcccagagaaaagagagggtataggcatggggggggtacttgccccccaaggtgaggtggtgcttgccaccaaggtgaaggatcaaagcaagcgtccccttggtgatcagacacctctgaaatgtggttgaataatcagagaaagtaaatgctagctaatgttgatagaatgtcaataccaaatatattttctaaaaaagcaaagtcatatttacttccatcctgtaaacctttatgtggaataacatacacagtgtcattttcatgttaatgatgagagaaaacacagtttagagctaatgagggatagttatc

SEQ ID NO: 468458 - DNA, 618 bp, Homo sapiens
tgggagcccaccacttgcatcagtgtgacctgaacatgcactcacaaggggctcctatgggagagaccgcagtcatgcctggagtgatggacaaaagggagaacaagtccccttctccaggacccttcattccaggcagtttgtgttcagaactcaaaactgccctaggccgcaagctttccccatggagacagaaactgtggctttcaggccacatccctcctagtatgcccaagaagcaggatcacccaactcctgcactcttggctgcagcacacttcctattcatccctgggttctggtcaaatgaatttgtctccactcgagattatatcatgaatctcagttctgggatacatgatgtgcagaacatgcaggtttgttacatagctatacacgtgccatggtggtttcatgcacccatcaacccgtcatctccattagttgatcttcaatctatgatatcccttcttctgcttgatcaattcagctattgatacttgtgtatgcctcacaaagttcttgtcctgtctttttcagcgccgtcaggtcatttatgttcttctctaaactggttattctagttagcaatttgtctaacctattttcaaggttttt

SEQ ID NO: 468459 - DNA, 966 bp, Homo sapiens
ctgcatcacagtagaaggtgcatgatatcagtgtggcctattggtgaggccaattgctgtagcaaagtcttcattgtaatgtgcaactgcctgatagttttatcgatgatgctaaaggacccacacttggtcaaggctctctcatggttccagtgtatatggaagctgtattcagacctatgctcttacaaagaattctttttcaatgagacgtttcagtttctgttctggaccatgttcggtatggaagagcacagcgtggtggacgtgcctcagtttctggtgcccgagtttgcaggccgggccctctatggcatctttaccatcatcatggtcattgtgctgctcaacatgctcattgctatgatcaccaactccttccagaagattgaggatgatgctgacgtggagtggacgtttgctcgctccaagctgtatctgttctacttctgagagggcctgacactgcctgtgcccttcaacatcctgccctcctcgaaggctgtcttctaccttctcaggtgatgacctcagagctcccactcccaccccctaaatccccagcccctgcccccatttccctgtcctctaaccgacctcttcccaccactgaaatctctcaggagaatttgccagttcatttgctgttgctgttcctgctgcaaaaccaagaagccagactatcccccgatccctacttttgtgtgttcagttattctcccattcactcccttacccagtcactcattcacctttttcattcactcgcttattgactcgttccaccaacattcatcactatggcctcctttgttccaggccctgtcttggagggagagacggggcactgtagggcagggacacacgggaagctttcagtctgattcacctgccccagcttcacccacccacctgacccctagcccacaaacccgttcctcacttcttccagttctccctcaggaa

SEQ ID NO: 468460 - DNA, 2373 bp, Homo sapiens
ccgccctatggtgggagaagggcccgatgtggaggctcacggagcgtcggcggaaggcgcacaggatgctaaagctttacaatggcctctcgaaaggggaggcggtgggactccccgcggggcccgaccccctggactccactgatctgaacggggcgcacttcgacccggaactttacctagacaagctgcctagagagtgccctctggcccagctgatagacagtgagacggacatggtgccgcagatccgggctctagacagcgacatgcaaaccctggtctatgagaactacgataagttcatcccagccacagaaattgacaaacagtgtaaaactacctcccagtgccaagtgtataagtgtgtccagaattggtgggttcttggtctcactgacttcaagaatgaagctgcggaccctcctggagtgaagctgcagaccttcacgtgcggggccaccaagcccacgcccacccagaactccagctggcaagcaagcagcacacgtagccccggttctggctcatgcctcttcctccacacctccctgcaagctgagggagccagctccaaccttggccagcccagaaaggggctcccaccatgcagccacgggctgaagggcccctcaagtgccaccaaagtgggagcccaggcaaaggaggcaccgagagtgagcgagggctgtgagggctgccagcgcgctgtcacctctcataaggagtgattaatctgagcttctccagaaagtccattcctggtaggcactgggaataagaaatctcagagtataaaaaacatcaagtggtagcacttttgtgaatggctcccaaattagatcctttacctttttttttccatgaagcacagctgcacaaaacacgcttagcctgagatgaagcacatattagagaaaagttctctctatagcattatgtattactcaaatgagcattaaaaagaggagatgggacatgctctctctagctattattacctccactatacagttgacatacacaagctcattattgcattatgctttattcaacaaaataactttaatgttgaagcttaaattgaattcgttaaaacatctttgtctccagcataatgtgcctcaagtgtcttcttggtgcctgaattttctccacaattatagtgctgaagctatggaaatggtgaaattatatgcaatctgcaaaacaatgtggctataacatggtaattggacttccacataattaaatgaacatttcctcatcagagctgttccatcagagacccaaaggctatcgtacaaatcacccacttaggaaaacctttattcccagtagcctataaaaatctggttatgcaaacagatttgcttactcagtaacatgaatggcttctcatagttaaaaagtcatcaatgtgattgacctataatctgtttcctctgtgaccaagtgtcatttttattttgacagttaggagccttttgactctttcacagctggcatgaaggcacagggagggaaatctcaaaaaccaacaacctgtgtattcccagcctattaatcaatagaaaatcacttcaactggattagggtcttgtacctggcagaaaggctcttatggacattggaattggatttttacacttgatatgacacctccttgagtcagatgagattcgtgtttgatagactcttgccaaaacattgctccaggctgccctggggactagactctgccttaggcatccctctgactcctgtttgcttttacactgaggctgctttaagtcgcaccttgatctgaagccttgggcttctgttcctattgcttgcttttgttgggagggctgtgcagcttcttgacaaattgcaaaggtgcccacgagtttccaagtccccaacaacaaaaccagatgacaaacaaggatgcagcccacggctggggagacagatttcatgtccacacagatattccaagatgctgaactgaaatccaccccgaaacctgttttctctctcatttaagttcagtgttacctgggggcttgcagggcagggctggtgaccattcccagggcaaagatgctttgaaatgtcaactgagaatggtgtggtggttgacagatggcactctctccttgcaactggctctcagcagggggtgggaggaaatccttgacagaaccaatttacatgactgtttggaggactctggctagccccaggaggtgtttgcatttttaaatggttactagtgtcagaatgtttcatgagtaagagcacagcctctatgttggatgccctgaatttgaatctcagcattgccactttgtatataaccagaggatggatttggggacccaatgg

SEQ ID NO: 468461 - DNA, 625 bp, Homo sapiens
ggacatctggctcacagctggcctgaccaatctgaacaacaatggcaaagcaggctttatcaggcctgaggttcagagagtttagggatttacccaaggttgcggagcagtcagcagaattgagatttgaccctgatctatccagctgtggaaagattctctgcgacggtacatcctctgcgatggtgcgccctaaaggccatcgggttatacagctctgtgtagcccctgagcaccagttcaccttgccaggtaacacagcttgctgccttgaccatactgaaccagatacactttccttcaaacaccacactggtccctcaccccatcctagtgttcttcactgtacttacagccatagtcatttactcactgtgtgtctcctgctctacaggagtgacagagaaatcagtgccgtggttgggaaaataacccatattgagctgactcatcacccgaaccaacagttgacaattcctttgactgctagtgatatgtttaaagtgaaagttttgatgacataagtgaaaatgaagaagtagaatcaataggcttaagattgttttttagggtgtcagggctgaaacatgaaagaaagtgagggtttggcaaagcccatattttt

SEQ ID NO: 468462 - DNA, 679 bp, Homo sapiens
tccctgagttttctcttttttcagttgaatatccccagttcctccacatctgctgttttctgagtataatgacaaactgtagggtaatgaggcagattctcaagcatgattcaggctgtgatcctggagttggtgctcaagccccagtccagatgactcttagactctggcacaccgagggtgacagaaccctacattgggatagggactcaagtctttgtgagttgaagcagaaaagacgaggactcaactgcagaggtccaagtccactatggcaagtgaatagatacaacaccagggtgggagtcaaggactgtgaggaaaaagctcatgggcaacaaaatgcccagggcaaaggcaccatcctccacccacatatgtgcccacaaagaagaaagccagaaaaccagccagatagatggctgctgaaacaattcaagagagacatgatgatctactataatggcggtggagaacagatagaaattacttttgttaaaatacttctgggcggccaaatttcaacctgaagccaatgttcgtatccaaatcacaaataggaatgagaaatatgtttgggttatttccccccactctcatttttacttcctcaatctaaactttcctttatgttaactgttaacagaagtgttacttctgttaatacttgaagacattg

SEQ ID NO: 468463 - DNA, 1501 bp, Homo sapiens
aggaaaaagttaagtgaaagaaggcagaacagaataattcgatgacaatgggcttcagacaaggggagagaatgacaacttccctcacaaactgtgtgacttttaaacccacttctataaaaccaaaatggcaagagtacccatcttatctagcactgtcccagggctgttgtgaagatgaaatgataggcattgtcgagaagctcagtaacagctgttctctgaagacttccctgatggtattagatgctgttacagaactggactgcctagcaagaattgatataataaaatcactcaatagtagaggccacgcgaagcttttaacttccagaagcaaggatccttctttgtgcccaaacgcaatacaccagcaaagtctaaacaaagcttgtgccacactgaacaaaggaagaggcaaaggaatggaaaggggaagtaacttgcataatgtcacagatagtacgtagtgaaaccaggacttaaacctaatctgtcactaaaaccaatatatatttagaatgagccagtaggtataatggtaataaacacaagactatgagctctccaagggcaggaatttttgtatttttgtaatgatatgattcaaggggtctggaacaatgctagttatatagtaggtactcaataaatattcactaaatttggatgatcttccataatactgtattagagccataccatgatactcactgctgcattcaatgggtatgatagtgtgccacgactaagcaatgttacctaataacctagcataagatctggctttaccacctgcgtattctaggacgccttagagtttcacattaataataatatataagatgtaaataataaaccctactctctaaaaggatgtgaagttatgctgaagtatgtgaatgtggtagcatgccactgacacgataaaacttactttcactcttctctaaatccttttctagcaacaggactgtcatgcacaggtatgcaggttgtatgcacatgactccaggagataccttttacattgtaatctctgtaaacagtgactcttgaagttcaaggaatctaaatggcttcatacagcagttctgaatctagcatagtaactacagcaactagatgacaatgagaacacggtcattttcaagtgatccattcatcattcagtgaattaacgacctatagatcaaggtggatttattttaccctaaaatttgacccattccagaaacagtttttaaatgtaccaagtgctgattaagagcaattcaacaaatgcatcatcaaatatatgcccaaatatatgcccagttctgtgctaggcatcaaagggagaagaaaactgagttaaaaacatggttcacatccactcccctatagaaacttccactttactgtcccccagagacttccatgtcaactcatgcattagtcacttcttcattcttattttatttggcctctcagcagcactgaatagtctttattaaaactc

SEQ ID NO: 468464 - DNA, 965 bp, Homo sapiens
ttaatctacaagctgccgaaaggaacaactcaagtcatactctcctcactcaagtcttgattgttaacgaaatgcatttggctccaaaagatatgggctccaatggagaagcttatgagtgctgccatagaaatgaagtgaccataagcttcattcctgaagtcagcgagaccacgaacccactgggaggaacaaacaacccggacgcaccacctttaagagttgtaacactcactgtgaaggtctgcggcttcactcctgaagtcagtgagaccacggacccaccagaaggaggaaactccagacacgtcagaacatctgaaggaacaaactccggacacaccatctttaagaactgtaacactcaccgcgaggtcttagatttaccagaccaaatgccacagggaaaccccatgtttcatttttccaccaaaaggagcatgatctgcacatgtgaccaaatcagaagacaaatgtgtagatacttgccttaccctaatatcaaacttgttttgaagtgtgggtgatataacttttactcctctctatcctaacttttatttaatgcttaagaaagccaacaatgtaacctgaagaggtcaaatgtgattaggaaggacccatagacatgatattatcagaaagtggctgacctgtgtgggcatgtatcaaagaaaaatgacattttttcccatatgtttcctaagaaataggacactgaaatattgttccacaaaacaagatgaagaccgtggataacaacaataataataaataactaatgtggtgcttcacattttaaaggatacaaaactatttcacatacattatttcatggctttcctattcgcatttacaggtagtgcctatttttcttggactgaagcacatatttcccaactgctagtaaggttaggaatgttatcttgcagagagtgctccgttgttagccctcaccaataatt

SEQ ID NO: 468465 - DNA, 951 bp, Homo sapiens
actgcctgcacttcttggctcatgacttcttccttcaaagctggccattgcagcgtgaatttgaaaattttaaatgtaatttgtaaagctcgaggttccagctgccttaattctgaagaatctgcctgtgcaaggattttgaataatgcagaaagtggaagacagcaagctccaagaaacttaaggcctgagactgcaggctggtactcacggactaagcctccaggcctgccctggtacccatatagccccagacttttggcccaccccagcactaggtcagcacccctgggttcaggcaggaagccagcacccatggtcacaggcttcacttcttcccagtatcagaccaatccatgtggccccactctccaggccagcccctgtggtttcacgttccaggcctgctccagcagactgagtgtttgggcttatcccagtagtccctggtgtgaggccagctctcatgaccaaggttccaagtttactcctacagacctgagaaataagacaggatttatggtgtcaagaataactagcccgtctattggttttggacatgacagaattatgtaggttttatatcactgtaaaagacaacaaaatccttggcatatgcatcatatattggatagtttaacatgctgtgctgtaaaataaaaaatgttatcacacatctatggagagtgagagaaggaatatgaatgaggaggatgcctaaatgagaagatttggaaaaaaaaaaaaaagatatttttccatatgtttttctagaattttagcatttatgtttaggtgtatatttgatctaaaaatatattctccatacactatgaggtttgaaggtacatgtgcagatttgttacataggtaaactcatatcatgggggtttgttgtacatattattttgccaaccaggtactaagcctagtaaccaatagttatttatt

SEQ ID NO: 468466 - DNA, 555 bp, Homo sapiens
taagataagatacagacacatttcttcttggccatgaagatgagccaaattgccttagctatttggtcttacccatggtgcaacacttgccagaagtttctccagggaaattatgcagctctaagcagctccagatcttttagccccaagtttcctcaaaataacctggacattttccacactcttcagttccacctcactggtccctggacgagttgtgaatctatcaataaatcctttaaaaggaaaagttcctataacctggtcaggggtggcatgggaaaggaagacttggaaagactatttgcattctgcagtgctgaagaagtacaagaggagggcatcactcattctctggtcttggtctgtaggaaaatgaggaccccaagaaactgctggagccacaaatatggcctcggccatgtggtgcaaaagcctgtgtgggctcctgccaagacaccaaaatagcttattcatattgaaattttagtctaatccaggcccatgatagaccttggatagtgccaatttctaaagaagagaacatgtaaatag

SEQ ID NO: 468467 - DNA, 543 bp, Homo sapiens
aaatcgggcttcatcaacttactatgcttccaggagcagcgctgcccaagaccatgagaacccacctcttgtatcagttttggaaacttccttcccatgcattgtttaacaacaacaacagagggaggtgctgttttaaaataattcgtgggtcaaatagaaacttggtggatgttggtcactgttttggtgtagtctgtggaatgggtcaaagggggatagttttcacactgaaggaaaaaaatgagtattctattcttgatgatgaagaaaatgggtgcctgaaaggtctagtcattaacaaagttgaaagacacctagaggagtaccgagagccttggaggatgagcacccacagctgtttttcactgcagctgcccctgaaccaaaccttctgggcttcatgcggatttgggttctgtctgacaactctctgggaagatccccctgccaacacaaattgggaactaaccaaatgagtttattaaatgaaagaaaagaggtttgcagaggacctgaaatctaggtattgacaatcgagac

SEQ ID NO: 468468 - DNA, 1775 bp, Homo sapiens
cttctcacacacgcagaaagaagtgagacctgagctagcatgctgtcccctcatcatgagatgccctgcgccacctcaggatgctggcgagtgtccccactggcaagaaggccctcaccagatatactgtaagaaaatcttcaaattcattgtacattatcagttccccaaggaagacgagcaggttctgcattccatctcaaaatgttgtaaggcatttttatcagacaaaggcatccttctcacaagccttccacaactttcttcctcttctttaaaacacatacaaactgtacaacttgaacattgtaacagtgaatcttcctaccgagatctgtacggtgaccacagcaccagagtcaatgttcatcaaatgacaacttatcacatggctgaagaacacatgaatttgggctatagaagaatagtcattccgcagaaggaaaaggctttattcagctgggagcatcggcagactcaacgtctccaaaaactgagcaccccgagtgagcaattcctgtcccttttaagggcttacaactctaagggggtccgtgtgagagagccgtgatcgattgagcaagcaggggagaatgatattctgcttctgaacaccagccctaccactaaaatgctatctatccaagttgtcctccaaggccacacaggtggtgtgagcaacatatagtttgccaaagaggacaataatcagatcattttaatgtatataggcaatttattgccccagagacaggatggatccagggacaagatggatctgtcaagcaacctattaatgccaatattaaaggcttacctatttggggaattcaacttatgtacaattaaattaaattcttactttcccaagttttgtattttaactctgtcaatacatatgtatcgaaatatttttccacaagttttagaatttgttctttcttttttaaaaaattattttgtatgtgccaaatgtccttttaccctttttcaacatgaatagccaaaatcattatttatttgcaatgaaaactgccctaaataaattgctttcttaaactaaacaattcatttatttgtgataatccaaactttctcccctgctgccatctttgtttcaactgttcattaaatttgatataatcctgggcccctgcataggatagagttctttgaaaactttcttatatattgaattattttttaaatttgaaacacaaatggacattttccttcagatgcctgaaactacactatagaaatgtatgcttcatattttcaggtgctgtctgtagatgttggtatctgaaaaaaatgcaaattcttatgataatttgtaaaactttcattgtaataagagccattgtttattaaatgtctactatgtgtcaggtaatctctttatatatttattacatcgaaatcccacaaaaaaatcatcaaagtacatgctaactagcggataagagaaatggagatgctgagaagttaagtgacttatctaaagtcacccatctgaaactggcaactgacccaagttatttctaattccaaaaccatgagcgtttgaatacaatacaatttaaacaatgttttaataatttattatgaaagaattcaaatgaacagagaagttgcgaatatagtatagtgacctccaatatccttgaatccagtttccctattaacatctcaatgcatttgttccatggcattcctttttttcctccccttttcttccctcccttcccttcctttccatacttttctttttc

SEQ ID NO: 468469 - DNA, 556 bp, Homo sapiens
aaaatatagaggcagtctgctatggaccctcttctgcaagtctactgcactttgttggatgcccacttcagactctgtttgcctgagtatcaccagtggaggctgcagaacagcaaagattgctgcgtgctccttcctctggaagcctcatcccagagaagcaccagcctgatggcagctggagctctcctgtatgaggtgtctgtccacccctgttgggagttctctcccagtcaggaggcacagggctgtgatgccaaccgccgctgccacaagccagatgctctgtcccagggagatgagagttttgtctgtaagcacgtgactagagctgctggatttcctgcagagatactttgcccacatgaaacagagagaaaagaattctcatgtggtttaagacacaagtttgatggagatttccaggggattcaaaagctagaagcaactacagagctataaatactgtgaaaccaaatacacatatgcagccttctcaggatggggttaaactctttgcagagctgtggttcactgttatgtaattctaaaggga

SEQ ID NO: 468470 - DNA, 557 bp, Homo sapiens
aacattgccatggcatctgtaaactgtcatggtcctggccctccctcagaggtagtggaggaggaggaggaaacatttgaatgcagatttaggaagccggtggacagtgaatatagaaagaaggcaattttttactttctgcggaaagggtacactcgccagcagttttgccatgagaggagcttcttctccattggaagctgtcactcaagtaattataatggaggtggtgataggaatggtaaaccttgtgatgggaacatcagtgataatatgagatcatataacagagacaccaaacctagattcagagactcagaaaaagatttctcaaaagaagtgacacctggactgaccttaaggatgagtaaaagcccaccagctgaacacagcagtgaatctcttgaaggcagcagatagttggctggttacctggtacttttatctcacagctcttaagattctttcctttgtcttaactttagataacctgatgacaacgtgcctaggtgaagatctttttgtgatgaatttcccaggtgttctttgtgtttctc

SEQ ID NO: 468471 - DNA, 2066 bp, Homo sapiens
ggtcagtttatgatactacagggcctgccatgaatacttatccgtaaaatggaatggagacccgtgaacacaggggaggagcttctgcatgttagtttccagcagtcaactaaggtaacacattgtttccaactaatcattccaaagccatccccagctgcttacaccaaacttactctcatggcaagctgtacaatctacacatatcaccttatcattcctggtgtcctatgtggttcccatcaacaactttctctctcttgctcatgtgtcatacaagaagggtcttggcggtggtctgacctgccatggactgtccatctgcccggactacagcgagaattcgatgagggagaagagtcaggcctgagaccagtgcgaagaaaagaagggtcattgaactattataaaccagtgatgtttctagagttttcctccaatttcatcaaagaaggagaaacagatatagtgacctaacacgtagtttttagaaactgttgttacagagttaagagctgaaactttcacaagtttttaaaaccaacaaacaagcacaagaaaatataatattttctatacaaggtattctgatgatataatagttttatattcattcatcttattaatcaaagatggaagtaaacaaaagaggtcatagatgtttttgctaataaaaaagagagggagttccttactttcattatttaatgttaataataatcataattggaaaaaaaaaaacccatagattcgaagttaagtggcttgcccaaggtcaggtttaccaaaatatcatttattctatattcaaaggtctttcactcaaaagactcattacctgaagtattttaatgaaaatattatagaatttaatataaaaataaactattagaagatggagagacaaggcttcaggagtactctcagtgacataccgagtaaaacttttcttctttagagacagccttgtaaaatggcattttgttttacttaaaattttaatcgtctttccgtaaagtaaactgttgaggacagattatacctatactgaagctcttagtataaagtacttattttttccttaccataggtttgttaattttttaaaacttttagttaacatttgttatttctgatcataaatgtaatgcaaaaaacgttcctgaaaactgaagtataaagtatttgttcccttaaaggtcagggacaagataaaaatatgtgctatcattgcaattgttcaaagagtcctggctgatataaccagataagaaaagaacgttaataatctgaagatacatgattatctacaatggaacaattattagaaatcatagtttcagaaaggttgccagatataaagctaatattcaaaaaataaattactggtcccttttcaaagacaagtcaaaaacttaagagaaaataagatcatttcctttagcaacaaaactgtaatgtgtctgtaaattaatctatcaagacctttatagagaaatttataaaacatgatggacataatagaaaatataaatatatggaaaattacaccacaatcaacattatgacttagtattataaaggtttcaaaactatcctaattagtcaataatttgaaaatgacttcaacaaaattaacaatatatttataatattaataagctaacttaaaattttatataataaataattggaaatattcacttaagtatataacttcaaagcatgaggacaatggtacatgctcatgaagatttttttatacaaaaattacaatttgaattattttctaccataggaaatattcaaaaagtcttcctgttagacatacagtatatggcaaaagatagaatgcctataatgaaactcccatgtctcagctgttgtaaatattaaaatgcatactacatataaaaagtaccatgcctagttattcaaggttttcaaaaacaaagatgttgtaaagatatatgcaataactattactaaagcataatattataacattatttaaaaagcatgtgctttgaagtctgcagacctagaatacagttcttctctatcac

SEQ ID NO: 468472 - DNA, 1651 bp, Homo sapiens
aatattcgggtgggagtgacccgattttccaggtgcgtccgtcacccctttctttgactcggaaagggaactccctgaccccttgcgcttcccaggtgaggcaatgcctcgccctgcttcggctcgcgcacggtgcgcgcacacactggcctgcgcccactgtctggcactccctagtgagatgaacccgaagtcttctgttgatgactattgtgtgagaacagacgaaacactgagttttcctcaaaaaccacggttaaaggtgcttggtgaagaaggaattccagcgtgtggtttctctttctttgagaacctttattgttcttggagctctttgaaaggcaaaggactaaatttgggagtaaaagtggttgtaagaatatacagacatttattttctcatgcttcagcttgctttcttttcctggagaagaaaccaagggtcacggtgggtgatgtggtggcagagtcagaactagaacttgggcttctgactcttaccctgaggctcctttcactgcttcgtgtgaaagcctttggagtgtgagtgtgtctgttaatctgggagtcattaggatggcagaatagcgaggtcacctggattagcagctaatgaattccctaccctttgttctgataacaggataggacaataaaatattattcttaagcttctgagagggaatttacttgactcaggctggtatattttgcaaattagtgatatcctgtgcacagctctgtcctagaatgcctcccctgcactgcagtgttgatgtacaagtcgtccccctctttggacttgccgaatctctaacagtggctgcgtggatccatgatttcagcttcaactagggggcttctccttcatcattacagctcccactggacttcagtcatgatatccttcaactttcccaccttgctctgcagcctggggctgtgtcatgctgtgtcctccagagagagcagcccatcaaaggcatttctcatccttataaccgtggttttcatttctaacaattccatttgattctttcttatcgtttctgtctctctgctaaaattatccatctgatcttgcacattgttcgccttttccattagagcctttaaaataattatagttattttaaattctctgacagatagtttcaacacctgtgtcatacctgaacgtgattctgatgatttctttgcctctcgggaatgtgttgccttttcttgcccttttgtacgttcagttgaaagcgtgacatcttgtgtagcatggtagagcctgactgaaaggattttccccagtgcctaggcaggacagtgttcgctgcccttctcttcacagatgaagggtgttgttcctgatggaagatgaggtgagcagggtctgggtagagtggtcaggggtgtatgctcctccctcagcagctgctgtgaccttcccccaggtcgaccacaaaggacactttcttcttaaatctttcctcactcttttctgtgggaaaactcctggtgggatttgtagagaaaaaagtccctaagaagacatggacctgcccaattgctacagcctccaagggcttcagactctcttgccagtacacacttagcctttgtaaattcaccagccatcccagctgaactctttctcccc

SEQ ID NO: 468473 - DNA, 1296 bp, Homo sapiens
agcaaactgtgttcctgatgcagccaaaagctgccacgacactgcccagagagcgaggggagtgtgaagcagcagcactggccggcagcggccctggcgagtttgcaggctccctggctctgcagggacagagggagctgggagttcacctggagtggcccacagacttagccatcaacccaatggacaactcactttatgtcctcgacaacaatgtggtcctgcaaatctctgaaaaccaccaggtgcgcattgtcgccgggaggcccatgcactgccaggtccctggcattgaccacttcctgctaagcaaggtggccatccacgcaaccctggagtcagccaccgctttggctgtttcacacaatggggtcctgtatattgctgagactgatgagaaaaagatcaaccgcatcaggcaggtcaccactagtggagagatctcactcgttgctggggcccccagtggctgtgactgtaaaaatgatgccaactgtgattgtttttctggagacgatggttatgccaaggatgcaaagttaaataccccatcttccttggctgtgtgtgctgatggggagctctacgtggccgaccttgggaacatccgaattcggtttatccggaagaacaagcctttcctcaacacccagaacatgtatgagctgtcttcaccaattgaccaggagctctatctgtttgataccaccggcaagcacctgtacacccaaagcctgcccacaggagactacctgtacaacttcacctacactggggacggcgacatcacactcatcacagacaacaatggcaacatggtaaatgtccgccgagactctactgggatgcccctctggctggtggtcccagatggccaggtgtactgggtgaccatgggcaccaacagtgcactcaagagtgtgaccacacaaggacacgagttggccatgatgacataccatggcaattccggccttctggcaaccaaaagcaatgaaaacggatggacaacattttatgatggaggacttcttaagaggtgtgatcagagaaccagaagttcagcttattataatcctagcaacaattaaatatatatatctggggtgttcctctaagagatatttaatgaatggactaacatcgctctttctacttagatttttttaagctgctttttgaggtcttagccatggttcacacgactgagattgctgaatatgtcaccattagataagcatgtgagaggtggggaaggaactagccttgttgagtattagctgtgggctaggagct

SEQ ID NO: 468474 - DNA, 1353 bp, Homo sapiens
ctgggctagtttctgaaaagacagaggactcaatgtccctgggccagagagctcaacaagcaatgacagtgcaatgccatgcgtgtggggcagtggaacccagggaggaagctggaattctgactggctttgacttggtgacaaatggcggcatctccatcatcctgcggttcgagcgggcacctttcatcacacaggagcacaccctgtggctgccatgggatcgcttctttgtcatggaaaccatcatcatgagacatgaggagaatgagattcccagctgtgacctgagcaattttgcccgccccaacccagtcgtctctccatccccactgacgtccttcgccagctcctgtgcagagaaaggccccattgtgccggaaattcagtcctcacacaaagccagtgaggagactgagattcagagagtccatggggccacgccatcttccctccactcggctttgcaggaggaaatctctatctctggctgcaagatgaggctgagctacctgagcagccggacccctggctacaaatctgtcctgaggatcagcctcacccacccgaccatccccttcaacctcatgaaggtgcacctcatggtagcggtggagggccgcctcttcaggaagtggttcgctgcagccccagacctgtcctattatttcatttgggacaagacagacgtctacaaccagaaggtgtttgggctttcagaagcctttgacctgtccgtgactggccaggacctaaaagaatgtgaactgaaagacctgaatgtagaaaacccgaccattacaatgaggctacagaaccaaagggccctgaaaagtgctgtgctggctttttccgtgggttatgaatatgaatcctgcccagatctaatcctgtgggaaaaaagaacaacagtgctgcagggctatgaaattgacgcgtccaagcttggaggatggagcctagacaaacatcatgccctcaacattcaaagtggcatcctgcacaaagggaatggggagaaccagtttgtgtctcagcagcctcctgtcattgggagcatcatgggcaatgggcgccggagaagcatctcctgccccagctgcaacggccttgctgacggcaacaagctcctggccccagtggccctcacctgtggctctgacgggagcctctatgtgggtgatttcaactacattagaaggatcttcccctctggaaatgtcaccaacatcctagagctgagaaataaagatttcagacataggtaagccaaccagtggagaatttcctgcctcacccctgccttgttgcatgctgtatggtaagctgcacatgtcaatttcaaatggctgt

SEQ ID NO: 468475 - DNA, 857 bp, Homo sapiens
ttgccaagcaggaacgtacggtaggagcaagtgcaataatgagaagacagaacaggaagcagttgcagggaatcatctccaccattgccttcatttcacatatcaggaagcgtggactccagcctgcagaagagttgctaatggctgtgtcagtcacagagcggtcaaggcctgtatttctcaatcaggacacagaaaaagtgggaaagtcggtggataactgccccagcaactgctatggcaatggtgactgcatctctgggacctgccactgcttcctgggtttcctgggccccgactgtggcagaggcgctgagtgcgatgtgcccaccaaccagtgtatcgatgtggcctgcagcaaccatggcacctgcatcacgggcacctgcatctgcaaccctggctacaagggcgagagctgtgaggaagatgagctggcatcgcacagcaccccagagctgcagtgttatttataagagagaaaaaaatgtctggaactttgatttacgttatctatttgaaaagaaatgttcttactccagctttcttttctgaggagggccatctgctaacaagctcacttttttttctcccccttccttcttctgaagtttattgccccatattttttaaagcttgaacgcagccagtaggacactgggaaggagttgggggaggagcagaaaagaaaaaacctagacctttcacagtgaaaagtgagaccctgtgtttttggtcctgcagagtgtctaatagcttgtgtggtcactgaagcatggcatttttgggggaaagacctgtgtccgcagcctggtcatgcaggcctcatcattttgttaatgggctatgcttctgcc

SEQ ID NO: 468476 - DNA, 1009 bp, Homo sapiens
agtgagtacatagtagatgtttaatggatacttggtgattgagttcatgggtatagggatggatggatgggtgtgcatggatggatggatggatggatggatggatggatggatggatggatagatggatggatggatggatgggggagtggatgggtggagggatggatggatggataggtggatggatgagtggatagatgcatggatgagtggatgggtcccatccccctgagtccccaagtccaggacagctggacaagtcaaggaagggcttccttacagaacttgggtctcgccgcaagggagtcagtatattgtttccagctgtctaggctcgtggaaaagaaagcacactggaaggaggttgaagtgggtgttgagaaagcctgtatttggtatctgctgcagatgtggccagataatgagagtccagtgagccaagtcctgctgtacagttgtgttctgagggttcgctcaccatccgacacaagcacaacaaagcgagcacaaagtgatactggagtgctgacagtcagggagaagatcacagcgcgagaaagagagagcgcagaaacttcaaaagcatgaaatgatgctggggccatttcatttaggagcaaataaccctgcagaaggtagtcacaaagggcatcagcgtaatagagcagagtaaaaagaatagctgtgcgtgatccttagccatcaaggaaagtttagattgcattcaggagacttcgactagaaggcaggaatgtctcaaacaggcatccgaaggatttccacaaataacgaggtgcattttccctttacaatttgtgctacaggactgagacgtggaaatctggggactcatgtactctgtgttattattgattatataccttttttccatacggtatcagagctgctgctgtttctgccttatcaaattagttattggggacggttcttggagatggccctgaccacccaataatagagcaggggcagtgttcaagatcggaag

SEQ ID NO: 468477 - DNA, 2007 bp, Homo sapiens
gcaggaacgccgtctccatctacatcctcaacctggctgcggcagacttcctcttcctcagcggccacgcctgagctttctgagtgccatgagcaccgagcgctgcctgtgcgtcctgtggcccatctggtaccgctgcctcctccccccacacacctgtcagcggtcgtgtgtgtcttgctttgggccctgtccctactgcggagcatcctggagtgaatgttctgtgacttcctgtttagtgatgctgattctatttggtgtcaaccatcagatttcatcacagtcgtgtggctgatttttttatgtgtggttctctgtgggtccagcctggtcctgctgattaggattctctgtggatcctggaagatgcctctgaccgggctgtacgtgacgatcctgctcacagtgctagtcttcctactccgcagcctgcccttcggcattcggtgggctctgtctactgggatccacctggatttggaagtcattttctgtcatgtccatctagtttccattttcctgtcccctctaaacggtagtgccaaccccgtcatttacttcttcgtgggctcctttaggcagcgtcaaaataggcagaacctgaagctggttctccagagggctctgcaggacatgcctgaggtgaaggtggagggcggcttcctgagggaaccctggagctgtcgggaagcagattcgggcagtgaggaagaacctctgccctgtcagtcagacgggactttgagagcaatactgccctgccacgcttgacaattacatgcgttttcttagtgttgtgcctcagaaatgtctcagcggtaactcaaggtcgtcgaatagatgtttatctatactgacagttccagttttcatccacagaaagcattagtctgacagtacaatgtttagattctccttgatattaccaacacatttttcctgttatcttacactgaaaactttttctgcaattttcattgtaataaaaggagttcctctccacaaccctaaactcatctttatacgtttcctacctgattgtatcaaaaaggaagtttccttattgatctctcagactatgttcccctgaaaccatattcccttctatgactggaagcattactgaagttgggagctcgattctgaataagtgagttctgttatctctacattccactgaattctcagatataaagcaaaataatgtccttagagacagactctttcttcataaaaacactctcacaaattggttttatgaaaagtcctctcctgtcatttgtccacagcatggtgacacactggccttgatttctagtaaagacaaccatggccgcttccccttgagaactggtaagttcttatttagctcttcctggactaatagaccagtgaggagcctgtaaatatgccccaccagttccattttgcccattggaaatggcagtattgattataaagtggaaactatcttgaaaaatcattattcacttacagattctttcagttgtaggagaattcttcttacttccaggttttgcacaaatttttctggctgtaactttcagttagttttatggtcgttcacgtgagaagcaaaactgaaaatatctgacctttccatgctaatgtcaattatagtatctggataataacttacagttggtatagaattctaatacatgctgtgacatagatgaacctgaaaacattgtgctaaggaaaataagccaaaccaaagaacaatattgtaagttcaaattttatgagatattgaaactaggaaatttgtgaacacagaaaataagttaggaggagcctggtgctggatgatggagggaatgtgtagccattagttaatgagcaaagactttctgtgtggaataatgcaaagttcttaaaggggacagtggtaatggttacaacttattggaatatacttaatgaaacagaattttacaactaaaatagttgaagttgtaaaatgtatgttatgtaaatttt

SEQ ID NO: 468478 - DNA, 675 bp, Homo sapiens
caccgtggtgacaaatctagagaaatggatggagagagaactaacaaagtcactgaagaaattaatgaatgttataatctggaagcaggtgcagaggaagtcagccctggccaggttgaggatgtagagagagaaggtgttactgtgcatgcagaagcccaggagccagagcatgactgcatttcctgccagcccgaccaggtcaatgatgaggatcagcactatgaggaccaggacctccatgccacaacgatgaggatgggtctcctctgtatcactaattggtgcaatttctgtatccaaggctgggatggttggattcatgctcagaaaccctacgtggactgtggactgaagcattactctgtcctgggccggaaactttctctaaggtgcaggaattcggatagacaaagaggtggctgtgacaccctcatgatttagagtggtcctccatggatgaaaatgaagatcatgcattgtggacatgaggaaaatgtgacatcttgctagtacaagtgtgatgatggctgggcctggtgagctagaaatggcgcagtgtgtcagtcattgacgatagaaacctttttatatccccagtgcctggctccctgtgcagcacactgtgttcttcagaaatattcattcagtgaatgaatgcatgaatgaacagcc

SEQ ID NO: 468479 - DNA, 771 bp, Homo sapiens
ccatctgtcacccctttctttgactaggaaagggaattccctgaccccttgtgcttcctggatgaggcgatgcctcaccctgcttcaggtcaaacctggtctcctaagttgattgtcgattcccttcatgagaagaaaatcatctcctttaatgggtgtatggctcaagcctatgaagaacacatttttggtgctactgagatcatcctgctgacagtgatggcctgtgacaactatgtggccatctgcaaacctctgcactacacaaccatcatgagccacagcctgtgcattctcctagtggtagtggcctggataggaggatttctccatgcaaatattcagattctatttacagtatggctgcccttctgtggccccaatgtcatagaccacttcatgtgtgacttgtgccctttgttaaaacttgtttgcctggacactcatacccttggtctctttgttgctgccaacagtgggttcatctgcttattaaacttccttctctaggtggtatcctatgtgatcatcttgagatgtttaaagaactatatcttggaggggaggggtaaagccctctccacctgtatttctcacatcataatagttgtcttattctttgtgccttgtatatttgtgtatctgcacccagtgacaaactctgcccattgataaagctgctgctgtattttatactatggtggtcccaatgttaaatcctttgatctacacactcagaaatgctgagggtacatgtgcacaacgtgcagg

SEQ ID NO: 468480 - DNA, 1364 bp, Homo sapiens
agggtcttcaatttacagaacgcagaggcacagaaactcttgtttgctgtgtttacactcatctactttctcaccatggtagacaacctaatcattgtggtgacaatcaccaccagcccagccctggactcccccgtgtatttttttctgtctttcttttccttcatagatggctgctcctcttctaccatggcccccaaaatgatatttgacttactcactgaaaagaaaactatttccttcagtgggtgcatgacccagctctttgtagaacatttctttgggggagttgagatcattctgctcgtggtgatggcctatgactgctatgtggccatctgcaagcccctgtactacctgatcacaatgaacaggcaggtatgtggcctcctggtggccatggcatgggtcgggggatttcttcacgctctgattcaaatgcttttaatagtctggctgcccttctgtggccccaatgtcattgaccatttcatctgtgaccttttccctctgctaaaactctcctgcactgacactcacgtctttggactctttgttgccgccaacagtgggctgatgtgtatgctcattttttctattcttattacctcttacgtcctaatcctctgctcacagcggaaggctctctctacctgcgccttccatatcactgtagtcgtcctattctttgttccctgtatattggtgtaccttcgacccatgatcaccttccctattgataaagctgtgtctgtgttttatactgtggtaacacccatgttaaaccctttaatctacaccctcagaaacacagaggtgaaaaatgccatgaagcagctctggagccaaataatctggggtaacaatttgtgtgattagagaagataaacacagaacctactcatattttaacaacaggtatgactaatgaaaagggtaaaggtcttgaggtcagaatagtgagtttaagtatattttattcccctcattttctggaatctttaatgatgccttttcataaaagatcaatatctgattaaatgatgactaatgtttctgccaatttgaaacttcttcacatttacaaattattaatcagggggacattgctagtcaacataaaaatgttacagtgtatggaaaacccatgagtttatgtgtttagtagaataattatctgcaaagcttcggtatagagtatataactaacaggccaaataattaaaataaacaaaaagacctaatggctaaatcttttgttgaaaatgcatagttttaatcccaactaataaaatcgaagtagaactattattgtgagagagagagataggtgagaaacgattgggttttgaggaatgagagtc

SEQ ID NO: 468481 - DNA, 535 bp, Homo sapiens
tatgaccactatgtggccatccgtaagcccttgcactatgcaaccatcatgagccaacctatgtgtggattcctgatggtggtggctgggattctgggatttgtgcatggagggatccagactttgttcatagcccagttaccattctgtggccccaatgtcatcaaccactttatgtgtgatttagtacctcttctggagctggcctgcacagacactcacaccttggggcctctgattgctgccaacagtgggtcactgtgtttcctcattttttccatgctggttgcttcctatgtcatcatcctgtgcttcctgaggactcatagctctgaagggcgtcgcaaagctctgtctaatgccagcaaaggaaaagaaagcactgaaaacaaaacagctgaaaaggaaattaccagagatgtagaaataagtttgtatcatgaaactggatgatggtgatcacaaatgtagatcatagaaaagaatccataccaagaatgtaatgaaatgttaaaagattcagatatagtcagac

SEQ ID NO: 468482 - DNA, 1205 bp, Homo sapiens
ggtttgtggcaacatgctcattgtggtcactatcacctccagccccacgctggcttcccctgtgtattttttcctggccaacctatcctttattgacaccttttattcttcttctatggctcctaaactcattgctgactcattgtatgaggggagaaccatctcttatgagtgctgcatggctcagctctttggagctcattttttgggaggtgttgagatcattctgctcacagtgatggcttatgaccgctatgtggccatctgtaagcccctgcacaatactaccatcatgaccaggcatctctgtgccatgcttgtaggggtggcttggcttgggggcttcctgcattcattggttcagctcctcctggtcctttggttgcccttctgtgggcccaatgtgatcaatcactttgcctgtgacttgtaccctttgctggaagttgcctgcaccaatacgtatgtcattggtctgctggtggttgccaacagtggtttaatctgcctgttgaacttcctcatgctggctgcctcctacattgtcatcctgtactccttgaggtcccacagtgcagatgggagatgcaaagccctctccacctgtggagcccacttcattgttgttgccttgttctttgtgccctgtatatttacttatgtgcatccattttctactttacctatagacaaaaatatggcattattttatggtattctgacacctatgttgaatccactcatttataccctgagaaatgaagaggtaaaaaatgccatgagaaagctctttacatggtaagaaattgcaggtggaaaatgagtggtaaagcaggaaataaaaatgactttatttttgcttgaaatacatgctgcctttagagtaattttttttttgttgctgagtaatacaacatggcgtttctttttattttaccttagtcttctcatttcaaactctggaatctaaaactctggaatagtcccttctccaagaatatttgggaaaccaatttgaagagagaattccatcccaaatgtgaggagttatggaaatgcttaattattttccattgcttagccttggggagaaagtttattgctttctagcaactaccatgagggactcttttgtaagcctttctgttctgttcatttgatttcctcaggtgtatagtatgattctgctgacatgggtggagtat

SEQ ID NO: 468483 - DNA, 950 bp, Homo sapiens
ttctgctgcaacagaaactaaaaccaaccagacaaatgagaaaccctgttaacaagtctgccggaagcaacgtaagatcagtactctgaaaaggtaatgggtttgagaaaaatttttgccccacctacagcgcctgtcaaaagtggtgaacaggagagggagaatgagaattggcttgtaccatcttctgtggctacggaaaggctaactttagctttggcttttgtggattgtaaacatgcattggcacctgtgaggtgtgccgaggacttaggaggttttctcggagcctgtcaggatgtgggaactgagcttcattgctctgcagtgttggctcgggcaatggctaatttggtagctgacagatctaaaggaagccaagggtcaagccctaaagtgggaaagtgttataagtgtagaaaaattggacgttttggaaaagaacaccgccagacctctgggcagaagggattttataatgcagttccccctcaagagaaaaaaatgccaggactttgccctcgaacacctggaaacaggattagatctcctagagagcaaattacattaattgaaagaaacaaactcactaagattcccattggtatttggggacctttgccaacaggatacataggattcatttcgggtaaaggtcatgttaacttagagggcattactgtaatcctaggagttgattttgattgtgaaggagaaattcgggtagtggtaatgtcacaaaatccttgggtttttgaaacgggagaatgtattcctcaactgttgcttattccctgtaaattgcacctctctctatgagaggagaaatgaaggaatcagggatttggaagtacaactacatgggaaatttatctatcacgacccatagcatctcacagacccacttgtgcagtgtaaattgtagaaaagatttgtgggcttatggaaac

SEQ ID NO: 468484 - DNA, 531 bp, Homo sapiens
agcatgttacaagacactcccaccagcaccatgacagtttacaaatgccatggcaaaatcaggaaaaccctcccttggggtctggattgggaccgctttctggtaacagggccaccatcctcaagactgcagaatgggagatcaaacagcagcttgcaccctgcactgggaaaagccacaggcactcagctccaacctgtgaaagcagctcagggggctgaaccctgcaaagccacagggcagagctgtccaagaccttcggagcccacccttgtaccagtgtgccctggatgtaggacacagaagtcaaaggagattaagattttatggctgcccttctgggtttcagacttgcatggggcctattgcccctttcttttggccaatttttcccttttgggatgcaaatgtttgcctgatgtcagtacttccgttgtatcttagaagtaaataacttgttttgattttacaggctcaggactttgttatccagcatttgccaagtgctctatttcatgtggtttaatgaaa

SEQ ID NO: 468485 - DNA, 1121 bp, Homo sapiens
gttgcagccagaggggtctttgggaaagctaaagcagacgatgccatttttctccctgttcctgattctggcatcttgtctccatcctttgtgcacgagccccagagatccagcctctgctttgggctgcaacatcccacctgcaaaaggatcttccgaaaacctacaactggtccccagcattgggctctttgttccaggctccaagtgctttggcatcaacgctgggatggttaattctcttccacatgcctttacagcatccatccaaccacccatcccctggtggctgaaaaaggggacgccaggcttagacagagataatgaaatggaaatagactggagatttgggagacaggtttttgaaagaagaaggcgcaaatgtgaaggccacatgctggaactgaccatgctgtgtccaaggaaccaagaggaggccagccccatcccttttacctctgaaacgcctgttgaatccatcaccaccacttgactctcactgcccctaccatcattaaagccttcctttgaattattcagtagcttctgcactggtctctttgcttccagttctttcccacgccatccatccactcagctgagactcaagcagcattgggaatcagtggttctcaaacctaagctcgaatcagcaccacctggagggcctgttaagttgcaaattgttgagtcccaccccagagtttcaggttaagtaggtctagatggggccccagaattgggattctgacaagtcccaggtgttgctgatgctactcgttcaaggacaatactttgagaaccgctgctctaaagtttacaccaaagatctaatattactcatcttctttaaaaactccagttactctccactctctttaaaatggagtcccagctccttcccatggtctaagtgattgtcaccacccagctgaggcttgcctcttcagcatcaccttaagctgctgacctctcttcagcctgcgatgtggacacaatgcactcttcatgttccttaaacttggcatacatttcagacctcacaccgttccctctgccggcaactctctcctccttgtcgcctgtcagattcctacttgtctatcaaggtctgacttgac

SEQ ID NO: 468486 - DNA, 1056 bp, Homo sapiens
acctccgctccagccgccattcatgtcttacttgggaagtattgatggggcctcagctctttctgcattcttagaacagggcagcctatggatgcctttgtttggctcaggcagctctgaagtgccagacaagaaggaggccaggtgggagaaagagctgactcagaactggtgtgaggtgcctttcccctgctctgagagcaccttgactgctctcctgtcagctggggaggtgactctgatgggcactcaagttggtgcagagggatgcaagcggatgaagctggcagtgctggacttttggcagtatctggaggcattcttagttgtcacaactggggagggtgctactggcatctactgcatcctcacaaggcaggagggcaagtttctgccttccgaagagtgcatgaggcctctttataagggccttaatcacactcacgagggaggagccctggtgacctaactacctcttaaaatccccactgcttactaccttcacattggggacccctgaaatttgaaaagagacacattcaaaccgtcgccctagcgatgctgctgaactccctacaatgcagacagcagcccccccacagagaattacccagccccacgtcagtagtgctgaatatttccaagtcggcagaataggattgttcccctctctgtgcctacggttaggactttaaatctctttggccacagagtgggaagaccacgagaacaggagttcctctgagaatcccattatgaatatttgaagtttagtaggtttatggtctcggttcttaatttttagagtgggtaattgcgtgggctccactaaatgaaatttactagctctttccttccatggcatatggcatcggaataggactgctttttatcccctgtgatttttctacccatattcttgcaaagaactcaaagccattctaatctgtcattttctcctgcttgcttttttccttggtgtggtcagacctctggctcccttggtacttgccagttttgatcggaggccacagggtcctgtgttgtagactctag

SEQ ID NO: 468487 - DNA, 1330 bp, Homo sapiens
ggtttttctcccttcagcatgatactagctgtgggtctgtcatgtatggcttttactgtgttgaggatttcaaatacagacaactcttgaatgaatgcagtcactacccacggaagcaaaggttggaggatgggaaaattcagcagaatgttgaagactatggagttggaatcctgactccaccactgaccttctgtgctgacttgacgtcagcagcatcttcggtgaagggcctgctccttcctcccaagccctgctgggcttccgggctggctcctgtgctcccctcagcagcagtcctcggtgctgagtgggaggatgatcctgggaagcttctcccggtgaaggttcctggatctccttgccaaggctgctgtgtcatcattttcaattcaacaaacatatgagtagttattctacatccagcccaatcttaggtgctgtgggggagacaacagtactgctttggatattaagggttttttttttttgtgatcccatggaaattttagggttgtttttctatttctatgaagaatgtcattggaattttaataggggctttattaaacctatgtattgctttgggtagtatgggcattttaacaatattattcttattcattaacatgggatatctttccatttatttgtttatcttcttcaatttctctcatcaacatcttatagcttttggtgtaaaaatttttcacctccttgattacatttattcctagatattttgttttttgatgctatcaatttttgtgggatcattttcttgatttctttttcagccaagtcattatttgtacatagaaatgccgctgatttttgtttattttgtatactgcaactttactgaattcatttattctaacagttttttttgtgggttaaaactttcgagttttctacatataggatcatgtcgtctgtaagtaaagatcatttgaatttggatgcctttttatttttattttttcttatctgattgctctggctagcactagtacttttcatactatactgaatagaagttacatgggcattcctgccttgtaccagatcttagtagaaaagctttcagttgttccccattgattatgagtttagctatgggtttttaatacatagcctttattgtattgaggaatttttcttctatacctaaactgttaagaggttttatcaagaagggatgctgaactttgttaaatgtttttctgcaccagttgagatgattgtgtggcttttatctttcattctattaatgtgatgtgtcatgctgattgaattgcatatgttaaaccagccttgcatgccaggc

SEQ ID NO: 468488 - DNA, 675 bp, Homo sapiens
ctacaaatgataacgatcccttatgttcgtatccacttcgtaataggtcacaaaaggaaccacttgtgcgaacatgatcttatttgcttttcacaaccacatgatgaaaataagcactattttcccctttgcagatggactcccaagttcagtgctcttcccaggacacacagctgccccatcctgggtgagagtgagaccccgtctcttaaaaacaaaacaaagaacagctgtttgtctgctacacgtggccctctccaacctgccccagcctctctctccagcatatttttaccacatactgccctgcagcctggggccctgcccctggactgaggcgcagctaccggaatgtgctgtgctagttcacacatctgggcccttgccggtgcagctctgtctttacctccttacccacctgctgaactcctgctcatcctctaagacccagctcaagtctttgctgatccatcccctcagagcagagctgattgccccctcctttgagccagcatcacactttgaacagttatattggagcacttatcacggtgtgttgaaactatttattcctgtgtcagtttcgcccagaagattaggtacttcttaagggcaggagctgtcctatctatttctgagtaagccttttgaaaagagaaaaaaaaaaccctaaaa

SEQ ID NO: 468489 - DNA, 980 bp, Homo sapiens
agcactgcctggcacagagcaggcgctcggcaaaggcttgcgggatgcgcagaccagctcatttaatgcttgcaggtgccctctgcggtgggcattactatttccaccatcctcatgatggatctggaatccacgggggtcccctgcccaggatcgtgcagcctgtggaaggcagcaggcgccgggatgccgaatggattgaatgagcttctcggggattccctgagcttggtgaacgcagagcccaccctgacggtcaggcctaaccccaccgccaataacagagcagccctaggtggaagtgggctgcctgtgcctggcactgggagcggcagaggcggctgccgctgtggaagtagcgcccgcagtgccaagctcctgtgcctgggaggacgcgggcactgggcgacctgcagtcggggctgcccccaggcagggctccctggctttctcacagcgcggctcgcgggaaacgacgctgccctatggcacagtgaaaagcccccaacacactggttttcctcacagcctgccccaactgctcatcggaacctgcagcccccttccctgccccaactgtccctctgcggaccccattaccctactttctgtcgagcccaactgccctatcctttatacaggctgtcgggggcaatggtgcccatgctgccgtgaatgtccccgtgtgacagttgttagaaggggagtaattacctccttttggaagtttcaatgagaccatgtaggtaaaaaacatcttgcaagctcttcattgaaatgttgcttgccaaaaatagggaaacgggggctaggtcaaatgactgtcccaaagccactcatgcttctgaaaggggttgcatggggggtcctcgtccctagcagcctgggccaatcccatctgctccagcctctgctgtgtctccctgcctgcagtacaataccctccacagaaactgcccccagaggcatctgagagcatg

SEQ ID NO: 468490 - DNA, 1044 bp, Homo sapiens
gctccctgtaccagctgcccagaggagcatttccctctgacctgtcctgtgaccatttgatgtaggctgtgaaggactcccttagccttctgcgggagaagttaatatgggattagccacaaccaattagatggtatcaaacccaaagggatccaacagtttagctaaactgaagattgggctgaaggaggggggctgcggctgtcaggagggcctcagcagaccccttccccaggaagccaggcttccggcagcatctcaagtcccacaggccttggtaaggaaaggccaggagagggagggcatcaccctgagcttctcacaggcccaacatcctggcgggaagcctcctggtttgggtggggcttcggcgggggtgcggctggggatgagggaaagctgctcggctgggcaattaagctgcgtgctttcctgctttggccccttggccagcaagcagttctgcccattgctctgctcggtaactgtgactcatcctctgggactctccttcacgtcacctcccctggaaagccttgtttcccctgtcctggtctgaagtcccacaggactttgtccatgcctcccatgtgtcactcattacactctatgtctgtctcccctctagactgcgactgcttgaaggctatacaacattgcttcattggtctttgactctgcagggcatggtacagtgatcagtgcaaagtaaacggtcagtaagagtctttttgaggggatggaaaggaaacacaaagaagccaagatttgtaccgcttttgtggtcttgggtaaattctttcactttttgagatttaatttccttatctgcaaaatggggataacactttctcatctgactgtctatgcactgccattgtaaagcttggcccttagcagtttgcttagctaagttggttatgtttctcttgctaggaactgcttcccttcccacccctccagggcatcaggccatgggtcagatattctcttgtctctcagaggagtctgttcctggggaaggtaatcaagtaagaggaattc

SEQ ID NO: 468491 - DNA, 1853 bp, Homo sapiens
ccttccccagcacacatgtccccgtcacgacgtgcagtccacaacattcatctgcttcggttgatggcagcatctccaccttgccacaggctggtcttagctaactccttgcactgactgcttggcatctttagtctaagcaactgctcagtggactcagtgttcctgctttctgatagcctgctgggaattgtgcaagaatggtctgtgcatttgtcagtaggcagattggctccaagcggggccacccgctgctcgcagcaccctggagcccatcccgagtgtggggtcccttcctctccactctggaaacctggggcacagctggccgccctgatgccaccgacggctctgctgctgcagggactctgcttgtgggggtgtgcgaggcccactccggctgccctggggctgctcctgcaccccccagcctccggcaacaggcaaaacagactgctctgagcagtggctgctgctccccggggtccatccgagcaccggcagcagcacaacttggcagccggcacagccccgggcaggaagctcctgcagggggactccgcggaggcctggaggacacccgttcagaggcactcttctctgacatgggacagcagctgcggacggttgctggaggcagtctgatgcgcctccgcgttaggaagattggggatgccaaccacttgcacagagagcacaaagctcaccagatgcttccaaggctcagagggctggcctcacactggtgctggcccacattagctagcacgcggcagtccccggggggtctgggaagatccccaccgaggggcaaattcccctagtcaccctacagcaagcccattaacttcttgttcctcggggagtgaaggcactgtgattgtgagtcatgccactccccaattattttgaaagaaagcttccttagtgaaggaggagaattacagagcagcgccagcgttggggaaacatgctcaacttccagcagtcattcccgctcgcctcctttctctttgctcgaggttcagtctgtctgcaaagcctcccttgtcagcagctggcgaggcagctcaacaatagaatgatgcttgtttcaccgcttccaactgagctccctcgccaagctctctccctccagcacagagaggaaggatagccccacagccacttgacatacttgacatggatgaagggtgtgggggttgggggggaggaggagagaagtggtagcctctctaagaactgcagaaaaggaaatcctatgatctgacttccatgctaccagttctgggaccctcctgtgggaattaattgctctaacctaaactttgcccactgtagttttaaatgagtttgccctcagatgtgagtaatctggccgtcttatctttcactccactgacctccagggttggcctgacaggtcaggtggggggtccttatctccttcctcactttatccatctcactcaggtcttcggttcaggctccacaactgattgatgctgttttcctgttagtatctctttttcatcatgcacgatcctccatagtgatggaatggagacagcttctcagagaaagcacagctttggaaggtaagtgccgtttggatggtgagaccatcagatcaatttaactaggccaagactctgatcaatgttcttaaacctatgtaacccactgccacagagatttcaaagtgaggaagggtcctggacgcccattcatccattctcaatgaattattcatttgaccagcactttctgactttctagcttcagccagacaccgtacaagggacaggggagactgagatgaagaacactcggtgcttcttcccaaggcactc

SEQ ID NO: 468492 - DNA, 1102 bp, Homo sapiens
tgtcactgtgcctgtctcatgttgctatgcagttatttatccacacatttctccttcctcaaaaactaggagagaaaaatcacagagggcaagtctcatcccctgcggatgttcttatcctcagtgccctgtgcgatgcctggcacacagtaggtgctcagagcacatttgtggggagtaatgtgctggaaggggctaagtcaaaagaacgcacttgcatcctgtttgtgcccaatcgagtccagcgccgccagtggacggattctatttggattagagctgtgtgccccggggagccgaagcaactcctgaagacatgtgctaaggctttcgatgaatttaaattacctgcattaagttccataaaattgcgctgggattttgacagaggttgctttgaatctggggagaactgacgtctttacaatgttgatatttcccatctaggaatattagatgtctcaccatttatttagatcctcttatgtgatactcagtagagttttatagtttttctataaaagtttcgttcatattttattgggtttattccttgggaccttaaaggcatttgttgttattatttgttctttttttacgtttgaatgtatctatttttaattggtggcatggagggaagctttgagttttggttgttgctctgttaactctaccactgcgctggaatcttattatctaacagtctgtcatttctttccgctggatttcatagaagatgatcatataatctgaaaataatagttttctcttccattcttctttttcttctcttaaatcgtgctggataggaggggcatcgctatattgtttccagacagaatgggaaatgtttccaaggtttttctgaatgttatataattaagacagcttaattttccttcctgctttgttgaggcatcttttaaaacaggaaaagtatatagaattttatcaaatgtttcttgatgtgtagtgacataaccatatagaattttcctttatcatccagtggcctattttaatatatattataatgttgaattagcctgtgttactgggataaagtaatccctggcgaaccctccaagtttcctgcccagcc

SEQ ID NO: 468493 - DNA, 590 bp, Homo sapiens
agtccacagcttgctcagaccaatgtgcactgtgggaggggcagtgaagcagcctccagctcttgctgctgaatggattcccaaccctcatagaacagccaaggagcgggtcaccggctgcctcgttaaagttgaatttcaggaagtcctccttgagccccgggttaagtcagctccctgggttacacactccacagcactaaatgactttccattgctggactcacctgagagtactgtaggtgcacacttacacctagtgtgttttacacctgttagtttcagcaggtctatcttagagtataaactcccagaaagaaggaactgggtctacaagagtctctgtaaaaggtctgagtacttaaacggagttggaaaatgaatccgtgtctagctagtaaattgtatgtaaaacccttttcatgtgggaggtgggaaggatcaggagactttctcctgtgggctctcctcccgctgccccaggcccgcgagtctgtcacacagctatgacttacctaaatgtgtgtcacccagaggacaggaacatttgattgctggggaaaaatacttattttttcctaacgcctttc

SEQ ID NO: 468494 - DNA, 900 bp, Homo sapiens
cttttattttaggttcaaggggtacatgtgcaagtttgttgcatgagtacattgcatgatgctgaagtttgggaaaactatgccaatagaaatgaatcacagattcgtaaaatcaaatttgcttttgatgttatcaagattccctatcaagaaccttctaatcaagggtttttcaacctcggcactattgacatttggagctggataattatttgtttcaatgttaaaactgaagtaaagtctattgaaatgcaccatgaagctccgagtgaagatcttcctggggataatgtgggcttcaatgtcaaaaatatgcctgttgaagatgttcattgtggcaatgttgctggtgacagcaaaaatgacccaccagtggaaacagctggcctcactgctcaggtgattatcctgaaccaaccaggccaaatcagtgctcactgtgaatctgtactggattgtcacacaactcaaattgcttgcaaggttgctgagctgaaggaaaagattgattgcaattctggtaagaagttggaagatgatcctaaattattaaatgctgatgatgctgccatcctttatatgacagttgctatgggtgtcatcaaagcagtggacaaggcaaggtcatcaaaggtgtcatcaaagcagtggacaagaaggcaaggtattgccaaggagctggcaagatatgaataacaataaatctgtgttcatatgtgtattgaaaaatacttgttactaacattttatttttgcttatatcattctgtcctttcatttatgcaaatgtaatcttttttatttacaaaactggattgaaaaataatattacattgtaaactgtttttcttcaataagatatactatgtttatctttccatgacatcacatatttttcac

SEQ ID NO: 468495 - DNA, 695 bp, Homo sapiens
ttttttatattgtaatgattatatatgtctcctgtgtggcagccacttaggtcttatattccagcttgggctccttggcggtacaagtttactataatgaagacaaatattaatatacggtaccagagcagagatagcaccctcgaaggcccacaaaacaatccggtgatttatgaggactttttctacccaaatgatacacaatcacagaagctggcttttcactgcctcggtctccagatcagggacaggtttcggatatcagctcagagaaggggtttggatcctttggcggagcccgtgcagtggggacccaccagacccaccagaccaaatcttgatccaacaaatgaagggacaatgattaggccctcttatagcactatacattggggtcctggtatccaaaaacagggcaaccatattcccagtttctgccctgatttaactattaatagtgcccctttaaatcacaaaaaaatgctttaagcatttcaatatggttccattgtaccctctctcagcacatcaattatgcttctttttagaaaatttcagtagttggtttagagcttataatatagttttttacctaatgtatctccactttcaaataacactatactacttcacatgtagcacaagtactttgtgatatagtgttcataatttctttttatagcattgctgtcatt

SEQ ID NO: 468496 - DNA, 581 bp, Homo sapiens
ggcacagtgacaccctgtgtcactttggatcctccacatgcaggaggcatggagtacttccatctgctgcacctatgccagggacgatgcctgcagcatcccagctggcttcccggatccagctcttcacacctgcttccaaatgggaagggctgttgtttaagaaaaattcattaaagaagctctcaagaaagccacaagagaagccaaattatccagggttactgaactcaagtccaagcactatctgttcccccaaacagatgccccttcactctgcctcagaattaagattatgttcacctgaagaaatgtctgctggaaagaaaccggcacaagcctcagaggacattgcttccccagtgacggtggatctcattgtatctgtcattgcaatttgtcctgatagcttccaccagcttaggcaaagctcctttgccttccgagttaacctatgtgaaggcgacagtggttcaggtcttcctgtggactagatgtcccagtcttgccttccccttgataatgcagtaagggacccccattttacaatgtaggacaggcaggaagacaaccagctcaac

SEQ ID NO: 468497 - DNA, 1043 bp, Homo sapiens
agctgcctcctgcagggcagggcagggctggggacctgcagcccaccatgcctgagcccccccccaacccccacagtgggctcctgagccgcccgagcctccccaaggagcgcagctccctgctccatggccccggtcccatctaccgcccaaaggctgaggagtgccagtgcacagcgcaggactggcaggcagctccatctgtggccccagtgcaggatccactgggtgaagccagctgggctcctgagttcactcctgagccagcgagaccacgaacccaccagaaggaagaaactctgaacacatgcgaacatcagaaggaacaaactccggacacgctgcttttaagaactgtaacactcacggcaggggtccgcggctttattcttgaagtcagtgaaaccaagaaaccaccgattccggacacaattgttattgaaattaaccataaaggtcgggctcattatttttactattaaatttaggtatgggcatttcctcctcctgcttctaaagaagccctactctgtaacaaagtggtttccaataaatgtgcttattttattgtgaaaaaatagtaaacaaatacacaaataaatttatgtacaattactttttgaaccacaagagccttggcagcaggaaggggagagagggagagacggggggggagagagagggagagacaacgagagagagagcaagagagcaagagagagagcgcgtgagagagagagagagggagagggagagggagagagagggagagggagagagacggagagggagagggagagagagggatagagagagagggagagagagagagagggagagagagagagcaagagagagagggagagatagaggtggagggagagagagatggagagagagagagagagacagagaaagaaagagagacagagagagacggagagagagagagagatggagagagacagagagagagagagagagagagagatggagagagagagagatcgatccccttataaaaccattagctttcatgagaa

SEQ ID NO: 468498 - DNA, 762 bp, Homo sapiens
gctgaagattgagcgtctaacaccttcatgtattatgtccccaaagaaaagctgatctcatacgctagtgtgagtggacagaacagagccaaggtggacagcaaaggggtgacttctgaaggatctgtggagattgctgccctggaagaagctgttgtctctacagaggagatgttatctgagcatgcaatagctcctgatgtaaggagcagaaatcgtgcgggtgtttgcactcttattccttccttgtatttccagccttttccaaatgcaagccctgatgtcttcagctggcagctaccaattacagttgctcagtcaaagtggagagcacattgtactctggtccacaaactggaaatgaataaagcagtcaaatatgatgatattccacaacagtggaaagattcaggttttaatcctggtccttttcacagcaaggaggtctcagcttttgcaaaagcgaagaagttgcactggctctagcggccttggcttggaagtcatacaatgttacttcctccacatgctactagttaaagctaatcacagttcatctcaagtgcaagaagcgaaaaagtagattactcatattgatgagacaaatgccaaagtcatagtgcaaagaggcttgtataatagaaatggaagaatatggctgtgttttgcaatttaccacaattgacttgtaaactttgtaaatttctagctctttgggccccaaattattcacatttctcttacgtacaaaatatactcaaa

SEQ ID NO: 468499 - DNA, 3010 bp, Homo sapiens
ggcgagggtccgtggcttcattcttgaagtcaccttgctctctgctgcatctttcctgtggccattgctatgccagctgtgacagatgatgatgatgatgatgataatgatgatgatgataatgatgattccagggcaccacctttcttcaatttcagaggatgtatgaaaaagtccaggcagaagcctgctgcaggggcagagccctcatggagaacctctactacagcagagaggaaatgtggggttgggcccccacacagagtactcactgaggcactgtctagtggagctgtgagaagaggaccactattctctagaccctggaatggtagattcgctggctgctttcaccctgtgcctagaaaagccacaagcactcaatgcaagcactcgagagcagctgtgggggctgaactctgcaaagccacaggcacaaagttgcccaaagccttgggagtccaccccttgcatcagtatgccctggatatgggacattgagtcaaaggagattattttggagctttgagatttaatgacttccctgctggttttcagacttgcatgaagcctgcagaccctttcttttggccaatttctcccttttggagggaggggaaagcatgtatagtaaattactcttctcatccaaaaagcttagtttgttcttttcaatgcttgtatcatattccataaaatgagtatttttaaattttatctaaaacattctcttacatatatatttcacatctccacatttttcaacttcaatcgtgtgtgtgcatatgtatgtgtgtgtgtgtaattttacattatttctgtgatatactataggagaacataccataaatgagattgttttgtttcttgctatcttctgtaatgttcatttgacaaaccacaaaacgagtacttcagcaaaatattttatcagttcacatttccaacatcaatgtattggagatacgtttactcacgctgttgccaacaatgaatagtactgccctttataattattgccaagttgatataaatgtatttaattattgcttaaattgttaatatcattaaattgttaaaaactattatttagcattttctttaccacaagtgagattaaacatctttgcacatattttgtggacatgacttcctcttctgtgagttgccgttattcaatgacaattttattataaaaatatttgtcttcttccaaatcattggagagatttttcaaatagttactataataaattttatttgtcatatattttattgtaaatattttccattgctattatttttcttacaacttctataaggtgacttttgcccactaaaggtatattcttaaaatgtatatatatgtctggattctgggtacactgttaaagacaaaaaggtctcccactcacaagttttacaaaaagtctattttctatagactataatgttatattttggcttaaaatgtcttaattatttattttaacacttaatgtatgtagtcttacatttcctatattatgtgaacaacaaaatcgattttattttctttctagtgagaagtcatttattctagcaaaacttattaattttccttacttcctgtgacttagactgccttccttgttacatattaagttttcatatttactttattctctttactacttctaaattctgttaaaacaacctattaattgatttctgagccatttattatatggttttgaatttaaggtaatcattagtatcaaaaagcacatcctttttagtattttttaatttttaaaaatgttcatgaatatttgaagatgtttacgtttccatgataactacattaattttacccagtgctttttaaattgaattctgtgaagaattgcattcatttatatttagaaacagtacattcagaaagaaaacaaccagctcttaaaggtcctcataagcatctcaaggagtttgcatctttttttgaggtcagtgtgcttaaatgcatttcttgaggttgaaaatgctttgaaaaacagaagaaaaatagtcatatttgaaattacagacattactttgtttacaaagtgaagggtgattgaaacaaaggaaggcaagctccgaaacaggaagttcagtaatgcagctgttactatcttcaagttaaatataaagggggagaatatgcctaaatgaggaacacagcagtatggatagataagtggacagattttaaaactagtaggatttagtgttgagcgaggaatgagtgaagcactgggatttccagctttcataatttgttcaccacatccagggaccaaaagttaatacgctatctgtactgcgtgaaacacaatgcaaatccagagcacataatactatgtaaatgtacttatgacagaattatgctaaatttaaaatgcagtatgcaaatgtcataagtatgttttgtaaacagaaacaataaacagagaaaataaaatatatctaaagctatcacgtcaaaggaaaaccatatatctaatttaatttacagaaaataataaaatgataagtaattaaaagttgctccttttttactattgtacgtaataattattttttaaaaataccattttttgagcatttgcttgagcaaatgctatgtgcctttcactgtgttgactcccactaatattatttacttgccacaaacttccctttaagtaggactgtttctagtatccttctttctatttattttcttaccagttaaggaagctgccgcttacagagataaatcacttgctgaaagtcatttgtttcctaggaagtgacagagccagaactgatttggaagttaactttctttttcttgtatccttcactatattgtgcttatattcagtactaactactgtcaattaataaataacatcttttggtgcctcagaggagagacagtaattatagaagaacagaaaatatatccaaaaacaaaacaatacacaaaagcacaatacattatttc

SEQ ID NO: 468500 - DNA, 880 bp, Homo sapiens
gctcctaactgggaggagagggggctctagagcacattccttgagggctctggttttgcagataatgttattaaatccttttcagagctctgctgcctatcaaaaactcactttgaatgtcaatacctggcacactgacgtaggcaaggacaagaataacattggcaagtacaactcactgactcagagagaaaagagggatcagacaaataagaaaggatgtgatacatattggtacatttttgtagactataataataagccaaagaaaaaattaaaaataaatgaaaaagaaaagcatcaagcaagaaagaaggttaagcatagaagcaagagaaccacatttagaaggctatttgtaataataagtgagaaagtgacagtgatttggactagagaggtgatgatacttggaagtattttggattttgaaagtagaaataacagaatttgctggtcgattgaatatttggatggtataagagaaaggagatttcttcgaggttttggatcagggaaaatggaataatggacttggcattaactaagatcaattgagcatctttggggaggaatatcagaaattcagttttagacatgttaggttgtgatatcaactaatcattcaagtagaaatgttgagtgagttggagtaatacatcagcagcttaagacataggtctggaatggagatatatatttaggagtcaactggacaatatttaaagccctgaatttcataatatcacaaaaagtgttaatataaataaagagaagagaataaaagagaaaaaccttgagtcagtattaagaaattttaaaagtttaatggaagaactggcattttcgatgggtcttaaatgttggttaaagtttttac

SEQ ID NO: 468501 - DNA, 628 bp, Homo sapiens
gctcactcactcactcacacactcacctctttctctctgcaataagtccagccaccctccagcgaccatgctggataagccatttaaaattatgagagatgctcacggggccccacctgttctggtcttcagcccttcgactcagcaaggtcactgttcagacttgactcgtgattggctgctgcgcttcagcgtgttattactgtctgatttgatcggaggcagggggtggtctccaatcaaacagagaaaaggtcctagagaagggcacaattggagaaactggttattttacaaaggctttgactggaatggcatgctcacaggattcctcaagaatcctgtgttaagtaagggacctcaagagaaaaggaatttacccaactcacaggctgaccttgagtattcctgtgaagtaatcagtgatctctggctgctgctgaaaagaaacaagaaagatgggaatgacattcctgcacaggtgtctgccgactcagttttggctgtatacttggaaaccttgcagaggtaaataaattcctagctcatggctgtcaaacatattaaattattttttaaaaaggaaatctttatggaatttcaatgtaggaaattgagaaaagtggag

SEQ ID NO: 468502 - DNA, 703 bp, Homo sapiens
gtgtgtcaaagagaatcttcattttccaaagttcaaagtcaataagtaatgcctaaaactgtgaagttaagaagtggcaacgtatgcatattacttagaaatatagagcctctggaagcttccaatgatggtggaaggcgaagagggaacttgcgcatcacatggcaaaagcaggagcaagagagaggcgaggaggtgccgcacacttttaaaagaccagatctcatgaaaactcactattttagggtttatcctcagtttgggcttcctcatgaccagactccagtaacacattttaggcaggaacaacacgaaagtgatgttatgtcttcaattcattatatcagaagtcatataatgtctatttgtcctattactgatggcccaaaatgtatgcaggtccccttccagcacagcctttcctcatttcctggggctgcagctgcactggagcaaatctgctagtttctaaaggtgatataatcaacctatggacaatgttaagtgaggacttaacatactcccttctggttggcacctggatggtagatgcagtgttccccatcaaagcattcatgtgcatgagttgataagcatgagagcttttattttgacctgagaaggattgagttgttttcaaagaacattaaggaatactttagtctttacagttgggatggaaggggtagggcaagaacccaac

SEQ ID NO: 468503 - DNA, 1944 bp, Homo sapiens
tcaagttttcattctggttcttgtaactacaccagcagcaggaaagactcatgttgtgcaggcccacatggcaaaggaactaatgcctctgggctacagcaagaaaatgggtgatatactttccagtgtcattctttctcacacagtgtcccagtgtgagatccagggcttgggaggctcaaggtgctcttctgtgtcctggattccccaggaggagatagcctggcaggaggactgcccacactctaccaaagattctgccaccatcacttttatctcagcagctaaagctttccctaagacaaccaatttccctgctacaatgctctggtaccctaagcggggtaaacagcctcaaatggctctggtgtctaccaatgctacccgggccaaaagtagaatgcacgtagaggatggggaaagtgatttccagtccataattcataacatagtaagaacaaagacaaggttcattcagtaatccacatagtgtgaaattacacatggacaactttctatttgatgttgacgtttctaatggtgtaaaaagatgtatttttaaaacaggaagagagagttcaatcttaaaggattttcagaattgtttcctttttagcatatactttatttctcatgtgtttgcagtgtggaaaagaaacatgatgatgactgatgacttacgaaaaatatttctaaaaaaaattggttttagtaagtactgaatgaaatccttgtttgatcatgcttgtctatacagaaaaaagaactgcttagggtgaggaaaggcagccatcatttattaagcactttctgtataccagacaccatgcttgaacatcacatatgctttctcatttcatcttcacagcaactgtgcaaagcagataagactaacatcatttatagaagagaaaacagtagttcaatgcagctaagtaactttcccaatgtcacacaagagatttcaattatttaataactccaaaactatactcttttggtaggcattccaattatttttgaggagattttagacaagtacatgttttctgctatcatgaaattctagaaacagataccatgaaatgaaagaatatgggatctgagaatggaccttccatagcaactggtccaactctttttgatagaacaccaaggcctagataccatgtgtgacttgtctgctgtcatatagttattcagtggcagtgctgggactaaaacacttccattatgctcacaggtgagtcaaatatagaggagtgttttatatcacaatgaaagttctgaagtcaaagagaccaagaatctttcttctgctattactaacctcagtttcttcagctgtataataaaaatctgcacagttcttgtaacattaaatgaaataatgaatgtgaataaagtacctaatgtaatgtctgacatacagtattcaactaagtggagatgttattattattaaatcagaaacaaaataccatgtaaaaagggcaaatagttaacatagactccagctggaaatccagatttcaggaaaagctcatgtaaacttactatgctgtgatatatgaaataaataatatgtcttagtacctttgtgtcttaattattctatatgtttgtttttaacttttaaagaacaatagctaagggcaatccaaaatttcatttgcgaaaatagtgtcaatcttccctcctcccagcaaacttcattgggtgacttcgcattcacaggagtgctaagtagtagcaaaatcatctgtgatgacgggacaaagggagatacaggaaagataattgtgaactgcatcatctcttttcaacataaatacatatttacaaaatgtactgcagtagtaagatgaaaggaaaggacaattttatgttcttctataagtcatatacaatagtacaataataaagtgaaaaatattaaatatt

SEQ ID NO: 468504 - DNA, 613 bp, Homo sapiens
aaggcgatactttacattcttttctcctactaagtcttcaaaagctgcttaccagtacctttcagtagatttcaagcttcacataatggcttgtggaattgcttccctctgcagccctttaaacttttctggagaactttgtcttgaaatgcacatacttagccaagttctttcttctgaaccatcctttttgctgcccccttctggaagccagagtcacctgcagaaaaactcctccctactagctctccaagatgtggaaaggcaaagtccaccaaactccagcaggttcacgggaggctttcatgttggacatctcttactcatcagtcaaccagtggtgtccttaactgcttgccagatacctcaagttccatggatccaaaaccaaattcattctctcaccctccaccaatttctcttccgccttgttttctccttcccttctctatctactcattctgtaatcaatacatatatatatgaagagagagagagaggaagattaattgatttttaagaattggctcccgtgagtgcagaggctataaccacatacactccacacagtcattttcttccaaggtctcactgccccagaatagtgtggggt

SEQ ID NO: 468505 - DNA, 860 bp, Homo sapiens
gtaggcggaggctgcaagcctgtcctccctgtgtggccaggaggagagaggaggtcctgcagcagggacagccttgcctgtgggcagagctaactctggctaaaactgagcactttctgcccaccgggccgggctctgaattacctcctcgctgcctgggcaagggcccgccacgcccctttctcccactcccttccctgtcaactctcggtctcaaggaagctgctgctgtcaatcctatccctgtgcgtttggccacaatgcaaaggcgcctcctggtgtttgcatttgaatagagacccaagcccgaagtcaaacaatgaggctcgtggtgggagtgggagagatttggggtagagcgcattcttgcagccccttctgcgcctccgtgaaggcagttctcttctccactttctcagaagtcttatttctccacttgctggggctacccctgctcctggggacaggaaggggattgcgtttcagccagggccccatctgcacagcctggggtcttctggcttcttcatccaggagcgctgtggcttctaatgacagctttcacataggaacaccttctgtgtgcctggcagctataggtacatggatcactttatgtgataaggaaatgggggctctgagctacttagctggtaaacggcagagcatggcctcaaactttggcctggcaggctccaaagtccccagtccttccagtataccaaataccgtcatgattgttttggaaacagggcccttgccaaaaccagcctcaagttcctggtgccaggagggccccacacctttctgggctaggcagtgtgtgggtcccgcctccggaagaccaggctggtgataaa

SEQ ID NO: 468506 - DNA, 1515 bp, Homo sapiens
ctgggggtgaaggcacttctctatggatccatctggatgaaaaggtctgtataaatgcaagatcattatcatcatcagctgtcccagttggagcctactgattctcaagcccacagtcaatggggcctttccaacaattccattgtacatggcttggaaaaggcacatggagagaggtgccctccaggcctggcccaggtcagggacaagtcagaagctacatctggagcagatccaggatcttatcctggtgcacacgaggggccagcatcgtgcttgcacatttatagctcaggtgctctctggtgttaccaggaagctgctgggaagagacggaggccggagagtgtcccaggacaatgcttccttcactcatgttcatttttaactttaaaaaatggcctccatgatccccaaaatggtcttttggtagtcacttttggcagagcccatgcagattttttaaaaaaccttttagaatcttgagaacatttcaaatgtgcagaaaaattgcaaatatatccaaagaactccccaaaacatattctttatgcagactcaccaagtgttaacattttgccacatttactttgccatgctgtccctctcccttcctctctctctataatttttttcctgaacatttaagagcaagttgcagacacaatgacattttactcctgcatactgtgtggattttctgagaacaaggtcattcttttatataacctcggtacaaatgttaaagctaggaaatttagcaaaatttttattgaatccagaagtaggttcatggctaaggcctctgtaacaaaagatggtttaacaaaagaaaagcttacaaatttatttaagataagttttacatgacacaggagctttctaaggaaaggaacactcaaagaaacagttaaacttgtgtatttttatgctaagtttgactaataatggacaatcatgaagacaaataattggacaaaagggttatggtgtaatggtaataaactgggagaacttagcaaggcctctttggtcagattcttctctgataccctgtgtcttcagagataaagatgtttctttcctccaggtatagggagaacatcttgcgaatgggggtcttatatgacccatttcagggtaaggtcagaaaatcgttcttaggttttgtgacctgcttcaagggagaagagcgagaggaagtctataaactagggatcacagcaaccttacgggattgttgtgagggtcaactgagcagttggtagagtagctggcatataacaagggttcaataaatgtttattctttcccctaaccttccccttggtaaattattttaagagatagtatagtttaaaatattagttccatgggctcttcctccagtgctgtcagtgaacatttattgagatgtgaccatgtgtagtaatgacaacatgattgaatatgttctgtgtgccaagttatctattttaactctcaaaactcttatgaggcaacaactattgactg

SEQ ID NO: 468507 - DNA, 683 bp, Homo sapiens
tctcccagccccgagtattcaaggaaattgcctcctcagctgtgttctagataagactgtgctgacctttgcaggatgggcagagatgccaaggcctcaggctctgttgccttttgcatccacttcagtggctttcaaattggaggtaacctggaagctgacgtgagaagagagggtgtcagacccgccttcacagttcagccctggcccactctaagggacgaaggagttggatccttcttcctcacaggcctagtgcctctggcttcagttggtgtgaccttagagccctctgagcaattaatggctgccattttgaagacagcagatgtaattcagcagcttacattgctttacacatgtacacttcagagacacacaggcctgaggctggcctgcaggttgagctctgaagagtttctgatgtctacagcccagaagaccaggtgttctgaagattcctgtcaccagtgctgagatgttctgaatgaacagctctacaggagaaatatagcaatcaaactacaaggtactatagaaatagagtccatatcctctccttcttatgaggagataaaggctcagagaggtgaaggaacagcagggccaagacaaagaaccaggtctttcccctcccaggtcaaaatgcataaggtgttgtaaaccaagacaattgttagact

SEQ ID NO: 468508 - DNA, 1599 bp, Homo sapiens
tcaaggggccagagccttttggtacattccctgtgctgcaagttgaagctctggcatgagctcatcatggggttttttggaatcatgggccaagatggaatgtctcagagcaacgagggaccttacaggtcaggagcccagtggataaagctgctggctcagaggcacctgcagtgccaccttggaggctatggaaagacaactgctgtcatcgtagaaattggacactggagtctgcaaaaagcctcctggaagggacactcactcgctggaggtgctgactcccaggggttggggtggtccattccttgtcccccagcccacaacacacacactcaggccattgctcgtccttcactggtagacctcatagcatgtctcatggcccctcccttggcttcctatgaaagtgacctgggtggctgcctatggagtgagatctcaggttcacctagaagccactctgtccccaaagaattctgtctggcagtcgggatctgatagtcctttgataggcagggtctggtgcctttcattgctcattgagaaactggactgaaaatagaagttttgaatgttgggtgagcagagcgtgctgtcagggcagtgtctatacagtgtgtttcccttttaacttgtggtttagtttcagttttcctcactaatgaggttaataaggaaatgatgcttccaacaatagctgttactgctaagcccctgtggagataaaagatcagtggtaagatctttcaatgccttctcattttaaactcgtagaattggtgtctgttaacattatggtgtaaacagattattgaaaatttttaataaatataattttagtaactatatgacatttgtaaaattcatccaaccatttctatattattggacactttctgattttttgttattacaagtaatgctagttatggcatctatgagtagatgttttatttactataataaacatctgtgagtagctgtttactataataaacatctggttttcaattgtaaaatggagtttataagagacgtgctttataggattgctgtgagaaacacttgcgatactgcattgaaagcacttagcctagtgcctggcacataaggatgcctcaatcaacgcgagctgtcacttttcccattactgctatggttactgttattgttgttattgctatcttagctgacaactttaataattacagttggcactgaattcattcattcattttatatatacgtatatatttagtgagttctgctatgcaccagggacactctagtgatggggaccaagctatgaccagtcagaaagacttttactggctaggagcttgaattctagtgaagagagaggcagatgataaattagtaaacaagcaaacaaatacagaaataatagtttcagagagtgatatttgctattaaggaaataaaatggaaaaactaatacacaatgactggaagtagggggagtctttaaatcttcagagagggagacatttttcctaagaggtgaatgctgagaagataacagttacgtaacagacctgaagaagggctttcaaagcaggagagatagcatgaaga

SEQ ID NO: 468509 - DNA, 938 bp, Homo sapiens
tatctgatattggggagggggcaggatttaggaactgctcctcgacatgggaatgatttacaagtgccaacaaggctccttactagctgcagcaatgtttatgaacgagcaaacctctggtgcatctgggaagcaggagatgcagggcctggtaggagtcatgacaccgcaaataagaatgatcctacaccaaaacaaaaatactgtgacctacatgcgctctcttggagactgctgcttggttgttattaatgagagatttccaattaacttgggctgttcaaagcagctctatgcctgggaaagagaatgcatgagaattttccaaagagctttttctcttgaaacagaaaatataaatggtagtggggggaaaaaaatcaaagttactgaatatggaaatcaccactttggggtttatgagaaccacatcctgctaactccctgctatgcgatggggctttcagaggtaatgaggcaagtaccagagtgtcaaatgtctgccttgctttacacttatgtgtgctcttgtcctggtcctcctgctggatggcagcttgaaataggccatagtaggagtatttacaccacagaaattggcaaacactatgaagtggggctcccccctaccctccacagagagctggttgttaagcacttacccgcatgccacttactacaaggaaagaaaaagtttttgtatgctttggtgctcacagcagcaaataactagtaaagcttaagatgagaacgtgcaatatttgtctataatgtacggaggactgagggggaagaattagaagttactccactcctagatcccaggtgccctggtccagtgctaagttatagtaaatgggccccttgtggcatgaaggagttagtatctcttcctcagtcactaatttacctgggcttattgtcctgttgtgcttctg

SEQ ID NO: 468510 - DNA, 1447 bp, Homo sapiens
cgtttcagttcacagtgtgtgcagtcgtgtgtcttgcgcatacacacatgcacatagacagccaatttgaacaccgaggattaacttgtcttaaaggggcaactctctctctctgagcgggtggcacagggcttgatgacaggaggccaccccttccccagcccatctgctgctagggaagaccagcgtgtgggctgttcattgccaccaaggaggttttcctgctgtttactgaggtttaactctccttgtaaaggagggcctggcccaaacatctgtttcatcaaaggggttggagtcttggagacacaaaagcttctctcagtggctccattctatggcctttatcgctcccagagaggcaggcctccagccgacagtgtgcagggccacaggactctcagagcctttcccttctccatacttttccttctccattcttcccagggtttagagagcttggagccaaaggactgggatctgaacccctcctctgacatgggacaattcactcctcagttttcatccatagaatcagaatgacagaaaacccagcctgctcttctcacaggatggcaaggagaaccaaactagaagagtgcagtaaagtgtaaagtgctgtacaaatggggatggttgtttttatagctgaaacttacactcttagtttctggatctttctataatgtttattgagtgggtgagagaaaatgatgaaggccccagggggtacaattaagcctttagggaatagcagttagaaaaatgccattttcctccctaaaaacgaaaacaaacaaatctttagggtttttttttaaatggtaaaatacacataacataaatttgtcatcttacgcattgttaggtgtacagttcagcagtgttaagtacattcatattgctgtgcaacccatctccaggacatttccatcttgctagaagggaattctgtgcccatggacaacaactccccattttccactgtcctcagaccctggcaaccatcactctgctttctgtgtctatgaatttgactaagtacctcaaataagtggaatcacgcaggatttgtctttcagtgattggcttatttcacttagtgtaatgtcctcaaggttcattcatatagttagtctgtgtcagaattcccttcctttttaacactgaataatattccactgtatgtatatgccacattttgtttatgcattcatctgtccacgaacaacttgggtggattccacttttccgccattgtgaatgctgctgctatgagtgtaggtatacaaatatcttttcaagaccctgctttcaattcttttcggtatgtacccagtagtgcaattgctggatcatacggtaatcatatttttaatgtttcaagaaaccgccatactgttttccatagtggctgtactatttcacatttccaccaacagtgtac

SEQ ID NO: 468511 - DNA, 574 bp, Homo sapiens
cttttccttgtgtcacccagggtgccatcacacatcaggtccctcttcaagtctgatcttaggttctcactctactctatcctgctggaaaccaggtccatgggactagatacagaaaaagagactgatggagaggacccagagaacataagtgacatggtctcttccctcagagatgctttgactctaacagcctccagttacttggagccagagaaggcccaaggtcaaaaggtgctaaagcctggtcctttagccaaacaagcaaaccaggtgactcaggtgactctaccaggctcatgtcaaagtgatggagacagggatccagttggctccagcccaggaaatagggttgggactcccaaacagaagcgccgagggcaatccaacttgaaaacagggcacaggcaagggggccttttggagacattacctaaaggaccacccacggcatttctctgttttagagacaggggagcccagcagttaagaaagcagagttggggtagtggactcagccagtgggttcatcaaacaggagagtcaaggcagttgcttaaattagaataagtaa

SEQ ID NO: 468512 - DNA, 1625 bp, Homo sapiens
gatccttgctcctttcagatgtagccagtgcaaaaactgcccaaggaggataatggtaacttgttacgccaaacagactcaaagtctccctctagagtgtaaacagagagcttcagagagaagccacccaacagaaaccaggagcaggaataagaaagcatcaagatgcagaggacgcaggagaagcagcatctgcacgatgggcagaggacagaggcccagtcacactcaccctctgcctgatggagagacctcccaacataactccaatcgcattgtgaccccggtgccttctagcacatacccattctatagagcagtagttcttaaccccaagccccagggggcaattctgctccccaggggatatttggcaatgtctggagccatttttggttgtcacaattgggggcagggaatgtgccagtggcacctggtgggtagagtccagggatgtgctaaatgttctacagtgcacgcgacagccctccacaaccacgaattatcaggctccaaatgccaatagtgccgaggttgagagactcagggctagagttttagaaaaacttaaaagaaataagatttgggttttttataatcatgaacaatgctacagtgaaaatccttgaaattatagcttagacaaatgatcattatttaggataaattctgaaaagtagtatgctagttcaaaagggtatacttcatgtaagttttagttatgcccagtaacagtgcaaaagactgtctatttccctgggtccttaccaatattagcactattcatccttttaatcttggccaaaatgaaaggatgaaaaaaaaagagagattttaatcccatttttattaccagtgagtttgagcatcttttagtgagtccaattatacaactgtttattgtacaacgctgtacaatataattatttacatcatattaaatatacttgagtatatataattattgtattatatattcattgcattgtattttactatataattatttatcaagttcttaatagatgtttgcagaataataatagctggcactgcttatgtgcaaggcactgttctaagcacaccttgatgtggtcctacctcctcctagccacgtgggtgcacttatcccgcccttgtgttccactggttaggtgaaggctcctttctggtttgaaaaggaatgtatatgagtacatttgaaatatgattgaattttaaaatatttaaaaatattacaacgtttaaaatgttaatattttttaaacactacacacttgttctcattttagtcccaaaacaacctggtgaggttggcactactactactataattcttgctttaaagatgaagaaattgagacacggagtgtccagagacttgcccaaagacacagatcaaagaggggtgttcacaatctgaacccaggtttttttatcccaaagcttccatctttaactactacaccgaactgccagtaacaagagccacttcatgtcttgaaatagcagttggtacacaagcccctaatggaggctttgatttctaagtcaagagggatgcttaagcctttcaaataaaaacagaaagggtcagagacgtatcccaagggggactggaaccc

SEQ ID NO: 468513 - DNA, 510 bp, Homo sapiens
agcaataggaattctgcgctagatgaacataaaaaggggcaagtttctagatcacacttgtaaagtgtctttagcccacatatatttggggatttggggatcctatttgcaaaggcaacttatttgtatggatgaatcccatggttattgttcactaatcatgatggttgtgtgctttactacaaatatgtgcttgatggcagtctggttcaacacagaggttgctcacatcattggtgaaggagtacggtttcaatgtgaaggacacatcaaagacatatcagaactttactcatttgtcagtaatataagatacttctttagagaggcagataatagttttcaaatactggaagaatatctcaatgttgtgtgctattcacaatgtaacagctaaaaggtgacacagttcaggtttaatctacgttgttaacatttcctttgtcacttccttaaatctaaacaatcaacaaaacaatcaactgagcactgattggtagtgtttgctga

SEQ ID NO: 468514 - DNA, 492 bp, Homo sapiens
cacacaaccaacatccagcaccgagtgccagatgcttgagagaggaggcatcttggacttcccactgattgttgcaggatggatcctgaagaaggaaacagaggctattgacggaggaaatgggaaagtagcaagaactggagagaaagaagacagatttagaaggattaagtatgtgggtgagtgggattctggggtcctaggagcagaaccactgcagagagttcccactagggcaatgcctagtggagccccaggagtgggaccatcaagaccccagaactatagagctaccagtgtacagtaccagccagagaaagttactggcataaaactccaacttgttgttcgtggactgttggaagcaaacctagcaccccttgaaggtgtgagagtgtgggaagagcaggtgaggagcggcgaattgcctcatttcgggcaatgagaggaagaggagggtcgggccacagtgatgcatcacagactgtggtg

SEQ ID NO: 468515 - DNA, 566 bp, Homo sapiens
accaacatccagcaccgagtgccagatgcttgagagaggaggcatcttggacttcccactgattgttgcaggatggatcctgaagaaggaaacagaggctattgacggaggaaatgggaaagtagcaagaactggagagaaagaagacagatttagaaggattaagtatgtgggtgagtgggattctggggtcctagctattaatgaagaatttttctttacatgccgtgccttcatccacttcaataacctttttatgcttttccctttgtttgctattattttgtctgatgagtttgtctgtgaacagagacatcttaagagaaaaaaaggaattggtgaaaagacagacatgttaaaattgttatttgcctgagcattagaattttagattaaggcctagaatcaaattcagtttattttctcatagattttatgatacatgttgttttcatttcctattttgagatttaggataggcccagaattgtaataaagttgccatttaaaaaccttccattcattgttatcctagtagacatgtattatttttctcttccaaacat

SEQ ID NO: 468516 - DNA, 980 bp, Homo sapiens
tgtctgctgctgtgtacgatgtgccttttgccttccaccatgattgtgaggcctccccagccacatggaactctaaagattgctttcaccattttcagaggcctctacacaattcaacagatgtattgggtattgactgtatctgtcaaagcacatagggactggcatagagaggggtaccagccacagcatgaggaaggtgatcatcaagacaggaaaaacggattgccgtccatcccatgccccacaattctaccactaccactgtctggcttctcatggtgtgaccgtgagaagcaccccatccatagcccttccattccccaaatgacctccaagttcccttctcttctccccatggattctgacactaaagatgccagcttcatccaaaggctgacttgcttcagggtggcaagatggctgcagcagttccaggcttcacatttgtgtagtcaaaaagctggaaagtcctatgggaatggataatagggtccttaattaataaacaggaggcattctgaaaatttatttttggaatttgtttggttagaacttgaaatacatttctccacggaagcaagttttcaatttactcacaaagaacatcttttcatgtcaataaatattctctgaaagataattgtacatagttgtcttgtatcccttcatatgtatgtatcatgatttatttaactaactttctactgtgggacaaattttggttctttccaaactctttatattataagcaacagtgtgttgaacatttttgttgcaaaaactctgtttatgctgttatttcctcaaattcaattcagtgctacttttgacagtactacttttggtggcttttaatcccatgctttgtgagatgaagtctctgcaaatatgtatgtttgggaatgctacaattcttcacgggtctggaaaccagttttaaaagctccacacatttctgctgttgtacagttcagttt

SEQ ID NO: 468517 - DNA, 587 bp, Homo sapiens
ttattttcagcctggttcttgaaggatgtataggagtttttcagaaggaagagaaagggaagaagcttccagcacctgcctgactacttattactgcttatcctcatttgccgctaatgagggtgatgctgacttgaacaatgtcaatcagggatctacctgcatttctcctactggaccccatttggagcatatttgtaaggtggagcaaaccaagcaaaagagcgggccagaaccaggaagagaagcggcgtcctcccgtgatgtctctccagcgccctctactgacaaagcttatcgtggcgctcaatgtaaaggacaaatgctttacacgtcattatggcagagcagtcaatgctctttcgacggcactataaataatccctttattacatgaattctctcaaaatatcgggaaaaggaatggcctgttaactgagatgattgtataaattgaatttgtttttgatccttgaatctgacaaggatacaatactgcctctaccctgccctttcccccaccaaataatttaaactaagcatacgtgggaaacgattaaaaaatggtatatcagattgtatgactt

SEQ ID NO: 468518 - DNA, 1387 bp, Homo sapiens
gctgtcctccccttttcctcctccttccctcctcctccttctcttttttcttccgtaataatagttattattattagccatcaagaatcgagtgcctaggctctctcctcggagacactgggtgcattctggttgccattttaccttgcctccaacccagcctaaaatgcaaaccgtgtttgacgcccatcccccactggttgtggctgcagcccagcacgttcccctggccaaggagaaagctcacaaagaagcagagctatgcggatgcttgggcggggattctccagcctgtaggaaagggtctgccactattgccgctgaacaccaagatggaccagagaatctgcgcaggacagcaacaatgcctgctgtggtaaccctgagccaaagcaaagcccatgttatggggtggcaggaaccaagagccctgccgagaaggctgacctgccaaaaggaaaatgaggtagagaagcacgagaagcaagacagacaacgcagtcacagagagcagagcctggccgtcacacccactgtctccagcagccgcccacaggagcccacccggcacagtcaccagatgtgacccaggacttgtattccggcaatgactcttccattttcctcccataattatttccagctcttgctcatacaattgttggtttgaaccaccgcacccagttgatttatcctgcaattaaaaaaaaagtgactttgtagctccctctgcaatcttatcttccgtaaatggtgtaaacagttactgctgtgcaaggactctgatttctgacttcttccatgagttctgttttcatatatccaactcgttgctggatacttccatcaggatatacagtcagctctctgtatccctgggatctgcatttgtggattcaaccaactgcagatcaaagatatttggaaaaaaaacaataaaaagctatgacaatttaaaataatacaagtttttaaaaatgcaatgtaacaattatttatatagcatttacattgtattaggtattgtaagtaatatagagatgatttaaggtatatgggaggatgtgcctaggttatatgcaaataagataccattttatacaaggaactttgatatataaaggatttagatatctgctgtgggtcctggaataaatcccctatggataccaaaggacaactgtactcatagaatctcaaattcaatgtatatacaaccaaagatatcatctttttcctcacaccaagtactctttctgatatttctgttaatggcaccattctccattgccttcatgtttacaaccttcatatgatccctgggtctttcctttcccttgattccaatatctggataattggaacattctaccgactcgacctccat

SEQ ID NO: 468519 - DNA, 1343 bp, Homo sapiens
gcgtcacacaaccttccttcaagatgtacatctgaaagattgtttttatatgtgcattattcagcctccccagactctccctcagaactgtaaacaacaaagaaatattttcataactatcagttattctaccaatgacaactccaggttctctggcctttggtatccacagctgtaccagtggcctgcagagttctcaggccttcggcctcaaactgaaagttcgatcatcaccttcctggttctgaagcattcagacttagacttagccacgctactggctttcctggttctccagcttgcagacgacctatcaatggatttctcaattttcataattttatccctaaccaatacaattggcaatgactttacaacagttgagctagataccacagaggtgtatgtatacccaattaaacaaaacaaaactatctggttctatagcaatcaagccaaatacaggctttgagatcttgtacaagttatataatttttatatgcctcagtttcatccaaaataaggataataatatctaccacattaatttgtaaagcaaagagaacaagttggtatgttaaatgtacataaagatgcagattttttcttcatatttaacaatttgctttatgccatcaattgtagtaattgtgataacaatgcagacatttatttattattggttctcaatggacaattacatatgttgcaatgctaaccttctcttcatagaaaaagacagttttagagtgttaccaagatttgtctaatttatacaagcattcgcaactgctctctgggagattttaaagtatgagctatcccttcctaaaatataattattagaaaccttattctctgcatcatgttgaagtcataatagaaaaatatgttatctatataacatcagagactttattgtttatatattaaagcaaagataaattgtttaccatattaaaatatcagtatgaagcttattgcctgctagttttgctagtacttccctcttatattgattttttctacaaattgtataataaagtaaaatattaaggaaatcatactgtagtaaattttctactcccagaaacatacttacaagccttaactctcaatacctgtgaatgtaaccttattttgaaatagagtcattgcagatataattaaggatcttgatatgtgatcatcttggatttagggtgtactgtaaatctaaagaacagaatcctaataaaagaaagaataaagatatttgagacacatcaggacacaaattagaaagctatgtgaagatgcaggtcttctggaaaatctgtatgcacatataaaatttagaatc

SEQ ID NO: 468520 - DNA, 791 bp, Homo sapiens
gccgcaggggtgaagctgcccagggccatgggagcccacctcttgcatcactgtgacccagatcttgtggagttctgtgggagcgagaccacttggctccctggcttcagtccccttcccatgggagtggacgaatctcctgcttcacagaagttcccagagccagaggatgcaagtactcctgggtctcagagcctgcccaaacagccacccacctgcacagccgctaagaaccttcccagctctgtgctcgagacccaaggcccaggtggcatgggcttacgaggggacttcctgaccaactggctgcaaggatccatgggaaaagtgtggtttttcatggagcgaacacgaaagattaaagaggtgatggtgctgcactgtgatttccagtgtactttactaaaggaatatggatttcataagagctggtcaaaggaagtaggtcctgacctaaagcaaagagtcttggatctccaaccagtttattctttatttgcaagatcttccccttcggcacagatttcaagaaatcatattccaaagatagccctgctaaggtaaaactactgccctgagtcctatgaggctaaggaattaaatttggaggtgaccttgagacactaagacaaagggtccaaatgagaaaatatttggtggttactaacattctgtttcttaatcttcaggttaataaaatgatagacattcactttgtaaaaaaaaaaaaaaatcattctgcagtacacttaagttttgtatatatctctgtgtgaattatatgctttgat

SEQ ID NO: 468521 - DNA, 559 bp, Homo sapiens
ccttaattaatgtttaaggctctaaatcaaaatatagtattattgaggtcaccacccaggaaccaaagaggccagaatcctccctactgcaagtggcgcaaactccccaagtctccacctcgtcctcccagtctgcaggctctttcaggcttgaaagctggaattcaccggggaacttggctgtctcctgtctctatcaaagcgacttggcaaattgctgaaaatgaagcaggtttcattagcagagaggagcctcagttaactcatttattagacaaaaacggctgccaagatccattcaacaattactgccatcagcacaccaactctttatctccaattcactccagatggttcagcccttctggcaattccaatgtttcccgtgggacaggactagagcgtgtttcctacaaagatctccatactggtggaataaactcaaacatgccagaatatgttggtagctaaagacttaaatacattaaattatattagtgtgtattacctgcattaaacacctatctttaaggctgattaaaatgtatttgaatgtttt

SEQ ID NO: 468522 - DNA, 949 bp, Homo sapiens
accactacctgcaataacatgactaggaaagttgacggtgtaggtttcagtctatggctgaaggcctgagagtccccggcaaaccactggtgaaagtccaagattccaaaggccaaaaaccctggggtctgatgtccaagggtggtaggaatggactgaagcatccagtgttccaggctatggagctccctcaacagaagccaccgcagggagataagccatgccttttctgggccagtcctgtagagggaggcattccgggctcctggagcagcctgtggacccatgagcctcatccatgtcagtgcactgaaggtacacacaagagcctgggggcccttgttggcaggtctattgctgttggcaacaggatacttagagatccaaagcctgtgggtctctgtggaggcttgagcagtggctctgtccatactccaggcagctctccatgtggttctgtagaccagagggttcatgagggatcttctatgccaaggattgcaaagttccttggcagaagtgtgagtccccagggacactcactcactcaccccttccccacagcaggaagcccccctctcccccgggctctgtgccagtacctgtgatataaataaagatgcatttcaatgaaactttttttttaaataaagtcattctggggacattgcttagaagaaaaaaggtatattggctccttgtattagtattcatttgttattatgacaaatatcacaaagctaagcaacacaaattgtcttcatatgttgtagatcagagtatgacaaaggtcttaggggctaatatcaagattacactattgcaaaaactggcattttgtgggaatttgagtgttcatcactgctatccaaagtaatcctcactcagaatatggctaagactcctgcagaggttacattatatgaaagatttccttacaattgtctta

SEQ ID NO: 468523 - DNA, 1600 bp, Homo sapiens
gtctttttaaatgttgacaaaatgagaaaacatcttgacaatagctcaagttctaagagaaggtctaaaagaccttcaagagtgaggctgaagaagtcagccagcaaacctaaagaactagcagaactgacagcatccccaaggaaatggggccaggttaatgctcattgccaggaatttttgctccagcattttcaaaactcacaggaggtcacagatgagacaggctctcagaatctcctatggcttcctgatgtcacaagtgcccttgctgtcctgtcatgtcacatgccaaaaataaaaactcttcctatgctcttccttagcaaagctctgtggtcttcatattttggatgtaagaggagacaaatgcaacaatgcatataccgtggcttgaggaccaaaactcttcttaaaatcttatttagagatcacaaatagtaatatttgagtgcaaaagtggccaagattttaatgtctcttttgctaagtttttttaataagacattttagtgctgcaatatagggggtgtgtgtgtgtatgtgcacgttgtgcacatgtgtgcgtttgagcctgaaggtatttattcatgtccctgatgactgttaagcatcattaaaggaaattaaacaactgggatggggaagcacttaaagcttattaattctcaaaattttacagtgtgatgggaaaatagtgatgcaaaatattataagcaaggcaaggattgacaattagattttttattttctcacttatataaattaacagaaaatcagaagctgttctaggtatattcccttccttttatattttgcctgttgtcactcatttctttatctatcccaccctactcccatcatatgcacacttacaataaataaacctttgttttccattcatacctgaatagttttgcatctgaagggttttattttaatgtttttctctctttgaatgaaatgttgttccatataactacatctctaaataacttacggacttttagaacatgttgtagaataaaccatacttaagaggctatctcatttttacttgttaaataaaaacactctctcatttgaaacttcataaaatttaagctgaatatttcttagagcctacattgttttctgttgtaattatttgaatttattctaaaatttttaaattctgtgtcactttaggttgaacaatgtaaatatttcataaatattacaaaagtatgaataaataagagaatcaatacagtgaatttattctagcaatcagcctattttcctatagagccatccacatttaatcagatacaaatattaaagcagtaccttaatattgagggtaataatgcaattctaaaagttcctggtgtgcttatttttagtacaataaagcatttatgatatgcctactatatgcatggtttcatattaaacaatcaagatacagaaacaaattaaaaaggaataaaccttttttcagttgaaattattatgcaaacaaacaaatcataatacctaatgacagaataatgaaatagtaaggtttgaagttgctgtcctacgaagggaccttttcacttttatattctttgatact

SEQ ID NO: 468524 - DNA, 793 bp, Homo sapiens
tgggaacctggaagctggaaaagggaagcgagagttcattttattttatactcagtcatacatcttcaactaagatttttcctttcatacctcaatcatgagtatgttctcttttgtaactgctcaagtcaggatgcttgatgctcagaagtcaaagcgtggaaaaaggcaagaaataactaagatcagagcagaactgaaggagacagagacacaaaaaacccttcaaaaaatcagtggatccaggagctggttttttgaaatgatcaacaaaattgatagaccactagcaacactaataaagaagaaaagagagaagaatcaaatagacgcaataaaaaatgataaaggggatataaccaccgacaccacaaaagtacaaactaccatcagagaatactataaacacctctacgcaaataaactagaaaatctagaagaaaaggataaattgctggacacatacaccctcccaagaaaacatttttatgttgggactgccaagacaggataatagagaagtaggaagatgaggataaaattgtaactaaagttgaaaattttctcttttttttcttttcttccttagaaaaccataaagttagtttatatgggatagggaaggcaaagaagagtttaattcttaggaaattttggttaaaattaggaatcacctataatatttggcttaacaaggttcttttaaaggctgcatcattctctgggaatgtggacttactttgtaattttctgaattaaagactagttgccctactctttaatgtctcaatcc

SEQ ID NO: 468525 - DNA, 789 bp, Homo sapiens
tctactcatcaagctgtgtcaattgctgctgccgctgctgcaagtgtcttatagaaacattgctctatagagcactagatgcaagctgtttgtggatctaccattctggggtctggaggacagcaggcccttcccacacttccacaaggaagtgcctcagtgaagactccatgtggggcctcctactccgtatatccttttggaactgccctagtagagattctctcttgtggagaggcctcaggggacttttactcatggtataaggacttggtgccctgtgtcccagccatggctaaaacgagtcaaggtacagctcaggccattatttcagaagatacaagccccaagccttggcagcttaccaatagtgttgggcctgtgggtacacagaagtcaaaaattgagggaagttcagaagggaaatgtgaggtgggagcccccacacagagtcccactggggcactgcccagtggagctgtgagaagagggccaccatcctccagaccccagaattttagatccactgacaacacaatgcatctgaaaaagccgcagatactcaaagccagcctgtgaaagcatatatatcttatctttttcttaccttttggatgaaggaattatacatattgaaatctataaatcttaagtatacagtttgataaattttgatcagtgtatatacctctgtgacccatacttctatcaatttatatatttccattattctaaaaagaaaattgtctcgagcaccttgtaaatacccaggcaaactctattctaaaa

SEQ ID NO: 468526 - DNA, 600 bp, Homo sapiens
gagagaaatatgctcaacagagctcaccgtgtacatgtctgtaaaaagggaggaaagaagtttttcttccctggagcccgagggcgcttcactattctacttgtgatcaagactgacagcagcctataccagcccatgttctacttcctggccatgttggccaccattgacttgggcctttcaacagctaccatccctaagatgcttgggatcttctggtttagcctcagggagattatctgtgatgcctgcctcatccagatgtttttcatccacaactttactggcatggagtcagcagccctcgtgggaatggcttatgaccactttgtggccatctgcaacccgctacgatatagcatcatcctcaccaaaaaggctgtttctgtgattggtcttggtgtgttagaaggcagcaggaggaagacactgacagatgattcggatggaaataagacaactaaaatcaacaacttcaaaggacgaatgatgagggcataaattgtttaaagcacatctccaaaattttcagcattacagatgggtttagatacatctggaaatgggacggcatctaaaacaactgtttatgtttctgcc

SEQ ID NO: 468527 - DNA, 1355 bp, Homo sapiens
cgggccaggtggattttcatcctgatatgcatgggaccgctagtgagtttcacccctcctccttcctgttgctggggatcccaggactagaaacacttcacatctggatcggctttcccttctgtgctgtgtacatgatcgcactcatagggaacttcactattctacttgtgatcaagactgacagcagcctacaccagcccatgttctacttcctggccatgttggccaccactgatgtgggtctctcaacagctaccatccctaagatgcttggaatcttctggatcaacctcagagggatcatctttgaagcctgcctcacccagatgttttttatccacaacttcacacttatggagtcagcagtccttgtggcaatggcttatgacagctatgtggccatctgcaatccactccaatatagcgccatcctcaccaacaaggttgtttctgtgattggtcttggtgtgtttgtgagggctttaattttcgtcattccctctatacttcttatattgcggttgcccttctgtgggaatcatgtaattccccacacctactgtgagcacatgggtcttgctcatctatcttgtgccagcatcaaaatcaatattatttatggtttatgtgccatttgtaatctggtgtttgacatcacagtcattgccctttcttatgtgcatattctttgtgctgttttccgtcttcctactcatgaagcccgactcaagtccctcagcacatgtggttcacatgtgtgtgtaatccttgccttctatacaccagccctcttttcctttatgactcattgctttggccgaaatgtgccccgctatatccatatactcctagccaatctctatgttgtggtgccaccaatgctcaatcctgtcatatatggagtcagaaccaagcagatctataaatgtgtaaagaaaatattattgcaggaacaaggaatggaaaaggaagagtacctaatacatacgaggttctgaatgcaattttatgaaatttcagtaatgttatttttctctattatttggaatagctggttgaagtgtttatatcagatatgaatgcacccattttttgccgggtaattgatgtttcatggagctgcttcttacaatacaattataataattttctgagtgtcaacttttataactgtaggatgctggagataaaattttgactatgtcaccttcccttactttgtggaatttatagagtctaaaattaatgagcaacttcaactttgaaatgtccatactttttgttttaattgttccatatcattataatttatgtttatcttcccttaagagacacagcgatttaatggtaac

SEQ ID NO: 468528 - DNA, 1436 bp, Homo sapiens
ctgtaaaaccaaagacaggaagtatgctacaaatgaagactctgcacaaagcctcaaccctctggaaacatcgagaaaataattatactgactgtactcaacctatattgcagttaaagggacacctacacacagagatgggaaagaatcaattcatcaaggcagaacagaccctccgggagcccatgttctactttctggccatcctttccacaattgatttggccctttctacaacctctgtgcctcgtacgctgggtatcttctggtttgatgctcatgagattaactttggagcttgtgtggcccagatgtttctgatccatgccttcactggcatggaggctgaggtcctggtggccatggcctttgacctcacatttttcctcattggaatcccaggtctggaagacttccacatgtggatctccgggcctttctgctctgtttaccttgtggctttgctgggcaatgccaccattctgctagtcatcaaggtagaacagactctccgggagcccatgttctacttcctggccattctttccactattgatttggccctttctgcaacctctgtgcctcgcatgctgggtatcttctggtttgatgctcacgagattaactatggagcttgtgtggcccagatgtttctgatccatgccttcactggcatggaggctgaggtcttactggctatggcttttgaccgttatgtggccatctgtgctccactacattacgcaaccatcttgacatccctagtgttggtgggcattagcatgtgcattgtaattcgtcccgttttacttacacttcccatggtctatcttatctaccgcctacccttttgtcaggctcacataatagcccattcctactgtgagcacatgggcattgcaaaattgtcctgtggaaacattcgtatcaatggtatctatgggctttttgtagtttctttctttgttctgaacctggtgctcattggcatctcgtatgtttacattctccgtgctgtcttccgcctcccatcacatgatgctcagctaaaagccctaagcacgtgtggcgctcatgttggagtcatctgtgttttctatatcccttcagtcttctctttccttactcatcgatttggacaccaaataccaggttacattcacattcttgttgccaatctctatttgattatcccaccctctctcaaccccatcatttatgggaacacacctcatgccttcacacttcagcatctaaacaaaacttctctgttgacatgagcacttatttttcccctcttgggctgggtttttgtgactttcaattccaggtcaacatttattcattctcatgtattctgtcacacatatttagcattaaacagaagcaaattgcaaaccaccaaatattggaagagaggtatttactttacttgg

SEQ ID NO: 468529 - DNA, 1445 bp, Homo sapiens
tttctgagtccaagattgtaaagctatgacaattcttcttaatagcagcctccaaagagccactttcttcctgacgggcttccaaggtctagaaggtctccatggctggatctctattcccttctgcttcatctacctgacagttatcttggggaacctcaccattctccacgtcatttgtactgatgccactctccatggacccatgtactatttcttgggcatgctagctgtcacagacttaggcctttgcctttccacactgcccactgtgctgggcattttctggtttgataccagagagattggcatccctgcctgtttcactcagctcttcttcatccacaccttgtcttcaatggagtcatcagttctgttatccatgtccattgaccgctacgtggccgtctgcaacccactgcatgactccaccgtcctgacacctgcatgtattgtcaagatggggctaagctcagtgcttagaagtgctctcctcatcctccccttgccattcctcctgaagcgcttccaatactgccactcccatgtgctggctcatgcttattgtcttcacctggagatcatgaagctggcctgctctagcatcattgtcaatcacatctatgggctctttgttgtggcctgcaccgtgggtgtggactccctgctcatctttctctcatacgccctcatccttcgcaccgtgctcagcattgcctcccaccaggagcgactccgagccctcaacacctgtgtctctcatatctgtgctgtactgctcttctacatccccatgattggcttgtctcttgtgcatcgctttggtgaacatctgccccgcgttgtacacctcttcatgtcctatgtgtatctgctggtaccaccccttatgaaccccatcatctacagcatcaagaccaagcaaattcgccagcgcatcattaagaagtttcagtttataaagtcacttaggtgtttttggaaggattaagttagagtaaagagaggaagttttggacataaagcccacaggtttctgtttgttttcagctgtgctgtggcaaaataataaaccgttgactgtcaacaaaaaggcaattggctgtgcaacataaggcagtgtgaccaggagaaagttacttacctctctgttctccagtttcctcaactgcagaatgagcaaggaaataattataataccttccttcctcatagggatgttgtaaatatttaataatttaggtagttttctaacacagtgtctggcaaatatacaattttcaataaatattaaccattatgattggacaaaatctaaaacagtacaaaagtttcatctttcaattctctggccagtgtaatttcattgatgattaactgtttaaacatatttttatttatttatttttatgttactttatcataattacagattttattcattt

SEQ ID NO: 468530 - DNA, 1103 bp, Homo sapiens
agagcctatatgatcttcaggtggacagtgagttaacggcccaaactattaatgccaccgttattggagtgcaatcaccagtactgcctcaatttacttcaggattttggagggcacccaccttcccccttgtctcctcacacaatgaccctgggatccctgggaaacagcagcagcagcgtttctgctaccttcctgctgagtggcatccctgggctggagcgcatgcacatctggatctccatcccactgtgcttcatgtatctggtttccatcccgggcaactgcacaattctttttatcattaaaacagagcgctcacttcatgaacctatgtatctcttcctgtccatgctggctctgattgacctgggtctctccctttgcactctccctacagtcctgggcatcttttgggttggagcacgagaaattagccatgatgcctgctttgctcagctctttttcattcactgcttctccttcctcgagtcctctgtgctactgtctatggcctttgaccgctttgtggctatctgccaccccttgcactatgtttccattctcaccaacacagtcattggcaggattggcctggtctctctgggtcgtagtgtagcactcatttttccattaccttttatgctcaaaagattcccctattgtggctccccagttctctcacattcttattgtctccaccaagaagtgatgaaattggcctgtgccgacatgaaggccaacagcatctacggcatgtttgtcatcgtctctacagtgggtatagactcactgctcatcctcttctcttatgctctgatcctgcgcaccgtgctgtccatcgcctccagggctgagagattcaaggcccttaacacctgtgtttcccacatctgtgctgtgctgctcttctacactcccatgattggcctctctgtcatccatcgctttggaaagcaggcaccccacctggtccaggtggtcatgggtttcatgtatcttctctttcctcctgtgatgaatcccattgtctacagtgtgaagaccaaacagatccgggatcgagtgacgcatgccttttgttactaactgtgtctagtgtt

SEQ ID NO: 468531 - DNA, 2086 bp, Homo sapiens
gagcccatgtatttttctagccatgttagctgccactgacctcagcctttcactgtcttccatgcctaccatggtcagtgttcactggttcaactggcgttcaataacttttaatggctgccttatccagatgttcttcatccacacatttgggggagtggaatcaggtgttctggtggccatggcctttgatcgctttgtggccatccgctttcctttgcactatgctacaattctcactcacagtgtcatcagcaagattgcagcagccatcctgctacggagtgtgggggctgtgctccctgtgccttttctcatcaaaaggttacctttctgtcactccaatgtcctctcccatgcatactgcctccatcaggatgccatgaggcttgcctgtgctgacactggtgtcaatagcatctatggcctgttggctgtgatcttcatcattgtactagatgccttaatacttttggcctcttacattctaatcctgcaggcagtattgagcattgcttcccaggaagacaggctcaaggctctcaacacctttcagtgtcttcaaccaaccatggcaatattcaataacaccacttcgtcttcctcaaacttcctcctcactgcattccctgggctggaatgtgctcatgtctggatctccattccagtctgctgtctctacaccattgccctcttgggaaacagtatgatctttcttgtcatcattactaagcggagactccacaaacccatgtattatttcctctccatgctggcagctgttgatctatgtctgaccattacgacccttcccactgtgcttggtgttctctggtttcatgcccgggagatcagctttaaagcttgcttcattcaaatgttctttgtgcatgctttctccttgctggagtcctcggtgctggtagccatggcctttgaccgcttcgtggctatctgtaacccactgaactatgctactatcctcacagacaggatggtcctggtgatagggctggtcatctgcattagaccagcagttttcttacttccccttcttgtagccataaacactgtgtcttttcatgggggtcacgagctttcccatccattttgctaccacccagaagtgatcaaatacacatattccaaaccttggatcagcagtttttggggactgtttcttcagctctacctgaatggcactgacgtattgtttattcttttctcctatgtcctgatcctccgtactgttctgggcattgtggcccgaaagaagcaacaaaaagctctcagcacttgtgtctgtcacatctgtgcagtcactattttctatgtgccactgatcagcctctctttggcacaccgcctcttccactccaccccaagggtgctctgtagcactttggccaatatttatctgctcttaccacctgtgctgaaccctatcatttacagcttgaagaccaagacaatccgccaggctatgttccagctgctccaatccaagggttcatggggttttaatgaacttactgagcatctggttctggataccatgaagctggcctgctctgacaacaagaccaatgtcatctatggcttcttcattgctctctgtactatgctggacttggcactgattgttttgtcttatgtgctgatcttgaagactatactcagcattgcatctttggcagagaggcttaaggccctaaatacctgtgtctcccacatctgtgctgtgctcaccttctatgtgcccatcatcaccctggctgccatgcatcactttgccaagcacaaaagccctcttgttgtgatccttattgcagatatgttcttgttggtgccgccccttatgaaccccattgtgtactgtgtaaagactcgacaaatctgggagaagatcttggggaagttgcttaatgggttataatgttgaaatcattaggagagggtgcactctgcctaccacaaatacattttctcaacttctctttatctatttatttctttagcaggacattgctagatgtactgtattcatctttgctgacactttttgctccaagtacaacaaacttat

SEQ ID NO: 468532 - DNA, 2901 bp, Homo sapiens
tgcatgcatcatgcagatgttcttcatccatgtatttggaatagtagaatcaggagtcctagtgtccatggcctttgacagatttgtggccatccgaaacccattacactatgtttccatcctcactcacgatgttattcgaaagactggaatagctgtcctcacccgggcagtctgtgtggtattccctgtgcccttccttataaagtgcctacccttctgccattccaatgtcttgtctcattcatactgtcttcaccaaaacatgatgcggctagcttgtgccagcacccgcatcaacagcctctacggcctcatcgtcgtcatcttcacactggggctcgatgttctcctcactctactgtcttatgtactcaccctgaagactgtgctgggcattgtctccagaggtgaaaggctgaaaaccctcagcacatgcctctctcacatgtctaccgtgctcctcttctatgttccttttatgggtgctgcctccatgatccacagattttgggagcatttatcaccaccagaactctgtgttaaatcctcacctagtctgctggtggacacattaccccaaagaggaccagaacctcagggtagtggagttgctggccctccctatttccttgccaccaaaattgccgtgctaactgacagagctccaaatcacggaagctgcctcacgagtgcaccctcctggtggacattgcccctcattgctgtctaccttctctctgcactgggaaatggcaccatcctctggatcattgccctgcagcccgccctgcaccgcccaatgcacttcttcctcttcttgcttagtgtgtctgatattggattggtcactgccctgatgcccacactgctgggcatcgcccttgctggtgctcacactgtccctgcctcagcctgccttctacagatggtttttatccatgtcttttctgtcatggagtcctctgtcttgctcgccatgtccattgatcgggcactggccatctgccgacctctccactacccagcgctcctcaccaatggtgtaattagcaaaatcagcctggccatttcttttcgatgcctgggtctccatctgcccctgccattcctgctggcctacatgccctactgcctcccacaggtcctaacccattcttattgcttgcatccagatgtggctcgtttggcctgcccagaagcttggggtgcagcctacagcctatttgtggttctttcagccatgggtttggaccccctgcttattttcttctcctatggcctgattggcaaggtgttgcaaggtgtggagtccagagaggatcgctggaaggctggtcaaacctgtgctgcccacctctctgcagtgctcctcttctatatccctatgatcctcctggcactgattaaccatcctgagctgccaatcactcagcatacccatactcttctatcctatgtccatttccttcttcctccattgataaaccctattctctatagtgtcaagatgaaggagattagaaagagaatactcaacaggttgcagcccaggaaggtgggtggtgctcagccatggggctccacaatctgtagttggcaaagccagccaggcctgtgtcctttccttcaggaagaagtctacctggtgttctattatactgcagctgagctggcactcacatcacaagatacagaccttcccactctccctccacttttcaaaggcaaaggaccctcatcctgtagccacctgccactactggccatgaggagtactgccagaaaaccacagatgttcctgtcagtgggctcccctctggcccagggcagttccagaaatgccatccaagagtcaaatcctggaatgggggatcccaagaacctgctctacacccctgtggttgtgctggtacctacggtgcaagagaaagtcctcttactcttccctcaagcagaaggagtctctccccatagccagcacagctggacagcactgagtttaatgcatcagaatttcatttctgacaccagtgtgtctgctctcccctctccaagcacccagagacattctctgcaccacactgccattgccattgcctgatgacaggggcagcgcggcatcggcgattcaaggaatgacaacatatcacttatttattatagctttatagtgtgatttacttaatatgagatgtaaagcaaacccaatctcacaaaacaaacgaaagctttggatttctaggaggtgttaaattatatttatagattaaatgtaagaaaataaacattaacggatagcaaccagaatgttactcgtgtgtgtatgtgtgtgtgtgtgtgtgtgtgtgtgtgtgtgtcagaaagagagaggaagagagagagaggggggagggagatattgagaattcataacagggatcataagttcaaatgtttagagaagccaaggaaataacataaatttataaaacaagtacatattcacactgtgagtagtgggatctttattaaccaagaggcttaagacttctcaggggttgcctactgaatgtttgaatgtttccatgggggaatataggtctactacttccatgtctttccatatttaagataatttatgtctatattttatatattttgtgtgtataattttatatatatatagacaaaataatccaaacactgccatgtccaaacaaaacctgtctgaagaccatattgagatcttaaagcttttaaacacattaacttatttaatccctggaatgtatggagaaataattatgttcttaatttaaaagtacatatgaaatatatcataatacataggaagtaattttctcaataccacacagccaggaaatggcagagctgaaaccagaggacctgttcctgacc

SEQ ID NO: 468533 - DNA, 1666 bp, Homo sapiens
ccggaagccagcagccatcactttacacttttgaacagcagtaaattacccccaaatacttcacagagaaaaagatgttttttcttcatggattcacttttatggaatctggagtgctggtggctacagcctttgaccgttatgtggccatctgtgatcctctgaggtacactaccattctcactaattccagaatcattcaaatgggtcttctgatgattacacgtgctatagtactaatattaccactacttttgctccttaagcctctctatttctgtagaatgaatgccctttctcactcctattgttaccatccagatgtgattcaattagcatgttcagacattcgggcaaatagcatctgtggattaattgatctcatcctgaccactggaatagatacaccatgcattgtcctgtcatatatcttaattattcgctttgtcctcagaattgcctcccctgaagaatggcacaaggtcttcagcacctgtgtctcccacgtgggagcagttgctttcttctacatccacatgctgagcctgtccttggtgtatcgctatggtcggtcagcccccagagtagtccattcagtgatggctaacgtatacctgcttttaccccctgtgctcaaccccatcatctacagtgtaaaaacaaaacaaatccgcaaggctatgctcagtctgctgcttacaaaatgaacagacatagttttatttgatacaaacctggcatgaatgacttgcactgtagaaaagcgaacttgctctcttactgcctattgcatgtgggtttttaaaatatttttcattcaccaaacaaatagtaaatatgttgtacatttggtcataaaatataagtatgatatatcacccaagacatttgtagtggaattaggaaaataacaataatgaaatgataaataatactcctggcaattaacatgtattgactctttgtttcaggctaggtgttctactaactgcttttaagacatattccatttattcttccaaaacagcaaaatgaaatatatattactattagtgatatattacagatgatggaacagatttatagacatttaggcccccaaaggccatgtgaataacatgaggcacagttgagatttgaacccaggtgttctgtatctcaaatgctatgctcttcatcactgtattacatactctgccaaagtcatgtagcagaaatgttttaagatcaaaagtaagacctggatctccatggttccatcctttgtcttaaaaagttgtagtaaccttcttagaatatactctagctgttttcttcatggataattcataatacaaaaggtaggaatagatatgtcagggcatgtgagtcactatccagtgttggacagtccaaagaaaagctttaggggtgaggcacacttgctaatttatcacagggaatgggaacttgagagaactagaaaagaatgtaaagtaaattacaaggaagtttggggcagatgttctgaacctttttctgcattgtggtcccttagaaagctaatgaaatttatggacctttccccatagataaacatactcacattattttccatagtgtgattaaatgccattaaagacctatgtgactccttaaccagctaaagaaccaaggtaaagaattc

SEQ ID NO: 468534 - DNA, 589 bp, Homo sapiens
ggccagcggatgcctcggtgtgcgatgcatgccagcttgatgtgcaggctggctctgagccggaccgtgctcctcatcagacctccttctccctccacagggaagaatgacctgacaaactcaagaggcaagccaatttggttatggatagctcaagtttttccattcctaaggaaatctcagctcaatatcagggttttcccaaatttcaccttgagtgccctggctacctctttctgcataatctccagggtgattcgtccactgtggggtgatcagagatctcaagggtatgctggagttcctaaagctgtattgcagcacagacagacctttctgcagcagttcactccaacacaacttcaaattgcagaagacagtgtcccccttagggtgttaggttcatttatctttctgcatttttataataagagaagataagaaaactaaaaggtgtgtcaatgaattcccatgggaaaaagtgagaagtgattcagtgatccaatgatgtcccatctcccaaggagaagaattggaaggcttcacttgactgtaggtgaccattaagtctgctaggtcatgtttagca

SEQ ID NO: 468535 - DNA, 709 bp, Homo sapiens
tctacaagagctctggatgacttactttgtgggaacagtatggggacaattggggaggtcttggtacagtgggaaggcttagcatgcaatgtgaattatatggaggaagtcactctaacaactcaatgcagtttggaaaagggttgggatcaaaatgaggagactgaacaaaagaagcatcacttctattccttctctccagtacttcctcatgcggatgcagcagaggaagatttacccacctgcacgactcagcggaagaagaagtttgcgagagagaaagggaaagaaaggtcaagctgcggaatgaatgtcgacgatgttgcaatggatggtttaatgcgaagacacggcatacacgtggccctgctgagcatccatggacaggcagcagagataaaccatccctcctacagtccatacattgcaaaatgtgcccatggctcctgaagtacagttgattcttatttttcacaaattctgtgtctatgaatttgcctgctcaccaaaatttatttgtaaccccaaaaccaatattcatggtatgtcaccttagagattgttcattgttggcatagagaaatgctactgatttggggatactgattttgtatcctgcaaataaattatttatacaaataaattatttgtaaatttacttattagttctaatagttttttggcagagtctttagcttttaccaaatat

SEQ ID NO: 468536 - DNA, 1569 bp, Homo sapiens
ctgaataggaacagctccggtctacagctcccagtgtgagcgacgcagaagatgggtgatttctgcatttccatctgaggtactgggttcatctcactagggagtgccagaaagtgggtgcaagacagtgggtgcagcccaccgtgcgtgagctgaagcagggtgaggcactgcctcactcgggaagcacaaggggccagggagttctatttcctagtcaaagaaaggggtgacaggcggcacctggaaaatcgggtcactcccaccctaatactgcgcttctccaacaggcttaaaaaacggcacaccaggagattatatatcctgcacctggttcagagggtcctacgcccacggagtctcactgattgctagcacagcagtctgagatcaaactgcaaggcagcagcaaggctgggggaggggtgcctgccattgcccaggcttgattaggtaaacaaagcagcctggaagctcgaactgggtggggcccaccacagctcaaggaggcctgcctgcctctgtaggctccacttctcagggcacggcacagacagacaaaaagacagcagtaacctctgcagactcaaatgtccctgtctgacagctttgaagagagtagtcgttctcccagcacgcagctggagatctgagaactggcagactgcctcctcaagtgggtccctgacccccgagcagcctaactgggaggcaccccccagtaggggcagactgacacctctgagacaaaacttcccgaggaacgatcaggcagcagcatttgcgggtcaccaaaatccactgttctacagccaccgctgttctgcagccacagctgctgacacccaggcaaaaagggtctggagtgtacctctagcaaactccaacagacctgcagctgagggtcctgtctgttagaaggaaaactaacaaacagaaaggacatccacaccaaaacccatctgtacgttgccatcatcaaagaccaaaagtagataaaaccacaaagatggggaaaaaacagagcagaaaaactggaaactctaaaaagcagagcacctctcctcctccaaaggaacacagttcctcaccagcaacggaacaaagctggagggagaatgactttgacgagttgagagaagaaggcttcagacgatcaaacaactctgagctacaggaggaaattcaaaccaatggcaaagaagttagaaaccttgaaaaaaaactagacgaatggataactagaataaccaatgcagaaagagcaactccaagacacataattgtcagattcaccaaagttgaaatgaaggaaaaaatgttaagggcagccagagagaaaggtcgggttacccacaaagggaagtccatcagactaacagcggatctcctggcagaaactctacaagccagaagagagtgggggccaacattcaacattcttaaataaaagaattttcaacccagaatttcatatccagccaaactaagcttcataagtgaaggagaaataaaatactttacagtcaagcaaatgctgagagattttgtcaccaccaggcctgccct

SEQ ID NO: 468537 - DNA, 984 bp, Homo sapiens
gagagagagagagacaagaggccaacagaagcgggcgatagtgaagtcaaagcagacagcatcacctcctcttatgggcacctgtctaaaatgttaccagggatatgggcaagccgcgagcagtgctctcatgttgacagctctcatgcgtcttcagcaaatgaagtataaatgtaaaagaaaatcagtaaaagccggtccgttatcggactgtatagaggtgggaaggccaaaccgaggaattatgtctgacagaagggaagaaatgactgtggtggccttctcagaccctgtggaaaaggcatctacccatccagtgaaagtgtctacccggaccaacaggcctggtggaactgccatcaataaaccaaatgtgatcagggcgaggaacagggaagaaggaaatatggggaaatggggtgaatgtcaggtggatcagagagatacagtcattggggtcaggtgtggtatccagaataatgtgggaggccggattgaagtccgggccaggaacaatggtaactgtgggagactcaacaaagaggcgatggcagccactgcacggagacatgatggccagcctaaaacagtaaggtcaagttgtttggacaaaaaggctacaggacgtggtcccagtccttgtgtaagaattccaactgcacagccctgcacttcagctgtgtgtaatgaaaagggttgggatgagtcagggagagctagtgtgggggcagtctctaaagctgtctttaaggaacggaaagaggagtgaggaaaggatttaagatctatggggtcagctaggtttccttttgtgagtttatgtaatggttttgttaggatggcaaaaccaggtatccaaaggtgaaagtatccaaccatgcctaggaaggaaaggagttgttgtgttgtagaaggtgttggggtttgagagatcagttagacatgatcagcagggagagcacatgtgtttttatgaagaattat

SEQ ID NO: 468538 - DNA, 582 bp, Homo sapiens
tctctctcaagcgtggctgattctgcggcttttatgggctcagaatgggggagtgcatgctgagtgactacttttcaccatctgaaaagaagcctgatgctgcaggcagtcctagttatgcttgtaactatgcagaagagtgttcgactcaccttggtgtcacctctccacggagagctgttttgttgctcaataaaattgttctctgccttcctcactcttctcgtcagtgtgatctcatccttcttggacgtgggacaagaactcggcacccactgagcgtgggcacaaagaaggctgtaacctcgtggctctctgccctccgctggtgggggcagctgccccacacgatggaagcaggtcacgggcacccctgcctgggcgtcactgccttccccttgcctggacacgagagtccaccacgggagtggcttgcaacacgcctggtccagccgcaagcactgcacggagcctgtctctgtgaatgcacttggaacggcggactggaccccacactcacttattcacacatcccctcccaccgggagctgagcaggctgttgcagtgaccccaggacccac

SEQ ID NO: 468539 - DNA, 600 bp, Homo sapiens
gtcgccaccagcaccacagctgccgtctttatagttaatttcgatgaactcagatatatcaatttttcactttattgtttgtatttttcaggagaaccgatgtgtgatattccccaccctgtgtccaggtatctccagaattagttccttccagtgggttcttggtcttgctgacttcaagaatgaaaccacagaccctcatgcctcgctgctgactggcagttcgatcttggactgctgtgctagcagtgagcaaggctccgtgggcgtcgggcccaccgagccaggcacgggatataatcttctggtgtgccatttgctaagaccattggaaaagcgcagtattatggcaggagtgtcccgattttccagggcttcaggatctcagccttggccaagggcctttggttcccaagtgaagaaccagaccactgagggaagcaggaggacaaagaagggagaaatctcagtaaagtccccatatggtcaagatgccaggcaaggtgtcagagccctggaattgggaggagtttgaatctcagcctccgaacccggccggttaattttcttttaaagcaaagaacagtagaaactttattc

SEQ ID NO: 468540 - DNA, 572 bp, Homo sapiens
tgcaaaaggcagacccctttgcctcaagatccttgaggaatcgccacactgtcttccacaatggttgaacttccacgtcaaccattgtcttccacaatggttgaacttccacgtcaaccattgtcttccacaatggttgaactaatttacagtcccaccaacagtgtaaaagcacaggcccctctgctgcaggtctgctggtgtttgctggaggtccactccagaccctatttgcctgggtatcaccagtggaggctgcagaacagcaaagattgctgcctgctccttcctctggaagcttcaccccagaggggcacccgccagataccagccagagttcgcttgtatgagcagagcttgagtgctgtgctgggagatccgctgctctcttcacagctggcggccaagatgcccttcccagagaggagaaatctagagagtcagtctggctacagtgactttgccgcgctgtggtgggctccaccaagtgtgaacttctggcagctttgtttacactgtgagggataaaccgcctactcaagcctcagtaatggcgaatgcctctcccctga

SEQ ID NO: 468541 - DNA, 1080 bp, Homo sapiens
tggggcagagctgcctaaggccatgggaatccacctcttgcatcagcatgacctggatgtgagaggtgaagtcaaaggagattgcttgttgaacggctttgaccaaaatgctaataatgttatacacaatgaaatccaggttgaggtgttctcagatggagatgaagaacttgttgggatctggagtaaagaaatcactaagcagcaaagtgttcaagagatgacttgggtgctgttaaaatcattaagttttaaaagggaaaaagagcataaaagtctggaaaatttgcagcctgatgatgcaacagaaaagaaaaacccattttccgaggagaaatttaagccagctgcagaaatttgcatacgtaatgaggatccaaatgttaatcaccaagacaatggggaaaatgtctccagggctttctattgttgaaactttcactgcattttctatttctctaagtgtgtctttcatttccagaagttctgagtgttttttctttatggtttctttttccctggaagatttttacattcatatcctggattttttaaaaaaatatttaagttggtattcacctttctctggtatctgggaaatattaagctaccttgagtaacttaataatcaaccctccgaattctttatgtggcatttcagagacttctttttggtttggatctactgctggggagttagtgtgatcttttgggggtgtttatagagccctgttttgtcatattaccagaattacttttctggttccttcttatttgagcagactatttcttgaaattgttcatgaatttatttttgattggactgtggttttttaatttcatttttcccctcctgaggatcagactttaatgtttatactttatttttgcctaatttgattattggtgcttttaggggtgaagactctgtatgagttccttagttatagagtctttttgcactggctttcttagatgctggttgtagtagttatatactcattgtgtgggcaagtttactgtctcctattggttgagaatggcagggatctcttgaagcttatcccattctctcatggc

SEQ ID NO: 468542 - DNA, 523 bp, Homo sapiens
tttaaagccagaatttctcttggagggcatggacagtttctcacacctcctgggattagaggtggagaaacagaatgggctgggtgggcagagactgggtggttggagctcagggcctggggcagggagttgtggggagggagggtgggaaggtgaaggggaggtggtggcaggtcatgggggtccactgtgtgccatactgtggaatataaacctctccatcagtgcagagccacacagcaaaggttttaagtggataagtatgtatggggagtgggacgtgatctgcctgtctgccctgaaactgggaaaggtggatccagctgctgtccaggccttcaagaagcagagccccattcaattgtccacttctctgttgctgcccagagccagatcctgtgtgggatacttggcttttcaagggcctgtgtatggtgtgttgttgagtagaaatgtctgagatgctcctttagtagcacctgattcttttggatcagtgatttgccatttcttatatgaaaac

SEQ ID NO: 468543 - DNA, 663 bp, Homo sapiens
agctgcctttaggaactgtaacactcatcacaagcatccgcggcttcattcttgaagtcaatgctttgaaaggtgaggcgatatggtttggctgtgtccccactcaaatctcatcttgaattcccatgagtcatgggaggaacctgattgtgtatatcatcagatgatcttgacaaagtccaaaagccaccaggtctctattggaaatagttacaagggtcaagccctcacaattaccagaaattcaagctgccttatatatgtatggaaaagatatgtaacctactgcctctccaaagcaccttcaggaaaacatcctgttcactcagatgctatctatatttcagcaaatgtcagcaagtccacatactttggcagaacaaatgttacttttcctttcattactgtcctaagaggagttgtgcaatcctatagattatcacatggagctctcattggtatggggccaaggctgaatactcttttccagaggaggcaaattgtgaattagtagttcaatatggagggaataattccctgctcacgaaggacccaaactctccgtatctttacactctacaatactattatatgtcttcaattcttaacattgcttcatgttccaaaatggctgctgaatctacagcctttatgtctgctttg

SEQ ID NO: 468544 - DNA, 7751 bp, Homo sapiens
gaaaggacatttgagagctaatggagttcaatggtgaaatagcaaatgtcaccagacaaaaagtagtaagaagttatagtctgcgaaagaacatttgggagtactttgaggcttatggtgaaaaagcaattaacttcagtacttacctgactggatcgtccctggcagaatattttctggaagactgcattcggatgacccactttgttcctccaccaaaagacaagaagaagaaggataaggatgatgatggtggtgaggatgattatattcctccagagcaacagcgcaaagtgttggatccagtaccagttggagtaaccaaggtaaatattaaacattacaatgatgggattggaagtgatgttgatattaaacaaatgttacaggtcttcaaagagctacccaaaaaattacatcataaacaaaccttgagcagcggaaagggtgagctggccgagtacgtcccggattctgctttcacctctgcagccaagctcgttttgacagcttaaaaggtcaacaagttgtgaggataagtcagaaatcgctatgcaaccagattaaattttgtccacagtgtgtatagtgaatgaaaaaaggtttgatggtaattgtaaaataaaaggatgaggaaagggaagctctgtatccctgattaccatgctgcaaaaactttattggaaacaatgtttttgtagaatctgcaaaaggacattagggggcgcatagagatctatgctcaaaaagaaaatattttcagatataaactagaaagaagctttctgcaaaactgctttgtgatgtttgcgttcatctcacagtgttaaaaatttcttttcattcagcagtttggaaaaactgtttttgtccattctgcaaatggacgtttgggagctctgtgaggccaaaggtgaaaaaatgaatatcctaggatgaaaaatggaaggaagctatctgagaaactgctgtttgatgtgtgcattcatctcactaagttaaacttgtcttttcattcagcagtttggaaacattgttttggtagtatctgagaagggttgtttgggaggactttaaggcctagtgtgaagaagaaaacatcttcagatagaaactcgaaagtacctttctgagaaaatgctttgtgatgtgtgcattcatctaactgagttaacctttccctgaattcagcagtttggaatcaatgtttttgtagaatctgtgaatggatacttgagtgctccttaacacaaatgatgaaaaagtgaatatcccgggataaaaactagaaggaagctatccgagaaatcactttgtgatgtgtgtattcatctcacagagttaaactttccttttattcagcagtttagaaacactgttttggtagtatctgaggagggttatttgggagcactttgaggcccagtgtgaagaaggaaatatcttcagataaaacctagaaagtacctttctgagaaactgctttgtgatgggtgcattcatctgagagagttaaacttttctttggattcagcagtttggaaacactgtttttgtctattctgcaagtggagactgctgagttcattgaggccaatggcaaaaaagtgaatagcccaggataaaaactagaaggaagctatttgagaaactgcattgtgatgtgtgcattcatctcacagagttaaagttttctttcaattcagctgtttggaaatactgttttggtagatttctcaaagggatatttgggagcacattgaggcctatggtgaaaaggaaatatcttcagatgaaattagaaagaagcttttgaagaaactgctttgtgatgtgtgcattcacctaacagagttaaactttttttggattcagcagtttggaaaccctggttttatccatcctgcaaatgaaagttttttagctcattcatgacaaaggtgaaaaagtgaatatagcagaataaaaactagaaggaagctatctgagaagctgctttgtgatgtgtgcatccatctcacagtgttaaagctttctttccattcagcagtttggaaacactttttttgtagaatctgtggagggatatttgggagcacattacggcctacattgaaaaaggaaatatcttcaaataaaaactagaaagaatatttctgaaaaactgcctcatgatgtatgcattcatctcacagagataaacctttctttggattcagcagtttggaaacactgtttttgtccattctgcaaatggacatttgggagctcattttggtcaatggcaaaaagtgaatattccaggataaaaaccagaagaaaactatctgagaaactgctttgtgatgtgtgcattcatctagcagagttaaacttttcttttcattcagcagtttgtaaatactgtttggtagaatctgtgaagggatatttgggagcacctcgagggctatggtgaaaaggaaaatatattcagataaaaattagaaagaagctttctgagaaacagctttgtgatgtgtgaattcatctcacagagttaaacctgtttttggattcagtagtttaaagacactgtttttgtagaatctgtgtagggatattttggagtcactgaggccaaaggcgaaaaagataatatcccagggtaaaaactggaaggaaggtatctgagaaactgctttgtgatctgtgcattcatctctctgagtagaagtcttcttttcattcagcagtctggaaatactgttttggcagaatctgtgaaggaatatttgggagtgtattgaggccaaaggtgaaaaagtgaacataccaggataaaagctagacgatacctatctgataaacggctttgtgatgtgtgcattcaacttgcagagttaaacttgtctttttattcagcagtttggacaaactcctttttagaatctacgaggggttatttttgagggctttgaggactatcatgaaaaaggaaatatcttcaaataaaaactagaaagaagcattctgagaaactgctttgtgatgtgtgaattcatctcacatagttaaacctttctttggattcagtagtttggaaacactatttttgttcactctgggaatggacattagggagctccttgaggccaaagacaaaagagtgaatatcccaggataaaacatagaaggaagctatctgagtaactgctttatgctctgtgaattcatctcactgagttaaacctttcttttcattcagcagtttggaaacactgttttggtagaatctgttaaaagatattagagagcgcttagaggccaatggtgaaaaaggaaataacttcaaagagtagaaagaagctttctgagaaactgctttgtgatgtgtccattcaactcacagagttcaacctttctctggattcagcagtttggaaatactgtttttttccattctgtgaatggagattcctgagctcattgaggccaaatgtgaaaaggcaaatatccaaggatgaacactggatggaagctatctgagaaactgctttgtgatgtgtgcattcatctcggagagttaaatctttcctttcattcagcagcctgaaaacactgtttttgtagattctgcaaagacatatttgtgagcacaatggggcctatcgttaaaaacgaaatatcttcagataaaaactagaaggaagctttttgagaaactgctttgtgatgtgtgcatttgtctcacagagttaaacctttctttggattcagcaatttggaaacactgtttttgtagaatctacaaagggaagtttgggaactcattgaggtcaaagatgaaaagttgaatatccctagataaaaactagatggaagctatctgagaaaccactttgttatgtgtgcattcatctcgcatatttaatccaatcctttcattcagaagtttggaaacactgtttttgttgaatctggaagggatatttgagaatgcattcaggcctgtggtgaaaaaggaaatatcttcagataaaaaattgaaagaagctttctgagaaactactttattatatgtacattcatctgacagatgtcaatctttctttggattcagcaatttggaaacactgtttttgtagaatctatgaagggatgtttgggtactcattgaggccaaagatgaaaaatcgaatatcccaggataaaaactagatggaagctatctgagaaacagctttgttatgtgtgcattcatctcacagagttaaacatttcttttccttcagcagtttggaaacattgtttttgtagaatctgaagggatatttgagagcactttcaggcctgtggtgaaaaaggaaatatcttcatataaaacattgaaagaagctttctgagaaactgctttgtgatgtgtgcattcttctgacgtatgtcaacctttctttggattcagcagtttggaaacattgtttttgtccattccacaaatggacatttgggagtttagtgaggccaatggtgaaaaagtatccccagataaaaactagaagaaagccatctgagaaaccactttgtgatgtgctaattcatttcacaaaattaaacctttcttttcattcagcagtttggaaacagtgttttttaagaatctgggaagggatgtttggtagatcactgagtccataggtgaaaaagtgagtatcccaggataaaaaatagaaggaacttatctcagaaaatgctttgtgatgtgttcatttatctcacagagttaaacttttcttttaattctgtagtttggaaacactgtcttggtataatctgtgaggcaatatttgggagcgcattgaggcctatggttaaaaaagaaatatcttctagtaaatattagcaagtagcattctcaggaactgttttgtaatgcgtgtattcatctcacacagttaaaccactgtttggattcagcagtatggaaaccgtgtttttgtagaatctatgaagacatatttgaaagctccttgaggccaaaggtgaaaaaagagaatatcccaggataaaaactggagagaaactttctgagagacagctctgtgatgtgtgcattcacctcacagagttcaacctttctttttattcagcagttaggaaacactacttttgtagaatctgtgaagggatatttgggagtttattgaggcctatggagaaaaagagagatatattcatattaaaactagaaagaagctttctgagaaactgctttatgatgtgcgcattcatctcacaggtttaaacttttctttggaatcagtagtttggaaacactgttgttgtccattctgtgaatggatatttgggacctcattgaggcccatggcaaaaaagtgaatattccaggataaaaactagaagaaagctatctgaggaactgctttgtgatgtgtgcattcatttcacagagttaaacctttcttttcattcagcagttttcattcttttcattcagcagtttttaaacacctttttttgtagaatctgcaaagggatatatgggaattcactgaggccaaaaaccataaaagcaaatatcgcaggatgaatactagaaggaagctatttgagaaactgctttgtgatgtgtgcattcatctctcagagttgaaacttccttttcatttagcagttaggagacactgtttatatagaatctgcaaatggatatttgggagtgcattgaggcctatgatgaaagaggaaatatcttcagatgaaaactagaaagaaactctctgagaaactgttctgtgatgtgttcattcatctcacattgttaaacatttctttggattcagtagttgggaaacactgtttttgtcctgaatggatattttggagctcattgaggacataggcaaaaaagagaataccccaggataaacattgaaagaagctttccgagtaacagctttttgatatgcgcattcatctcacagagttaaacctttcttttctttcagcagtttggaaacactcttttggtagaatctgcaaagggatatttgggagtgcattgaggcctagggtgaaaaaggaaatatgcacagagaaaaactagaaagaaggtttctgagaaactgctttgtgatgtgtgcattcatctgacagagttcaacacttgtttgaattcagcagtttggaatcacagtttttgtagaacatgtgaagggatatttgggatctcattgatgccaatggtgaaaaaatgaatattccaacataaaaactagaaggaatgtatctgagaaaccactctgtgaggtacgcattcatctcacagagttaaacctttcttttaattcagcagtttggaaactctgttatggtagaatctgagaagggatatttgggtagtattgaggactagggtggaaaaggaaatatcttcagttaaaatctagaaagaacctttcggagaaactgcttggtgatatgtgcattcatatcacagaattaaacatttctttggattctgtagtttggaaacagtgtttttgtccattccctgaatggatatttgggagcccattgaggccaatggtgaaaaagcgaatatcccaggataaaaactcgaaagaatctatcagagaagccactttgtgatgtgtgcattcatctagcagagttaaacctttcttttcattcaacagtttggaaacactgtttttgtagaatctgtgaaggtatatttgggaactcattgaggccaatggcaaaaaagtgaacatcccaggataaaaactagaaggaagctatctgagaaactgttttgtgatatgtgcattcatctcccagaggtaaaactttcttttcattcaacagtttggaaacactgtttttgcagaatctgcgaaggtatgtttcggagtgcattttggtctagtgtgaaaaaggaaatattttcagataaaaactcaaaagaaccttcctgagaaactgctttgtgacgtgtgttttcatgtaacagagctaaaactttctttggattcagcagtttggaaacacagtttttgtccattctgaaagtggagaattctgagctcattgaggccaatggtgaaaaagtgaatattcctggataaaaattagaagtaaggtatctgagaaactgctgtgtgatgtgtgcagttttctcacagagttaaacctttatttggaatcagcagtttggaaaccctgttttggtagattccatgaagggatatttgggagcacattaaggcctacagtgaaaaaggaaatatcttcagatgaaaactaaaaaaaaaaaaaatgatttttgagaaaatgctttgtggtgtgtgcattcatctgggagttaaacttttgtttggattgagcagtttgaaaacactgtttttgtccactctgtgaatggacacttgggagctcattgaggccagtggtgaaaaagcatataatccaggataaaaaatagatggacactgtctgagaaaccactttgtgatttgtgcattcatcttgaagagttaaatctttcttttcattcagcaatttggaaacactgtttcagtagagtctgcgaagcaatatttggtagcacattgaggtctatggtgagaaaagaaatatcagataaaatatagaaagaagatttctgacaaactgcttggtaatgtgtgccttcatctcactgagttaaacctttctttggattcagcagttaggaaacactctttttt

SEQ ID NO: 468545 - DNA, 527 bp, Homo sapiens
acggtgaaaaaggaaatatcttcagatgaaaactagaaagaagctttctgagaaactgctttgtgttgtgggcattaacctcacagagaaactgagaagggatatttggaaacacattgagagctaccctgaaaaggaaatatcttcagataaaaacagaaagaagctttctgagaaactgctttataaaaacagaaagaagctttctgagaaactgcttcatgatgtgagcattcatctcacagagttgaacatttctctggattcatcagtttggaaacactgtttttgttcagtctacgaattgacatttcagtttggaaacactgttgtgtataatctagaaagagttatttcggattgcattgaagtctatggtgaaaaaagaagcatcttcagccaaaaactagaagaaaacttttgagaaactactttgtgatgagtgcattcatctcacactcttaagccttcctttggattcagcagtttggaaacactgtttttgtccattctgcaaatatctcagg

SEQ ID NO: 468546 - DNA, 667 bp, Homo sapiens
aattgtctggctttaggctgacaccttccttgccatccccctgatgccatctaaggccacggccatggagagggacttttgcaagattgtagaggctggagctggagagggcagagggcatgtggtggcagctaccaatgcagctcccagtgatctccacctcctggtattcacacttttgggtagtcccctcccacctggtactagtgatactttttctgggtgtgacacacagggagagagcctacatgacaccgagaaggttccacacatctctggtggtgctgagtgcaaagagcagtatctgaaactaggaccctgtggggcagtagatgccccagagagagatttgctcatgggcaaagagaactcctacttagctgcaggctccctgggagataggaccctgacacatctctcagagagaagccctgccagtgacaagcatcccctcttttttaatggaaagccatctgggaaaccaggtcatcatcagaagattgcttggtgagcttggaatcagatttaggggggatcgtttcatgatggtgcaacctgttgatggcaacaggttctaatcagctgttacccccatgcctgggatgggggaaggacttcctttgaagctggaattttgggagtgccttgctgatgaccacatgtactg

SEQ ID NO: 468547 - DNA, 688 bp, Homo sapiens
caggggcccctggaatgacacaagccaatcccagacctagagcatccctgcagtgcctgggccccgtttctcctcttgtagcacccagtgactgtgggggccactacacagatgaatatggcaggatcttcaactacgctgggccgaaaactgaatgcgtctggatcatcgagttgaaccccggggagatagtcacggtggccattccagacctcaaaggattcgcatgtggcaaagaatacgtggaagtgctggatggacctccagggtctgagtccttggacaggatttgtaaagccttcagtacattctattactcttcttccaacatcatcaccatcaagtactccagagaacccagtcatccacccaccttctttgaaatatattactttgttgacgcttggtcaacacattaataggaagatcgggggaagaggcacctgctgatgctcccctgctctgcctgagcctggttctgcatatgttggacagaggctatacctgggactgcagaaataagattgagtcatagttctcctggatcagcattgggtgagggagagggaatgtgaccctgtgacccttccagaaaaaggatataggggacttccaaagtgtttatccacctagtgcttaaaaggcagaaattatgggctcaattatgggctaagtgctttacaaataa

SEQ ID NO: 468548 - DNA, 703 bp, Homo sapiens
ggagccaaagaaataaaaataacaaggcgcctatgtccattctcctgctgactgacatgcggctccaggtcagacctttcacctctgtcaaccacgattttctcatttatgaattggagatagaaacagagaaaggagccacctctccacagagctgtgtcccaggagaatgggagcctcttctaaacacctggagtcctagagagctgaggggctgctccatcctcggagtcagagatgaaagccttgaaggaacagggaagaactgcagcgtggagaggatacagaacttagaccatttgcccaacacgggctccagtgattctgaaaaaggacttgcagcacaggagaccaagatggagaaacaaggagagaaggaggttgaaaactttcagccaaccatccacattctttgtgggatgcatattaccatagtgactcagaaggtaggtggggaaggggaaaacctgctgattctccccttctctgtggaagccagctgagtggcatgctgcatatacagatgtttctgtgactgccagaaaaaaagtcaccccatgaaaatctatagtggattttagcataaaatgttatttgcatttttatttttgtctgccactatggaaactctaactttgggttcaagccatatttcctaaatgaatgaatgtgtgactagtgtgataagatcacggaaggcatt

SEQ ID NO: 468549 - DNA, 1457 bp, Homo sapiens
gaagagaatcttcgaacggacccgaatggaatcatctaatggaatggaatggaataatccatggactggaaggcaatcatcatcgaatggaatcgaatggaatcatcgaatggactcgaatggaataatcattgaacggaatcgaatggaatcatcatcggatggaaacgaatggaatcatcatcgaatggaaatgaaaggaatggaaatgaatggaatcgtcatagaatggaatcgaatggattcattgaatggaatcagatggaatcatcgaatggactggaatggaatcattgaatggactcgaaagggatcattattgaatggaattgaatggaatcatcgaatggtctcgattggaatcattatcaaatggaatcgaatggaatcaccgaatagaatcgaatggaacaatcatcgaatggactcaaatggaattatcctccaatggaatcgaatggaattatcgaatgcaatcaaatggaattatcgaatgcaatcgaatagaatcatcgaatggactcgaatggaatcatcgaatggaatggaatggaacaaaacgaatggaattatcatcgaatggaatcgaatggtatcaacaccaaacggaaaaaaacggaattatcgaatggaatcgaagagaatcttcgaacggacccgaatggaatcatctaatggaatggaatggagtaatccatggactcgaatgcaatcatcatcgaatggaatcgaatggaatcatcgaatggactcgaatggaataatcattgaacggaatcgaatggaagcatcatcggatggaaacgaatggaatcatcatcgaatggaaatgaaaggaggaattgaatggaatcaatcgaatggaattatcatcaaatggaatcgaatggaatcaacatcaaacggaaaaaaacggaactatcgaatggaatcgaagagaatcatcgaatggacccgaatggaatcatctaatagaatggaatggaataatccatggactcgaatgcaatcatcatcgaatggaatcgaatggaatcatcgaatggactcgaatggaataatcattgaacggaatcgaatggaatcatcatcggatggaaacgaatggaatcatcatcgaatggaaatgaaaggaaatcgaatggaattatcatcgaatggaatcgaatggaatcaatatcaaacggaaaaaaacggaattatcgaatggaatcgaagagaatcatcgaatggacccgaatggaatcatctaatggaatggaatggaataatccatggactcgaatgcaatcatcatcgaatggaatcgaatggaatcatcgaatgtactcgaatgaataatcactgaacggaatcgaatggaatcatcattggatggaaatgaatggaatcatcatcgaatggaatcgaatagaattatggaatgaaatccagtgtgatcatcatcgaatggaccc

SEQ ID NO: 468550 - DNA, 1195 bp, Homo sapiens
caaacggaaaaaaacggaattatcgaatggaatcgaagagaatcttcgaacggacccgaatggaatcatctaatggaatggaatggagtaatccatggactcgaatgcaatcatcatcgaatggaatcgaatggaatcatcgaatggactcgaatggaataatcattgaacggaatcgaatggaatcatcatcggatggaaacgaatggaatcatcatcgaatggaaatgaaaggaatggaaatgaatggaatcgtcatagaatggaatcgaatggattcattcaatggaatcagatggaatcatcgaatggactggaatggaatcattgaatggactcgaaagggatcattattgaatggaattgaatggaatcatcgaatggtctcgattggaatcattatcaaatggaatcgaatggaatcaccgaatagaatcgaatggaacaatcatcgaatggactcaaatggaattatcctccaatggtatcgaatggaattatcgaatgcaatcgaatggaattatcgaatgcaatcgaatagaatcatcgaatggactcgaatggaatcatcgaatggaatggaatggaacaaaacgaatggaattatcatcgaatggaatcgaatggtatcaacaccaaacggaaaaaaacggaattatcgaatggaatcgaagagaatcttcgaacggacccgaatggaatcatctaatggaatggaatggaataatccatggactcgaatgcaatcatcatcgaatggaatcgaatggaatcatcgaatggactcgaatggaataatcattgaacggaatcgaatggaatcatcatcggatggaaacgaatggaagcatcatcgaatggaaatgaaaggaaatcgaatggaattatcatcgaatggaatcgaatggaatcaacatcaaacggaaaaaaacggaattatcgaatggaatcgaagagaatcatcgaatggacccgaatggaatcatctaatggaatggaatggaataatcgatggactcgaatgcaatcatcatcgaatggaatcgaatggaatcatcgaatggactcgaatggaataatcattgaacggaatcgaatggaatcatcatcggatggaaatgaaaggaatcatcatcgaatggaatcgaatagaattatggaatgaaatccagtgtgatcatcatcgaatggaccc

SEQ ID NO: 468551 - DNA, 1054 bp, Homo sapiens
caaacggaaaaaaacggaattatcgaatggaatcgaagagaatcttcgaacggacccgaatggaatcatctaatggaatggaatggaataatccatggactcgaatgcaatcatcatcgaatggaatcgaatggaatcatcgaatggactcgaatggaataatcattgaacggaatcaaatggaatcatcatcggatggaaacgaatggaatcatcatcgaatggaaatgaaaggaagaatcatcgaatggacccgaatggaatcatctaatggaatggaatggaataatccatggactcgaatgcaatcatcatcgaatggaatcgaatggaatcatcgaatggactcgaatggaataatcattgaacggaatcgaatggaatcatcatcggatggaaatgaaaggaaatcgaatggaattatcatcgaatggaatcgaatggaatcaacaccaaacggaaaaaaacggaattatcgaatggaatcgaagagaatcttcgaacggacccgaatggaatcatctaatggaatggaatggaataatccatggactcgaatgcaatcatcatcgaatggaatcgaatggaatcatcgaatggactcgaatggaataatcattgaacggaatcgaatggaatcatcatcggatggaaacgaatggaatcatcatcgaatggaaatcaaaagaaatcgaatggaattatcatcgaatggaatcgaatggaatcaacatcaaacggaacaaaacggaattatcgaatggaatcgaagagaatcatcgaatggacccgaatggaatcatctaatggactggaatggaataatccatggactcgaatgcaatcatcatcgaatggaatcgaatggaatcatcaaatggactcgaatggaataatcattgaacggaatcgaatggaatcatcatcggatggaaatgaaaggagtcatcatctaatggaattgcatggaatcatcataaaatggaatcgaatggaatcaacatcaaatggaatcaaatggaatcattgaacggaattgaatggaatcgtcatc

SEQ ID NO: 468552 - DNA, 551 bp, Homo sapiens
caaacggaaaaaaacggaattatcgaatggaatcgaagagaatcttcgaacggacccgaatggaatcatctaatggaatggaatggaataatccatggactcgaatacaatcatcatcgaatggaatcgaatggaatcatcgaatggactcgaatggaataatcattgaacggaatcgaatggaatcatcattggatggaaacgaatggaatcatcatcgaatggaaatgaaaggagaatcgtcatcgaatgaattgaatgcaatcatcgaatggtctcgaatggaatcatcttctaatggaatggaatggaatcgtcgcatagaatcgaatggaattatcatcgaatggaatcgaatggtatcaacatcaaaaggaaaaaaacggaattatcgaatggaatcgaagagaatcatcgaatggacccgaatggaatcatctaatggaatggaatggaatggaataatccatggactcgaatgcaatcatcatcgaatggaatcgaatggaatcatcgaatggactcgaatggaataatcattgaacggaatc

SEQ ID NO: 468553 - DNA, 1541 bp, Homo sapiens
gaagagaatcttcgaacggacccgaatggaatcatctaatggaatggaatggaataatccatggactcgaatgcaatcatcatcgaatggaatcgaatggaatcatcgaatggactcgaatggaataatcattgaacaatcgaatggaattatcatcgaatggaatcgaatggaatcaacatcaaacggaaaaaaacggaattatcgaatggaatcgaagagaatcatcgaatggacccgaatggaatcatctaatggaatggaatggaataatccaatcgaatggaacaatcatcgaatggactcaaatggaattatcctccaatggaatcgaatggaattatcgaatgcaatcgaatggaattatcgaatgcaatcgaatagaatcatcgaatggactcgaatggaatcatcgaatggaatggaatggaacaaatccaatggaattatcatcgaatggaatcgaatggtatcaacaccaaacggaaaaaaacggaattatcgaatggaatcgaagagaatcttcgaacggacccgaatggaatcatctaatggaatggaatggaataatccatggactcgaatgcaatcatcatcgaatggaatcgaatggaatcatcgaatgggctcgaatggaataatcattgaacggaatcgaatggaatcatcatcggatggaaacgaatggaatcatcatcgaatggaaatgaaaggaagaatcatcgaatggacccgaatggaatcatctaatggaatggaatggaataatccatggactcgaatgcaatcatcatcgaatggaatcgaatggaatcatcaaatggactcgaatggaataatcattgaacggaatcgaatggaatcatcatcggatggaaatgaaaggatcgaatggaattatcatcgaatggaatcgaatggaatcaacatcaaacggaaaaaaacggaattatcgaatggaatcgaagagaatcatcgaatggaccgaatggaatcatctaatggaatggaatggaataatccttggactcgaatgcaatcatcatcgaatggaatcgaatggaatcaccgaatggactcgaatggaataatcattgaacggaacgaatggaatcatcatcggatggaaatgaatggaatcatcatcgaatggaatcgaacagaattatggaatgaaatccagtgtgatcatcatcgaatggacccgaatggaatcatcatccaacggaagctaatggaatcaacatcgaatgaatcaaatggaaacaccatcgaattgaaacgaatggaattaccatgaaattgaaatggatggactcatcatcgaatggattcgaatggaatcatcgaataaaattgattgaaatcatcatcgaatggaatcgaatggtatcattgaatggaatcgaaaggaatcatcatcagatggaaatgaatggaatcgtcatagaatggaatcgaatggattcattgaatggaatcagatggaatcattgaatggactggaatggaatcattgaatggacacgaaagggatcatt

SEQ ID NO: 468554 - DNA, 1670 bp, Homo sapiens
gaagagagtcttcgaacggacccgaatggaatcatctaatggaatggaatggaataatccatggactcgaatgcaatcatcatcgaatggaatcgaatggaatcatcgaatggactcgaatggaataatcattgaacggaatcgaatggaatcatcatcggatggaaacgaatggaatcatcatcgaatggaaatgaaaggaaatcgaatggaattatcatcgaatggaatccaatggtatcaacaccaaacggagaaaaacggaattatcgaatggaatcgaagagaatcttcgaacggacccgaatggaatcatctaatggaatggaatggaataatccatggactggaaggcaatcatcatcgaatggaatcgaatggaatcatcgaatggactcgaatggaatcatcttctaatggaaaggaatggaatcatcgcatagaatcgaatggaattatcatcgaatggaatcgaatggtatcaacaccaaacggaaaaaaacggaattatcgaatggaatcgaagagaatcttcgaacggacacgaatggaatcatctaatggaatggaatggaataatccatggactcgaatgcaatcatcatcgaatggaatcgaatggaatcatcgaatggactcgaatggaataatcatagaacggaatcgaatggaatcatcatcagatggaaacgaatggaatcatcatcgaatggaaatgaaaggagtcatcatctaatggaattgcatggaatcatcataaaatggaatcgaatggaatcaacatcaaatggaatcaaatggaatcattgaacggaattgaatggaatcgtcatcgaatgaattgaatgcaatcatcgaatggtctcgaatggaatcatcttcaaatggaatggaatggaatcatcgcatagaatcgaatggaattatcatcgaatggaatcgaatggaatcaacatcaaacggaaaaaaaaggaattatcgaatggaatcgaagagaatcatcgaatggacccgaatggaatcatctaatggaatggaatggaataatccatggactcgaatgcaatcatcatcgaatggaatcgaatggaatcatcgaatggactcgaatggaataatcattgaacggaatcgaatggaatcatcatcggatggaaatgaatggaatcatcatcgaatggaatcgaatagaattatggaatgaaatccagtgtgatcatcatcgaatggacccgaatggaatcatcatccaacggaagctaatggaatcaacatcgaatgaatcgaatggaaacaccatcgaattgaaacgaatggaattatcatgaaattgaaatggatggactcatcatcgaatggattcgaatggaatcatcgaataaaattgattgaaatcatcatcgaatggaatcgaatggtatcattgaatggaatcgaatggaatcatcatcagatggaaatgaatggaatcgtcatagaatggaatcgaatggattcattgaatggaatcgaatggaatcatcgaatggactggaatggaatcattgaatggactcgaaagggatcatgattgaatggaattgaatggaatcatcgaatggtctcgattggaatcattatcaaatggaatcgaatggaatcaccgaatagaatcgaatggaacaatcatc

SEQ ID NO: 468555 - DNA, 4076 bp, Homo sapiens
tggaatcaacatcaaacggaatcaagcggaattatcgaatggaatcgaagagaatcatcgaatggactcgaatggaatcatctaatggaatggaatggaataatccatggacccgaatgcaatcatcgtcgtataaaatcgaatggaatcatcgaatggactcgaatggaataatcattgaacggaatcgaatggaatcatcatcggatggaaatgaatggaatcatcaacgaatggaaatgaaaggaatggaaatgaatggaatcgtcatagaatggaatcgaatggattcattgaatggaatcagatggaatcatcgaatggactggaatggaatcattgaatggactcgaaagggatcattattgaatggaattgaatggaatcatcgaatgaacaatcatcgaatggacccaaatggaattatcctccaatggaatcgaatggaattatcgaatgcaatcgaatggaattatcgaatgcaatcgaatagaatcatcgaatggactcgaatggaatcatcgaatggaatggaatggaacaaatcgaatggaattatcatcgaatggattcgaaaggtatcaacatcaaacggaaaaaaacggaattatcgaatggaatcgaagagaatcttcgaacggacccgaatggaatcatctaatggaatggaatggaataatccatggactggaaggcaatcatcatcgaatggaatcgaatggaatcatcgaatggactcgaatggaataatcattgaacggaatcgaatggaatcatcatcggatggaaacgaatggaatcatcatcgaatggaaatgaaaggaagaatcatcgaacggacccgaatggaatcatctaatggaatggaatggaataatccatggactcgaatgcaatcatcatcgaatggaatcgaatggaatcatcgaatggactcgaatggaataatcattgaacggaatcgaatggaatcatcatcggatggaaacgaatggaatcatcatcgaatggaaatgaaaggaagaatcatcgaatggacccgaatgcaatcatctaatggaatggaatggaataatcaatggactcgaatgcaatcatcatcgaatggaatcgaatggaatcatcgaatgaactcgaatggaataatcattgaacggaatcgaatggaatcatcatcggatggaaacgaatggaatcatcatcgaatggaaatgaaaggaagaatcatcgaatggacccgaatgcaatcatctaatggaatggaatggaataatccatggactcgaatgcaatcatcatcgaatggaatcgaatggaatcatcgaatggactcgaatggaataatcattgaacggaatcgaatggaatcatcatcggatggaaatgaatggaatcatcatcgaatggaaatgaaaggaaatcatcgaatggactcgaatggaatcatcgaatggaatggaatggaacagtcaatgaactcgaatggaatcatcattgaatggaatcgaatggaatcatcgagaatggaatcatcgcatagaatcgaatggaattatcatcgaatggaatcgaacgaatcaacatcaaacggaaaaaaacggaattatcgaatggaatcgaagagaatcatcgaacggacccgaatggaatcatctaatggaatggaatggaataatccacggactcgaatgcaatcatcgtcgagtggaatcgaatggaatcatcgaatggactcgaatggaataatcattgaacggaatcgaatggaatcatcatcggatggaaacgaatgtaatcatcatcgaatggaaatgaaaggaatggaaatgaatggaatcgtcatagaatggaatcgaatggattcattgaatggaatcagatggtatcatcgaatggactggaatggaatcattgaatggactcgaaagggatcattattgaatggaattgaatggaatcatcgaatggtctcgattggaatcattatcaaatggaatcgaatggaatcaccgaatagaatcgaatggaacaatcatcgaatggactcaaatggaattatcctcaaatggaatcgaatggaattatcgaatgcaatcgaatggaattatcgaatgcaatcgaatagaatcatcgaatggactcgaatggaatcatcgaatggaatggaatggaacaaatcgaatggaattatcatcgaatggaatcgaatggtatcaacaccaaacggaaaaaaacggaattatcgaatggaatcgaagagaatcttcgaacggacccgaatggaatcatctaatggaatggaatggaataatccatggactcgaatgcaatcatcatcgaatggaatcgaatggaatcatggaatggactcgaatggaataatcattgaatggaatcgaatggaatcatcatcggatggaaacgaatggaatcatcatcgaatggaaatgaaaggaaatcatcgaatggactcgaatggaatcatcgaatggaatggaatggaacagtcaatgaactcgaatggaatcatcattgaatggaatcgaatggaatcatcgagtggaatcgaatggaattatgatcaaatggaatcgaatgaatggaatcatcgcatagaatcgaatggaattatcatcgaatggaatcgaatggtatcaacaccaaacggaaaaaaacggaattttcgaatggaaacgaagagaatcttcgaacggacccgaatggaattatctaatggaatggaatggaataatccatggactcgaatgcaatcatcatcgaatggaatcgaatggaatcatcgaatggactcgaatggaataatcattgaacggaatcgaatggaatcatcatcggatggaaacgaatggaatcatcatcgaatggaaatgaaaggagtcatcatctaatggaattgcatggaagcatcataaaatggaatcgaatggaatcaacatcaaatggaatcaaatggaatcattgaacggaattgaatggaatcgtcatcgaatgaattgaatgcaatcatcgaatggtctcgaatggaatcatcttcaaatggaatggaatggaatcatcgcatagaatcgaatggaattatcatcgaatggaatcaaatggaatcaacatcaaacggaaaaaaacggaattatcgaatggaatcgaagagaatcatcgaatggacccgaatggaatcatctaatggaatggaatggaataatccatggactcgaatgcaatcatcatcgaatggaatcgaatggaatcatcgaatggactcgaatggaataatcattgaacggaatcgaatggaatcatcatcggatggaaaggaatggaatcatcatcgaatggaatcgaatagaattatggaatgaaatccagtgtgatcatcatcgaatggacccgaatggaatcatcatccaacggaagctaatggaatcaacatcgaatgaatcgaatggaaacaccatcgaattgaaacgaatggaattatcatgaaattgaaatggatggactcatcatcgaatggatacgaatggaatcatcgaataaaattgattgaaatcatcatcgaatggaatcgaatggtatcattgaatggaatcgaatggaatcatcatcagatggaaatgaatggaatcgtcatagaatggaatcgaatggattcattgaatggaatcagatggaatcatcaaatggactggaatggaatcattgaatggactcgaaagggatcatgattgaatggaattgaatggaatcatcgaatggtctcgattggaatcattatcaaatggaatcgaatggaatcaccgaatagaatcgaatggaacaatcatcgaatggactcaaatggaattatcctcaaatggaatcgaatggaattatcgaatgcaatcgaatggaattatcgaatgcaatcgaatagaatcaccgaatggactcgaatggaatcatcgaatggaatggaatggaattatgatcaaatggaatcgaatgtaatcatcatcaaatggaatcaacaacaaccatcatcaattggtattgaatggaattgtcatcaaatggaattc

SEQ ID NO: 468556 - DNA, 656 bp, Homo sapiens
caaacggaaaaaaacggaattttcgaatggaatcgaagataatcatcgaatggacccgaatggaatcatctaatggaatggaatggaataatccatggactcgaatgcaatcatcatcgaatggaatcgaatggaatcatcgaatggactcgaatggaataatcattgaacggaatcgaatggaatcatcatcggatggaaacgaatggaatcatcatcgaatggaaatgaaaggaagaatcatcgaacggacccgaatggaatcatctaatggaatggaatggaataatccatggactcgaatgcaatcatcatcgaatggaatcgaatggaatcatcgaatggacccgaatggaataatcattgaacggaatcgaatggaatcatcatcggatggaaacgaatggaatcatcatcgaatggaaatgaaaggaaatcgaatggaattatcatcgaatggaatcgaatggaatcaacatcaaacggaaaaaaacggaattatcgtatggaatcgaagagaatcatcgaatggacccgaatggaatcatctaatggaatggaatggaataatccatggactcgaatgcaatcatcatcgaatggaatcgaatggaatcatcgaatggactcgaatggaataatcattgaacggaatc

SEQ ID NO: 468557 - DNA, 1513 bp, Homo sapiens
gaagagaatcttcgaacggacccgaatggaataatctaatggaatggaatggaataatccatggactcgaatgcaatcatcatcgaatggaatcgaatggaatcatcgaatggactcgaatggaataatcattgaacggaatcgaatgcaatcatcatcggatggaaacgaatggaatcatcatcgaatggaaatgaaaggaagaatcatcgaatggacccgaatggaatcatctaatggaatggaatggaataatccatggactcgaatgcaatcatcatcgaatggaatcgaatggaatcatcgaatggactcgaatggaataatcattgaacggaaacgaatggaatcatcatcggatggaaatgaaaggaaatcgaatggaattatcatcgaatggaatcgaatggaatcaacatcaaacggaaaaaaacggaattatcgaatggaatcgaagagaatcatcgaatggacccgaatggaatcatctaatggaatggaatggaataatccatggactcgaatgcaatcatcatcgaatggaatcgaatggaatcatcgaatggactcgaatggaataatcattgaacggaatcgaatggaatcatcatcagatggaaatgaatggaatcaatcgaatggaacaatcatcgaatggactcaaatggaattatcctcaaatggaatagaatggaattatcgaatgcaatcgaatagaatcatcgaatggactcgaatggaatcatcgaatggaatggaatggaacaaatcgaatggaattatcatcgaatggaatcgaatggtatcaacaccaaacgaaaaaaaacggaattatcgaatggaatcaaagagaatcttcgaacggaaccgaatggaatcatctaatggaatggaatggaataatccatggactcgaatgcaatcatcatcgaatggaatcgaatggaatcatcgaatggactcgaatggaataatcattgaacggaatcgaatggaatcatcatcggatggaaacgaatggaatcatcatcgaatggaaatgaaaggaaatcgaatggaattatcatcgaatggaatcgaatggaatcaacatcaaacggaaaaaaacggaattatcgaatggaatcgaagagaatcatcgaatggacccgaatggaatcatctaatggaatggaatggaataatccatggactcgaatgcaatcatcatcgaatggaatcgaatggaaacatcgaatggactcgaatggaataatcattgaacggaatcgaatggaaccatcatcggatggaaatgaatggaatcatcatcgaatggaatcgaatagaattatggaatgaaatccagtgtgatcatcatcgaatggacccgaatggaatcatcatccaacggaagctaatggaatcaacatcgaatgaatcaaatggaaacaccatcgaattgaaacgaatggaattaccatgaaattgaaatggatggactcatcatcgaatggattcgaacggaatcatc

SEQ ID NO: 468558 - DNA, 874 bp, Homo sapiens
gaagagaatcttcgaacggacccgaatggaatcatctaatggaatggaatggaataatccatggactcgaatgcaatcatcatcgaatggaatcgaatggaatcatcgaatggactcgaatggaataatcattgaacggaatcgaatggaatcatcattggatggaaacgaatggaatcatcatcgaatggaaatgaaaggaagaatcatcgaatggacccgaatggaatcatctaatggaatggaatggaataatccatggactcgaatgcaatcatcatcgaatggaatcgaatggaatcatcgaatggactcgaatggaataatcattgaacggaatcgaatggaatcttcatcggatggaaatgaaaggaaatcgaatggaattatcatcgaatggaatcgaatggaatcaacatcaaacggaaaaaaacggaattatcgaatggaatcgaagagaatcatcgaatggacccgaatggaatcatctaatggaatggaatggaataatccttggactcgaatgcaatcatcatcgaatggaatcgaatggaatcatcgaatggactcgaatggaataatcattgaacggaacgaatggaatcatcatcagatggaaatgaatggaatgatcatcgaatggaatcgaatagaattatggaatgaaatccagtgtgatcatcatcgaatggacccgaatggaatcatcatccaacggaagctaatggaatcaacatcgaatgaatcaaatggaaacaccatcgaattgaaacgaatggaattaccatgaaattgaaatggatggactcatcatcaaatggattcgaatggaatcatcgaataaaattgattgaaatcatcatcgaatggaatc

SEQ ID NO: 468559 - DNA, 5489 bp, Homo sapiens
tggaattaccatgaaattgaaatggatggactcatcatcgaatggattcgaatggaatcatcgaataaaattgattgaaatcatcatcgaatggaatcgaatgatatcattgaatggaatcgaatggaatcatcatcagatggaaatgaatggaatcaatcatcgaatggactcgaatggaatcatcgaatggaatggaatggaacagtcaatgaactcgaatggaatcatcattgaatggaatcgaatggaatcatcgagtggaatcgaatggaattatgatcaaatggaatcgaatatggaaatgaatggaatcgtcacagaatggaatcgaatggattcattgaatggaatcagatggaatcatcgaatggactggaatggaatcattgaatggactcgaaagggatcattattgaatggaattgaatggaatcatcgaatggtctcgattggaatcattatcaaatggaatcgaatggaatcaccgaatagaatcgaatggaacaatcatcgaatggactcaaatggaattatcctccaatggaatcgaatggaattatcgaatgcaatcgaatggaattttcgaatgcaatcgaatagaatcatcgaatggactcgaatggaatcatcgaatggaatggaatggaacaaatcgaaaggaattatcatcgaatggaatcgaatggtatcaacaccaaacggagaaaaacggaattatcgaatggaatcgaagagaatcttcgaacggacccgaatggaatcatctaatggaatggaatggaataatccatggactggaaggcaatcatcatcgaatggaatcgaatggaatcatcgaatggactcgaatggaataatcattgaacggaatcgaatggaatcatcatcggatggaaacgaatggaatcatcaccgaatggaaatgaaaggaaatcgaatggaattatcatcgaatggaatcgaatggaatcaacatcaaacggaaaaaaacggaattatcgaatggaatcgaagagaatcatcgaatggacccgaatggaatcatctaatggaatggaatggaataaaccatggactcgaatgcaatcatcatcgaatggaatcgaatggaatcatcgagaatcatcgaataaaattgattgaaatcatcatcgaatggaatcgaatggtatcattgaatggaatcgaatggaatcatcatcagatggaaatgaatggaatcgtcatagaatggaatcgaatggattcattgaatggaatcagatggaatcatcgaatggactggaatggaatcattgaatggactcgaaagggatcattattgaatggaattgaatggaatcatcgaatggtctcgattggaatcattatcaaatggaatcgaatggaatcaccgaatagaatcgaatggaacaatcatcgaatggactcaaatggaattatcctccaatggaatcgaatggaattatcgaatgcaatcgaatggaattatcgaatgcaatcgaatagaatcatcgaatggactcgaatggaatcatcgaatggaatggaatggaacaaatcgaatggaattatcatcgaatggaatcgaatggtatcaacaccaaacggagaaaaacggaattatcgaatggaatcgaagagaatcttcgaacggacccgaatggaatcatctaatggaatggaatggaataatccatggactggaaggcaatcatcatcgaatggaatcgaatggaatcatcgaatggactcgaatggaataatcattgaacggaatcgaataatcatcgaatggacccgaatggaatcatctaatggaatggaatggaataatccatggactcgaatgcaatcatcatcgaatggaatcgaatggaatcatcgaatggactcgaatggaataatcattgaacggaatcgaatggaatcatcatcggatggaaacgaatggaatcatcatcgaatggaaatgaaaggaaatcgaatggaattatcatcgaatggaatcgaatggaatcaacatcaaacggaaaaaaacggaattatcgtatggaatcgaagacaatcatcgaatggacccgaatggaatcatctaatggattggaatggaataatccatggactcgaatgcaatcatcatcgaatggaatcgaatggaatcatcgaaatcgaatggaacaatcatcaaatggactcaaatggaattatcctcaaatggaatcgaatggaattatcgaatgcaatcgaatggaattatcgaatgcaatcgaatagaatcatcgaatggactcgaatggaatcatcgaatggaatggaatggaacaaatcgaatggaattatcatcgaatggaatcgaatggtatcaacaccaaacggaaaaaaacggaattatcgaatggaatcgaagagaatcttcgaacggacccgaatggaatcatctaatggaatggaatggaataatccacggactcgaatgcaatcatcatcgaatggaatcgaatggaatcatcgaatggactcgaatggaataatcattgaacggaatcgaatggaatcatcatcggatggaaacgaatggaatcatcatcgaatggaaatgaaaggaaatcatcgaatggactcgaatggaatcatcgaatggaatggaatggaacagtcaatgaactcgaatggaatcatcattgaatggaatcgaatggaatcaacgagtggaatcgaatggaattatgatcaaatggaatcgaatatggaaataaatggaatcgtcatagaatggaatcgaatggattcattgaatggaatcagatggaatcatcgaatggactggaatggaatcattgaatggactcgaaagggatcattattgaatggaattgaatggaatcatcgaatggtctcgattggaatcattatcaaatggaatcgaatggaatcaccgaatagaatcgaatggaacaatcatcgaatggactcaaatggaattatcctccaatggaatcgaatggaattatcgaatgcaatcgaatggaattatcgaatgcaatcgaatagaatcatcgaatggactcgaatggaatcatcgaatggaatggaatggaacaaatcgaatggaattatcatcgaatggaatcgaatggtatcaacaccaaacggaaaaaaacggaattatcgaatggaatcgaagagaatcttcgaacggacccgaatggaatcatctaatggaatggaatggaataatccacggacccgaatgcaatcatcatcgaatggaatcgaatggaatcatcgaatggactcgaatggaataatcattgaacggaatcgaatggaatcatcatcggatggaaacgaaaggaatcatcatcgaatggaaatgaaaggaaatcgaatggaattatcatcgaatggaatcgaatggaatcaacatcaaacggaaaaaaaaggaattatcgaatggaatcgaagagaatcatcgaatggacccgaatggaatcatctaatggaatggaatggaataatccatggactcgaatgcaatcatcatcgaatggaatcgaatggaatcatcgaatggaatcatcgaatggactggaatggaatcattgaatggactcgaaagggatcattattgaatggaattgaatggaatcatcgaatggtctcgattggaatcattatcaaatggaatcgaatggaatcaccgaatagaatcgaatggaacaatcatcgaatggactcaaatggaattatcctcaaatggaatcgaatggaattatcaaatgcaatcgaatggaattatcgaatgcaatcgaatagaatcatcgaatggactcgaatggaatcatcgaatggaatggaatggaacaaatcgaaaggaattatcatcgaatggaatcgaatggtatcaacaccaaacggaaaaaaacggaattatcgaatggaatcgaagagaatcttcgaacggacccgaatggaatcatctaatggaatggaatggaataatccatggactggaaggcaatcatcatcgaatggaatcgaatggaatcatcgaatggactcgaatggaataatcattgaacggaatcgaatggaatcatcatcggatggaaacgaatggaatcatcaacgaatggaaatgaaaggaaatcgaatggaattatcatcaaatggaatcgaatggaatcaacatcaaacggaaaaaaacggaattatcgaatggaatcgaagagaatcatcgaatggacccgaatggaatcatctaatggaatggaatggaataaaccatggactcgaatgcaatcatcatcgaatggaatcgaatggaatcatcgaatggaatcatcgaatggactggaatggaatcattgaatggactcgaaagggatcattattgaatggaattgaatggaatcatcgaatggtctcgattggaatcattatcaaatggaatcgaatggaatcaccgaatagaatcgaatggaacaatcatcgaatggactcaaatggaattatcctccaatggaatcgaatggaattatcgaatgcaatcgaatggaattatcgaatgcaatcgaatagaatcatcgaatggactcgaatggaatcatcgaatggaatggaatggaacaaatcgaatggaattatcatcgaatggaatcgaatggaatcaacatcaaacggaaaaaaacggaattatcgaatggaatcgaagagaatcttcgaacggacccgaatggaatcatctaatggaatggaatggaataatccatggactcgaatgcaatcatcaacgaatggaatccaatggaatcatcgaatggactcgaatggaataatcattgaacggaatcgaatggaatcatcatcggatggaaacgaatggaatcatcatcgaatggaaatgaaaggaatcatcatctaatggaattgcatggaatcatcataaaatggaatcgaatggaatcaacatcaaatggaatcaaatggaatcattgaacggaattgaatggaatcgtcatcgaatgaattgaatgcaatcatcgaatggtctcgaatggaatcaacttcaaatggaatggaatggaatcatcgcatagaatcgaatggaattatcatcgaatggaatcgaatggaatcaatatcaaacggaaaaaaacggaattatcgaatggaatcgaagagaatcatcgaatggacccgaatggaatcatctaatggaatggattggaataatccatggactcgaatgccatcatagaatggaatcgaatggaatcatcgaatggactcgaatggaataatcattgaacggaatcgattggaatcatcatcggatggaaatgaaaggagtcatcatctaatggaattgcatggaatcatcataaaatggaatcgaatggaatcaacgtgaaatggaatcaaatggaatcattgaacggaattgaatggaatcgtcatcgaatgaattgaatgcaatcatc

SEQ ID NO: 468560 - DNA, 965 bp, Homo sapiens
caaacggaaaaaaacggaattatcgaatggaatcgaagagaatcttcgaacggacccgaatggaatcatctaatggaatggaatggaataatccatggactcgaatgcaatcatcatcgaatggaatcgaatggaatcatcgaatggactcgaatggaataatcattgaacggaatcgaatggaatcatcattggatggaaacgaatggaatcatcatcgaatggaaatgaaaggaagaatcatcgaatggacccgaatggaatcatctaatggaatggaatggaataatccatggactcgaatgcaatcatcatcgaatggaatcgaatggaatcatcgaatggactcgaatggaataatcattgaacggaatcgaatggaatcatcatcgaatcatcgaatggactcgaatggaatcatcgaatggaatggaatggaacagtcaatgaactcgaatggaatcatcattgaatggaatcgaatggaatcatcgagtggaatcgaatggaattatgatcaaatggaatcgaatgaatggaatcatcgcatagaatcgaatggaattatcatcgaatggaatcgaatggtatcaacaccaaacggaaaaaaacggaattatcgaatggaatcgaagagaatcttcgaacggacccgaatggaatcatctaatggaatggaatggaataatccatggactcgaatgcaatcatcatcgaatggaatcgaatggaatcatcgaatggactcgaatggaataatcattgaacggaatcgaatggaatcatcattggatggaaacgaatggaatcatcatcgaatggaaatgaaaggagtcatcatctaatggaattgcatggaatcatcataaaatggaatcgaatggaatcaacatcaaatggaatcaaatggaatcattgaacggaattgaatggaatcgtcatcgaatgaattgactgcaatcatc

SEQ ID NO: 468561 - DNA, 3306 bp, Homo sapiens
caaacggaaaaaaacggaattatcgaatggaatcgaagagaatcttcgaacggacccgaatggaatcatctaatggaatggaatggaataatccatggactcgaatgcaatcatcatcgaatggaatcgaatggaatcatcgaatggactcgaatggaataatcattgaacggaatcgaatggaatcatcattggatggaaacgaatggaatcatcatcgaatggaaatgaaaggaagaatcatcgaatggacccgaatggaatcatctaatggaatggaatggaataatccatggactcgaatgcaatcatcatcgaatggaatcgaatggaatcatcgaatggactcgaatggaataatcattgaacggaatcgaatggaatcatcatcggatggaaacgaatggaatcatcatcgaatggaaatgaaaggaagaatcatcgaatggacccgaatggaatcatctaatggaatggaatggaataatccatggactcgaatgcaatcatcatcgaatggaatcgaatggaatcatcgaatggactcgaatggaataatcattgaacggaatcgaatggaatcatcatcggatggaaatgaatggaatcatcatcgaatggaatcgaatagaattataatcgaatggaacaatcatcgaatggactcaaatggaattatcctcaaatggaatcgaatggaattatcgaatgcaatcgaatggaattaccgaatgcaatcgaatagaatcatcgaatggactcgaatggaatcatcgaatggaatggaatggaacaaatcgaatggaattatcatcgaatggaatcgaatggtatcaacaccaaacggaaaaaaacggaattatcgaatggaatcgaagagaatcttcgaacggacccgaatggaatcatctaatggagtggaatggaataatccatggactggaaggcaatcatcatcgattggaatcgaatggaatcatcgaatggactcgaatggaataatcattgaaccgaatcgaatggaatcatcatcggatggaaacgaatggaatcatcatcgaatggaaatgaaaggaaatcgaatggaattatcatcgaatggaatcgaatggaatcaacatcaaacggaaaaaaacggaattatcgaatggaatcgaagagaatcatcgaatggacccgaatggaatcatctaatggaatggaatggaataatccatggactcgaatgcaatcatcatcgaatggaatcgaatggaatcatcgaatggaatcatcgaatggactggaatggaatcattgaatggactcgaaagggatcattattgaatggaattgaatggaatcatcgaatgaatcgaatggaacaatcatcgaatggactcaaatggaattatcctccaatggaatcgaatggaatcatcgaatggaatggaatggaacagtcaatgaactcgaatggaatcatcattgaatggaatcgaatggaatcatcgagtggaatcgaatggaattatgatcaaatggaatcgaataatcgaatggaattatcatcgaatggaatcgaatggtatcaacaccaaacggagaaaaacggaattatcgaatggaatcgaagagaatcttcgaacggacccgaatggaatcatctaatggaatggaatggaataatccatggactggaaggcaatcatcatcgaatggaatcgaatggaatcatcgaatggactcgaatggaatcatcttctaatggaaaggaatggaatcatcgcatagaatcgaatggaattatcatcgaatggaatcgaatggtatcaacaccaaacggaaaaaaacggaattatcgaatggaatcgaagagaatcttcgaacggactcgaatggaatcatctaatggaatggaatggaataatccatggactcgaatgcaatcatcatcgaatggaatcgaatggaatcatcgaatggactcgaatggaataatcatagaacggaatcgaatggaatcatcatcagatggaaacgaatggaatcatcatcgaatggaaatgaaaggaaatcatcgaatggactcgaatggaatcatcgaatggaatggaatggaacagtcaatgaactcgaatggaatcatcattgaatggaatcgaatggaatcatcgagtggaatcgaatggaattatgatcaaatggaatcgaatgaatggaatcatcgcatagaatcgaatggaattatcatcgaatggaatcgaatggtatcaacaccaaacggaaaaaaacggaattatcgaatggaatcgaagagaatcttcgaacggacccgaatggaatcatctaatggaatggaatggaataatccatggactcgaatgcaatcatcatcgaatggaatcgaatggaatcatcgaatggactcgaatggaataatcattgaacggaatcgaatggaatcatcatcggatggaaatgaatggaatcatcatcgaatggaatcgaatagaattatggaatgaaatccagtgtgatcatcatctaatggacccgaatggaatcatcatccaacggaagctaatggaatcaacatcgaatgaatcaaatggaaacaccatcgaattgaaacgaatggatttaccatgaaattgaaatggatggactcatcatcgaatggattcgaatggaatcatcgaacaaaattgattgaaatcatcatcgaatggaatcgaatggtatcattgaatggaatcgaatggaatcatcatcagatggaaatgaatggaatcgtcatagaatggaatcgaatggattcattgaatggaatcagatggaatcatcgaatggactggaatggaatcattgaatggactcgaaagggatcattattgaatggaattgaatggaatcatcgaatggtctcgattggaataatcattgaacggaatcgattggaatcatcatcggatggaaatgaatggaatcatcatcgaatggaatcgaatagaattatggaatgaaatccagtgtgatcatcatcgaatggacccgaatggaatcatcatccaacggaagctaatggaatcaacatcgaatgaatcaaatggaaacaccatcgaattgtaacgaatggaattaccatgaaattgaaatggatggactcatcatcgaatgcattcgaaaggaatcatcgaataaaattgattgaaatcatcatcgaatggaatcgaatggtatcattgaatggaatcgaatggaatcatcatcagatggatatgaatggaatcgtcatagaatggaatcgaatggattcattgaatg

SEQ ID NO: 468562 - DNA, 859 bp, Homo sapiens
tggaattaccatgaaattgaaatggatggactcatcatcgaatggattcgaatggaatcatcgaataaaattgattgaaatcatcttcgaatggaatcgaaaggtatcattgaatggaatcgaatggaatcatcatcagatggaaatgaatggaatcgtcatagaatggaatcgaatggattcattgaatggaatcagatggaatcatcgaatggactggaatggaatcattgaatggactcgaaagggatcattattgaatggaattgaatggaatcatcgaatgaatcatcgaatggactcgaatggaatcatcgaatggaatggaatggaacagtcaatgaactcgaatggaatcatcattgaatggaatcgaatggaatcatcgagtggaatcgaatggaattatgatcaaatggaatcgaatgaatggaatcatcgcatagaatcgaatggaattatcatcgaatggaatcgaatggtatcaacaccaaacggaaaaaaacggaattatcgaatggaatcgaagagaatcttcgaacggacccgaatggaatcatctaatggaatggaatggaataatccatggactcgaatacaatcatcatcgaatggaatcgaattgaatcatcgaatggactcgaatggaataatcattgaacggaatcaaatggaatcatcatcggatggaaacgaatggaatcatcatcgaatggaaatgaaaggagtcatcatcaaatggaattgcatggaatcatcataaaatggaatcgaatggaatcaacatcaaatggaatcaaatggaatcattgaacggaattgaatggaatcgtcatcgaatgaattgaatgcaataatc

SEQ ID NO: 468563 - DNA, 559 bp, Homo sapiens
caaacggaaaaaaacggaattatcgaatggaatcgaagagaatcttcgaacggacccgaatggaatcatctaatggaatggaatggaataatccatggactcgaatgcaatcatcatcgaatggaatcaaatggaatcatcgaatggactcgaatggaataatcattgaacggaatcgaatggaatcatcatcggatggaaacgaatggaatcatcatcgaattgaaatgaaaggaaatcgaatggaattatcatcgaatggaatcgaatggaatcaacatcaaacggaaaaaaacggaattatcgaatggaatcgaagagagtcatcgaatggacccgaatggaatcatctaatggaatggaatggaataatccatggactcgaatgcaatcatcatcgaatggaatcgaatggaatcatcgaatggactcgaatggaataatcattgaacggaatagaatggaatcatcatcagatggaaatgaatggaatcatcatcgaatggaatcgaatagaattatggaatgaaatccagtgtgatcatcatcgaatggaccc

SEQ ID NO: 468564 - DNA, 559 bp, Homo sapiens
caaacggaaaaaaacggaattatcgaatggaatcgaagagaatcttcgaacggacccgaatggaatcatctaatggaatggaatggaataatccacggacccgaatgcaatcatcatcgaatggaatcgaatggaatcatcgaatggactcgaatggaataatcattgaacggaatcgaatggaatcatcatcggatggaaacgaaaggaatcatcatcgaatggaaatgaaaggaaatcgaatggaattatcatcgaatggaatcgaatggaatcaacatcaaacggaaaaaaacggaattatcgaatggaatcgaagagaatcatcgaatggacccgaatggaatcatctaatggaatggaatggaataatccatggactcgaatgcaatcatcatcgaatggaatcgaatggaatcatcgaatggactcgaatggaataatcattgaacggaatcgaatggaatcatcatcggatggaaatgaatgaaatcatcatcgaagggaatcgaatagaattatggaatgaaatccagtgtgatcatcatcgaatggaccc

SEQ ID NO: 468565 - DNA, 2291 bp, Homo sapiens
caaacggaaaaaaacggaattatcgaatggaatcgaagagaatcttcgaacggacccgaaaggaatcatctaatggaatggaatggaataatccatggactcgaatgcaatcgtcatcgaatggaatcaaatggaatcatcgaatggactcgaatggaataatcattgaacggaatcgaatggaatcatcattggatggaaacgaatggaatcatcatcgaatggaaatgaaaggatcgaatggaattatcatcgaatggaatcgaatggaatcaacatcaaacggaaaaaaacggaattatcgaatggaatcgaagagaatcatcgaatggacccgaatggaatcatctaatggaatggaatggaataatccatggactcgaatgcaatcatcatcgaatggaatcgaatggaatcatcgaatggactcgaatggaataatcattgaacggaatcgaatggaatcatcatcggatggaaatgaaaggaaatcgaatggaattatcatcgaatggaatcgaatggaatcaacatcaaacggaaaaaaacgtaattatcgaatggaatcgaagagaatcatcgaatggacccgaatggaatcatctaatggaatggaatggaataatccttggactcgaatgcaatcatcatcgaatggaatcgaatggaatcatcgaatggactcgaatggaataatcattgaacggaacgaatggaatcatcatcggatggaaatgaatggaatgatcatcgaatggaatcgaatagaattatggaatgaaatccaatggaatcatcgaatggactggaatggaatcattgaatggactcgaaagggatcattactgaatggaattgaatggaatcatcgaatggtctcgattggaatcattatcaaatggaatcgaatggaatcaccgaatagaatcgaatggaacaatcatcgaatggactcaaatggaattatcctccaatggaatcgaatggaattatcgaatgcaatcgaatggaattatcgaatgcaatcgaatagaatcatcgaatggactcgaatggaatcatcgaatggaatggaatggaacaaatccaatggaattatcatcgaatggaatcgaatggtatcaacaccaaacggaaaaaaacggaactatcgaatggaatcgaagagaatcttcgaacggacccgaatggaatcatctaatggaatggaatggaataatccatggactcgaatgcaatcatcatcgaatggaatcgaatggaatcatcgaatggactcgaatggaataatcattgaacggaatcgaatggaatcatcatcggatggaaacgaatggaatcatcatcgaatggaaatgaaaggaagaatcatcgaatggacccgaatggaatcatctaatggactggaatggaataatccatggactcgaatgcaatcatcatcgaatggaatcgaatggaatcatcaaatggactcgaatggaataatcattgaacggaatcgaatggaatcatcatcggatggaaatgaaaggaaatcgaatggaattatcatcgaatggaatcgaatggaatcaacatcaaacggaaaaaaacggaattatcgaatggaatcgaagagaatcatcgaatggacccgaatggaatcatctaatggaatggaatggaataatccatggactcgaatgcaatcatcatcgaatggaatcgaatggaatcatcgaatggactcgaatggaataatcattgaacggaatcgaatggaatcatcatcggatggaaatgaaaggaaatcgaatggaattatcatcgaatggaatcgaatggaatcaacatcaaacggaaaaaaacggaattatcgaatggaatcgaagagaatcatcgaatggacccgaatggaatcatctaatggaatggaatggaataatccatggactcgaatgcaatcatcatcgaatggaatcgaatggaatcatcgaatggactcgaatggaataatcattgaacggaacgaatggaatcatcatcggatggaaatgaatggaatgatcatcgaatggaatcgaatagaattatggaatgaaatccagtgtgatcatcatcgaatggacccgaatggaatcatcatccaacggaagctaatggaatcaacatcgaatgaatcaaatggaaacaccatcgaattgaaacgaatggaattaccatgaaattgaaatggatggactcatcatcaaatggattcgaatggaatcatcgaataaaattgattgaaatcatcatcgaatggaatc

SEQ ID NO: 468566 - DNA, 4040 bp, Homo sapiens
gaagagaatcttcgaacggacccgaatggaatcatctaatggaatggaatggaataatccatggactcgaatgcaatcatcatcgaatggaatcgaatggaatcatcgaatggactcgaatggaataatcattgaacggaatcgaatggaatcatcattggatggaaacgaatggaatcatcatcgaatggaaatgaaaggaaatcatcgaatggactcgaatggaatcatcgaatggaatggaatggaacagtcaatgaactcgaatggaatcatcattgaatggaatcgaatggaatcatcgagtggaatcgaatggaattatgatcaaatggaatcgaatgaatggaatcatcgcatagaatcgaatggaattatcatcgaatggaatcgaatggtatcaacaccaaacggaaaaaaacggaattatcgaatggaatcgaagagaatcttcgaacggacccgtatggaatcatctaatggaatggaatggaataatccatggactcgaatgcaatcatcatcgaatggaatcaaatggaatcatcgaatggactcgaatggaataatcattgaacgaaatcgaatggaatcatcatcggatggaaacgaatggaatcatcatcgaatggaaatgaaaggaatggaaatgaatggaatcgtcatagaatgtaatcgaatggattcattgaatggaatcagatggaatcatcgaatggactggaatggaatcattgaatggactcgaaagggatcattattgaatggaattgaatggaatcatcgaatggtctcgattggaatcattatcaaatggaatcgaatggaatcaccgaatagaatcgaatggaacaatcatcgaatggactcaaatggaattatcctcaaatggaatcgaatggaattatcgaatgcaatggaatggaattatcgaatgcaatcgaatagaatcatcgaatggactcgaatgaaatcatcgaatggaatggaatggaacaaatcgaatggaattatcatcgaatggaatcgaatggtatcaacaccaaacggaaaaaaacggaattatcgaatggaatcgaagagaatcttcgaacggacccgaatggaatcatctaatggaatggaatggaataatccatggactcgaatgcaatcatcatcgaatggaatcgaatggaatcatcgaatggactcgaatggaataatcattgaacggaatcgaatggaatcatcatcggatggaaacgaatggaatcatcatcgaatggaaatgaaaggaatggaaatgaatggaatcgtcatagaatggaatcgaatggattcattgaatggaatcagatggaatcatcgaatggactggaatggaatcattgaatggactcgaaagggatcattattgaatggaattgaatggaatcatcgaatggtctcgattggaatcattatcaaatggaatcgaatggaatcaccgaatagaatcgaatggaacaatcatcgaatggactcaaatggaattatcctccaatggaatcgaatggaattatcgaatgcaatcgaatggaattatcgaatgcaatcgaatagaatcatcgaatggactcgaatggaatcatcgaatggaatggaatggaacaaatcgaatggaattatcatcgaatggaatcgaatggtatcaacaccaaacggaaaaaaacggaattatcgaatggaatcgaagagaatctacaaacggacccgaatggaatcatctaatggaatggaatggaataatccatggactcgaatgcaatcatcatcgaatggaatcgaatggaatcatcgaatggactcgaatggaataatcattgaacggaatcgaatggaatcatcatcggatggaaacgaatggaatcatcatagaatggaaatgaaaggaatggaaatgaatggaatcgtcatagaatggaatcgaatggattcattgaatggaatcagatggaatcatcgaatggactggaatggaatcattgaatggacacgaaagggatcattattgaatggaattgaatggaatcatcgaatggtcttgattggaatcattatcaaatggaatcgaatggaatcaccgaatagaatcgaatggaacaatcatcgaatggacccaaatggaattatcctccaatggaatcgaatggaattatcgaatgcaatcgaatggaattatcgaatgcaatcgaatagaatcatcgaatggactcgaatggaatcatcgaatggaatggaatggaacaaatggaatcgaatggattcattcaatggaatcagatggaatcatcgaatggactggaatggaatcattgaatggactcgaaagggatcattattgaatggaattgaatggaatcatcgaatggtctcgattggaatcattatcaaatggaatcgaatggaatcaccgaatagaatcgaatggaacaatcatcgaatggactcaaatggaattatcctccaatggaatcgaatggaattatcgaatgcaatcgaatggaattatcgaatgcaatcgaatagaatcatcgaatggactcgaatggaatcatcgaatggaatggaatggaacaaatcgaatggaattatcatcgaatggaatcgaatggtatcaacaccaaacggaaaaaaacggaattatcgaatggaatcgaagagaatcttcgaacggacccgaatggaatcatctaatggaatggaatggaataatccatggactcgaatgcaatcatcatcgaatggaatcgaatggaatcatcgaatggactcgaatggaataatcattgaacggaatcgaatggaatcatcattggatggaaacgaatggaatcatcatcgaatggaaatgaaaggaaatcgaatggaattatcatcgaatggaatcgaatggaatcaacatcaaacggaaaaaaacggaattatcgaatggaatcgaagagaatcatcgaatggacccgaatggaatcatctaatggaatggaatggaataatccgtggactcgaatgcaatcatcatcgaatggaatcgaatggaatcatcgaatggactcgaatggaataatcattgaacggaattgaatggaataatcatcggatggaaatgaaaggaatcatcatcgaatggaatcgaatagaattatggaatgaaatccagtgtgatcatcatcgaatggacccgaatggaatcatcatccaacggaagctaatggaatcaacatcgaatgaatcaaatggaaacaccatcgaattgaaacgaatggaattaccatgaaattgaaatggatggactcatcatcgaatggattcgaatggaatcatcgaataaaattgattgaaatcatcatcaaatggaatcgaatggtatcattgaatggaatcgaatggaatcatcatcagatggaaatgaatggaatcgtcatagaatggaatcgaatggattcattgaatggaatcagatggaatcatcgaatggactggaatggaatcattgaatggactcgaaagggatcatgattgaatggaattgaatggaatcatcgaatggtctcgattggaatcattatcaaatggaatcgaatggaatcaccgaatagaatcgaatggaacaatcatcgaatggactcaaatggaattatcctcaaatggaatcgaatggaattatcgaatgcaatcgaatggaattatcgaatgcaatcgaatagaatcatcgaatggactcgaatggaatcatcgaatggaatggaatggaacagtcaatgaactcgaatggaatcatcattgaatggaatcgaatggaatcatcgagtggaatcgaatggaattatcgaatgcaatcgaatagaatcatcgaatggactcgaatggaatcatcgaatgcaacggaatggaaaactcaatgaactcgaatggaatcatcactgaatggaatcgaatggaatcatcgagtggaatcgaatggaattatgatcaaatggaatcgaatgtaatcatcatcaaatggaatcaaaaataac

SEQ ID NO: 468567 - DNA, 986 bp, Homo sapiens
caaacggaaaaaaacggaattatcgaatggaatcgaagagaatcttcgaacggacccgaatggaatcatctaatggaatggaatggaataatccatggactcgaatgcaatcatcatcgaatggaatcgaatggaatcatcgaatggactcgaatggaataatcattgaacggaatcgaatggaatcatcatcggatggaaacgaatggaatcatcatcgaatggaaatgaaaggaagaatcatcgaatggacccgaatggaatcatctaatggaatggaatggaataatccttggactcgaatgcaatcatcatcgaatggaatcgaatggaatcatcgaatggactcgaatggaataatcattgaacggaacgaatggaatcatcattggatggaaatgaatggaatcatcatcaaagggaatcgaatagaattatggaatgaaatccagtgtgatcatcataaaatggacccgaatggaatcaacatcaaatggaatcaaatggaatcattgaacggaattgaatggaatcaatcgaatggaattatcatcgaatggaatcgaatggaatcaacatcaaacggaaaaaaacggaattatcgaatggaatcgaagagaatcatcgaatggacccgaatggaatcatctaatggaatggaatggaataatccatggactcgaatgcaatcatcatcgaatggaatcgaatggaatcatcgaatggactcgaatggaataatcattggacggaatcgaatggaatcatcatcggatggaaatgaaaggaatcatcatcgaatggaatcgaatagaattatggaatgaaatccagtgtgatcatcatcgaatggacccgaatggaatcatcatccaacggaagctaatggaatcaacatcgaatgaatcaaatggaaacaccatcgaattgaaacgaatggaattaccatgaaattgaaatggatggactcatcatcgaatggattc

SEQ ID NO: 468568 - DNA, 1884 bp, Homo sapiens
caaacggaaaaaaacggaattatcgaatggaatcgaagagaatcttcgaacggacccgaatggaatcatctaatggaatggaatggaataatccatggactcgaatgcaatcatcatcgaatggaatcgaatggaatcatcgaatggactcgaatggaataatcattgaacggaatcgaatggaatcatcattggatggaaacgaatggaatcatcatcgaatggaaatgaaaggaagaatcatcgaatggacccgaatggaatcatctaatggaatggaatggaataatccatggactcgaatgcaatcatcatcgaatggaatcgaatggaatcatcgaatggactcgaatggaataatcattgaacggaatcgaatggaatcatcatcgaatcatcgaatggactcgattggaatcatcgaatggaatggaatggaacagtcaatgaactcgaatggaatcatcattgaatggaatcgaatggaatcatcgagtggaatcgaatggaattatgatcaaatggaatcgaatgaatggaatcatcgcatagaatcgaatggaattatcatcgaatggaatcgaatggtatcaacaccaaacggaaaaaaacggaattatcgaatggaatcgaagagaatcttcgaacggacccgaatggaatcatctaatggaatggaatggaataatccatggactcgaatgcaatcatcatcgaatggaatcaaatggaatcatcgaatggactcgaatggaataatcattgaacggaatcgaatggaatcatcatcggatggaaacgaatggaatcatcatcgaatggaaatgaaaggagtcatcatctaatggaaatgcatggaatcatcataaaatggaatcgaatggaatcaacatcaaatggaatcaaatggaatcattgaacggaattgaatggaatcgtcatcgaatgaattgaatgcaatcatcgaatggtctccaatggaatcatcttcaaatggaatggaatggaatcaacgcatagaatcgaatggaattatcatcgaatggaatcgaatggaatcaacatcaaacggaaaaaaacggaattatcgaatggaatcgaagagaatcatcgaatggacccgaatggaatcatctaatggaatggaatggaataatccatggactcgaatgcaatcatcatcgaatggaatcgaatggaatcatcgaatggactcgaatggaataatcattgaacggaatcgaatggaatcatcatcggatggaaatgaatggaatcatcatcgaatggaatcgaatagaattatggaatgaaatccagtgtgatcatcatcgaatggacccgaatggaatcatcatccaacggaagctaatggaatcaacatcgaatgaatcaaatggaaacaccatcgtattgaaacgaatggaattaccatgaaattgaaatggatggactcatcatcgaatggattcgaatggaatcatcgaataaaattgattgaaatcatcatcgaatggaatcgaatggtatcattgaatggaatcgaatggaatcatcatcagatggaaatgaatggaatcgtcatagaatgcaatcgaatggattcattgaatggaatcagatggaatcatcgaatggactggaatggaatcattgaatggactcgaaagggatcatgattgaatggaattgaatggaatcatcgaatggtctcgattggaatcattatcaaatggaatcgaatgtaatcaccgaatagaatcgaatggaacaatcatcgaatggactgaaatggaattatcctcaaatggaatcgaatggaattatcgaatgcaatcgaatggaattatcgaatgcaatcgaatagaatcatcgaatggactc

SEQ ID NO: 468569 - DNA, 591 bp, Homo sapiens
catcaaacggaaaaaaacggaattatcgaatggaatcgaagagaatcatcgaatggacccgaatggaatcatctaatggaatggaatggaataatccatggactcgaatgcaatcatcatcgaatggaatcgaatggaatcatcgaatggactcgaatggaataatcattgaacggaatcgaatggaatcatcatcggatggaaatgaatggaatcatcatcgaatggaaatgaatggaatcgtcatagaatggaatcgaatggattcattgaatggaatcagatggaatcatcgaatggactggaatggaatcattgaatggactcgaaagggatcattattgaatggaattgaatggaatcatcgaatggtctcgattggaatcattatcaaatggaatcgaatggaatcaccgaatagaatcgaatggaacaatcatcgaatggactcaaatggaattatcctcaaatggaatcgaatggaattatcaaatgcaatcgaatggaattatcgaatgcaatcgaatagaatcatcgaatggactcgaatggaatcatcgaatggaatggaatggaacagtcaatgaactc

SEQ ID NO: 468570 - DNA, 876 bp, Homo sapiens
tggaatcaacatcaaacggaaaaaaacggaattatctgtgatcatcatcgtatggacccgaatggactcatcatccaacggaagctaatggaatcaacatcgaatgaatcgaatggaaacaccatcgaattgaaacgaatggaattatcatgaaattgaaatggatggactcatcatcgaatggattcgaatggaatcatcgaataaaattgattgaaatcatcatcaaatggaatcgaatggtatcattgaatggaatcgaatggaatcatcatcagatggaaatgaatggaatcgtcatagaatggaatcgaatggattcattgaatggaatcagatggaatcatcgaatggactggaatggaatcattgaatggactctaaagggatcattattgaatggaattgaatggaatcatcgaatggtctcaattggaatcattatcaaatggaatcgaatggaatcaccgaatagaatcgaatggaacaatcatcgaatggactcaaatggaattatcctcaaatggaatcgaatggaattatcgaatgccatcgaatggaattatcgaatgcaatcgaatagaatcatcgaatggactggaatggaaaagtcaatgaactcgaatggaatcatcattgaatggaatcgaatggaatcatcgagtggaatcgaatgcaattatgatcaaatggaatcgaatgtaatcatcatcaaatggaatcaaaaataaccatcatcagttggtattgaatggaattgtcatcaaatggaattcaaaggaatcatcatcaaatggaaccgaatggaatcctcattgaatggaaatgaaaattgtcatcatctaaaggaatcccatgggaatatcatcaaatgga

SEQ ID NO: 468571 - DNA, 597 bp, Homo sapiens
ttggcttatagaattatggaggctgacaggtctcaagatctgcaggcttccaggaatgacacccaaagccacactgcagatcaagatctcaaggagcctgctgctcctgtcacaatcaggaggccatctctgcatctgcacctgctggctccagaactatcacgcttctgctgtggcctgcatcagcaaaataaaatgctttgtgaaacaaatgaaatgccgcctctctcccagagggattcagttcccaaccagtatcatgagctgaccattgcattttctggatgttctaataaaatgtcaaatggtcatcatcaggaaattctgctcccaatatcatccataatacaggaaaaagtcagcaacaacagacttaatataaatctgaatctctatgagagaacatctttccaccatgctccatgctgagaaggataaagcctacttgatctacttgatccttcattttagtttcctcattcatgaagtggtgagtaatacacagggtttgttgtgttaaaaaagaaaacatatgtaaaggctactgcctagtgcctgatacatagtaggtattcaataattattggtatacttcct

SEQ ID NO: 468572 - DNA, 567 bp, Homo sapiens
tcagccttaatggggagcatctcatcctacttccctttctgcctgggacctcgggacactgttctccacatccttgctgtttcagttccagccattgcttacagtggccaaggtatagcttgggctgctactccaaaaagtgcaagccataagtcttggtggcttatacttggtgttaagcctgcaagtgtgccgaatgtaagagtgaaggaggcttggcagcttccaactagatttcagagaatatatgagaaagactgctgcaggggtggagcccccacagagatactctaccagggcagtgcagagaagaaagaagcaatatctgaagagataatggccaaaaattttcaaaaaactgatgaaaaacaccaatctacagaattattaccaaagaaggcacaagggagtgaggtagacaatgtgatttcagatagttaggtgctctgaggggaaaaaagaggataagctttattaaggcataatcaataaattaaaattatatatatatgtatggtgtacaacttgatgttttagtgtatgtacacattgtgaaatgattagatt

SEQ ID NO: 468573 - DNA, 647 bp, Homo sapiens
ggaggcctgtgatttaatctaacgggataagcaaaaggtcttcatgccacagattagaaatacagcttctttaaaggattggggaactcaaaagataaccaccctgaaatctccctctgcacaaggtgccaagacagcagcaagctttccgaggatttgcaaagaaaaaagtgtagctagactaaaaataatcagcatctctacaaagctttctggtgaggaaaagacaattggctcaggagacacacagagaagagaagcagacaatgtgaccacagtggcagaaatcagagtaatggggccacaagccaaggattacctggagccttctgaagctgaaagatgtaaggaagtatttttccctagagcctcttggagggatcatagccctgctgacaccttgatttcagacttccagactccagaacttttgaaactatagtataggatgacatcacagtattgaactagacaactgattatgattgcaaagggcaagaactaagaattcaaatgagggtactgaagaggcagcaaataagtgtaaaggctctattttttggtatgtaacaggaattctgtaatgtttactgaatagtaattaaatatgaattaattcaaagctaaaaaacagattgtataaacat

SEQ ID NO: 468574 - DNA, 761 bp, Homo sapiens
gcaagctgagggagccggctccggctttggccagcccagaaaggggttcccagagtgcagcggcgggctgaagggctcctcaagtgccgccaaagtgggagcccaggcagaggaggcgccgagagcgagcgagggctgtgaggactgagagcacgctgtcatctttcagaaggaggtcttatctgatgacttttattttctccatgaagccggtaaggacatctgctgaggttagcaacttgggaaagctcttcctgaagctgggtagtgttactcaatggaaaatctgtgctccattcactgctggacattcttgggtcttattattagcattttacagtgaccacggcttgggcttcccgcatgcgcagtgccctccttacccttgggaagtgagcacgcgcagtgcgtttaggaagttgtacgcatacccaactgaagctttcttcccttctccagtggagtgcacctgtgttgatagctgtggatttgatagctgtggatggtcaggagattgtcttctccctggcgcccaggcactggctgccaaattattatttttagagagcagtgtgataatcgtcaaaccatcacctgatactcctagctagattatctcctaactttaaaactttggatgaataattataaagcagcaaattggtgttgcaaagagaagacatgaaaagcagagtttagtagatattttctatgattcactcttgagagagataacagaaactgaagtgaagtatccttga

SEQ ID NO: 468575 - DNA, 578 bp, Homo sapiens
gagcccaggtatgtgatgttctcttccctgtgtccatgtattctcattgttcaactcccacttatgagtctgctggtgtttgctggaggtccattccagaccctgtttgcctgggtatcaccagcagaggctgcagaacagcaaagattgctgcctgttccttcctctggcacctgccagatgccagccagagctctcctgtatgaggtgtctgttgacccctgcttggaagtatctcccctgatagaaggcacaggggtcaggaacccacttgaggcaatctgtcccttagcagagcttgagcactgtgctaggagatccattgctctcttcagagctggcagagatgccctgcctatagaggaggaatctagagagacagtttggctacagtggctttgtggccctgcagtggactctgcccagtccaaacttcctggcagctttgtttacacagtgagagaaaaccgcctactcaggcctcagtaatggtaaacaacccctcccctcaccaagctcaagcatctcaggttgacttcagactgctgtgatggcagcaagaatttcaagccagtgga

SEQ ID NO: 468576 - DNA, 768 bp, Homo sapiens
tctttacaagggggaagagctgttgtcccgttatggagagagggaccaatatgtttgaaattcaaaacaaggacagcagtgacataggggctctcagttgctctgagagcgcccctccccagagaaacacagagccactaccaggtggtactgctgcagctgcaatggtggaggggctgtgggctgcctctggtttttcctccttggagaaatgcagatctgcctctaagtgttcagatgggggcacagaagctgtggtgaagtcccagtgtggccacgctagcaccccaagccaatgggccttgtcctgtgagatgcagtgcagagctgcagttgctaatgcagggatgcccaaggatccaaggctcccaggactccatgtatgcctgagcggcagctgtacccagactccacgtagctctctgtgtcagtctagaggccccggtggggaggttcacagggggtctgctgagccagggttgcaaaggtccatggcagaagtatggatccccagggactctcaccatttcccagcatgataaatatgaaatggtcagttatgctttagttaatatctcattaaagtaggggttacggatctagtttcggtttgggttatatcaacttaattccagagttataaaaaaacttaaattaattttaattccatggtgcatttgatggttaaatcccctataatacttctgacatgtcataatctgccctttgtgcaaacaccttaattattatatttatgattaaaatttt

SEQ ID NO: 468577 - DNA, 605 bp, Homo sapiens
tcagcgccctgtcaaaatggaccaatcagctctctgtaaaacagaccaatcggctctctgtaaaatggaccaatcagcaggatgtgggtggggacagataagagaataaaagcaggctgcctgagccagcagtggcaacttgctcaggtccccttccacactgtggaagctttcttcactcctgaagccagcgagaccacaaacccactgggaggaatgaatgaccccagacgcaacaccttaagagctataacactcaccgcaaaggtttgcagcttcactcctgagccagcaagaccacaaacccaccataaagaagaaactccaaacacatccaaacatcagaaggaacaaactctggacatgccacctttaagaactgtaacactcaccgcgagagtccgcggcttcattcttgaagtcagtgagaccaagaacccaccaattctggacacagaaggatcacgcagcaatatttgttgttctgcagcctccactggtgatacccaggaaaacagggtctgcagtggacctcaacaaaaaggacatctacaacaaaactccatctgtaggtcaccaacatcaaagaccaaaggtagataaaa

SEQ ID NO: 468578 - DNA, 1851 bp, Homo sapiens
gctgatttttgcttttgcctcaggctccgttatgacttggaaagtcattggttatattatgaggcaaaggcgaagggaatttgcaggtacaattatgatccctagtcaattgattttgagttactcaaaagagatttatcctggggcggcttggcaagggactgcaggcaccccctctgcaggaacaacctgggcatcctgggtgccatggacggcagataaacggcagcaggaggtgacaggctccagggggctagggaatggcctgaggcctggggcttgggctaccagttctgtggacccgagtgagaacttacggtgccttttccagggctgtccatggccacccagggaccaatcagcacacactccctctcctctgaagcctataaaaatccctgtcctcagccagactcgggcagacaacagcaccacctgcctgcagaggagctgcccactatgggtctcctctaaggtgttctgtcactcaataaagcacctcttcaccttgctcaccctccaccctccacttgtccgcgtacctcattcttcctggatgcaggacaagaactcagtacctgccaaatggcatggctgaaaaacacaagcagggctaaaacactctccttgcttgccatgtgatagatagatagatagagaaaactttcttgaaactaacatggtagcatgaaatgaaggccaataaactgctaaagtcacccaatctggccttcatagtggaaattatccattctcttctcattatctgactataaattaagtgtgcctatttaattagttcccgttttaacttggtaaacaggcaaatttggagaaaccattttgtaccagagctgtatgaagaactgtgattctaaaccatggattctgttttggtcttaggtcaatcacttaaaatccctgaagctttatatctttctttgtataatagcgatattcatgcctacttcatagtactgctatgaagtttatgcaatatatatattatatatcaccaaagagattcaccaaatcaagcatggatattaatgttctaactacttttcatcgtttattttacctgaaattcattttaatattctatctagcatggcaagttctgatattggtcaaagaatacaaaatttcagttaggaggaataagttaaagagatctattgtacaacataatgattatagttaataataacatattcctgaacattgctaagagaatatattagcctaatattttaagcattctcaccaaaaaagaaatgataagtatatgaggtaatgtaatatgttaattagctcattttagccaattcacaatgtatgcatatttcaaaacaacatgctgtacatgataaatatacacaatttcatttgtcaattaaaaataaactttttttctaaaaattaaagttctttagcactgaacagacttggaaatggattaggtatggttcagggttattttaactatttgaactatactgatgacatagtacttcgggaaaatatgtgtccaatatatgaaccaggcaaggtgtttgtggccattgacacacatctgatcagttttctaggacctggaagtgtacttcagggagtcactagcacctggcagcctggcaacagtagaggttattttcttctcacttgggtcactgctgttgtcataactcattctgagtagactgccaatggtgattgaagatgtccttcatattcttcttatttggagggaagtgtggctgtccatatttttctgattgaaaacagatttcaaggcttctcctagctaaatatggcaggcaagtatttcacagacttgcagatgacaaa

SEQ ID NO: 468579 - DNA, 778 bp, Homo sapiens
cgggcaaatttcctccttgctgttcttgcgataattgagagagttctcacaagatctggttgtttgaaaatgtgtagcacctcccacttcactctctcgctctcctgctccaccatgttaagatgtgcttgcttctcctttcctgaggccttcaagtcatgcttccttttaagcctgcagaactgcccctcttcggcacgtctgctgcagtttgctgggggtccactccagaccctagcccgtgggcaggaaagattaagttcactgaacctgagtctgcaccggcccctccccataggttctctgtcccagggagttgagagttctttctgtaagcccctgactggagctgctggatttcctgcagagatgcctcacccagtgaggaggaatctagagaagcagtctggccatactgtcaggggaaaaccacctacaaaagccacagtaatggcggtctcccctcccctcaccaaacctgttcccgggtggactccagactgctgcgctgacagtgggaattgcaagccagtggttcctagctttctgggctccatgggagtgggatccactgaacaagaccacttggctccctggctcagccccctttccgggggagtctaccgttctcctgtctcactggagtaccaggcgccgctgtagtgtgaaaaaactcgtgcagctcagtgcctgcctgaacagccacccagttttgtgcttgaaacctggaaccctggtggtgtaggctcacaagggaatcttctgatccgcggactgc

SEQ ID NO: 468580 - DNA, 1005 bp, Homo sapiens
cagtgggggacttgtcaacgtggcttggctatgtaccccacaaagagcaggcctactgctttttcatcgatgtacccaccattgaccgtgacattcactcctgagatttcgattcccatcatggtacctccaaatttactgatgcctcctgacaaaaatcaaaaaaggcagaggtctcgggaagctgctccactaatctcagcagctgcctctccaaaggtgatattccaaacatctgccttccaccagtgcccacatgcctgcaaacagctgcccctgggaaataatgacttcattttggtcttccaaaactctttcaagtgcctctccttgacagaactgacccagaactatactggaaagagattcttggaaaagaagttccagatgattgccctaagtagacggagtgaggatgctgctgagttgatcagagacaatcctgcacatggacctatcttcattcattcaacgggtagttaagggagacttactatacaccagactctgcacttgtgccaatcttatttctctaagacttttgagtacagttgtgtatcttctaatttttttctatattccatagtgcgtggcacaattctgggcacacagcagatagatgcacactgattgcccattggcttagctgacctcaaacatagctagtctgccattttcaatggaagagtgtaaaatgagaaatataatttacatatctctttctatacatagtaatttatgtatatatgctgagtagagcttagtattacacaggtataataagctaattaaagacaatttgaaaaagctagttaaaattttaaaatcacttttaatttatcattatttaccaaaacagccttttaccaacatttttggtttgcctttactgttttttattctatttttgtcttttagacagtattaatatatttttaatggttttatgtctttttctcttgattattatttaataggtattttaatgttattatatttgaaaaa

SEQ ID NO: 468581 - DNA, 951 bp, Homo sapiens
atataatcaagaaataactaagctgtaatgaaggaaacccaggatctgactagcccacataggtataagactttcttaccaaccagggtcccgacctctttctctgtgatacctggtcaagcatatggtaaaaatctctctatttttcctccacaagttttagataatgggagaaaaggatttacttgtgatcacgcagttggcataattctccttcctcttggtgccaaaggtcagaaacctggggagaggttgcctcaaactcttcttggtgactggtggagtcagatgcttggcttttgtggaatgaatgacaaaaaacatcagtttgagggacagcggaaagagaattgccagaaggtggaaaagagaaaactgattattagaggcgtgactctctcattaagtagctatgtgatcttgtggaaataatgctgagctcagcttcctagtcactgaaatgaaggaattcttacctgcctaatgtaagaatcacacaagatgatttcagtgaaagcactctatgaacctaaaatcgtcctataaagttagccacctctctttgtgactagttgggcatcattctagggtccggtagagtgttattatttcattgctgtttatatttcttttaaaacatggaattatgtctactagggattagacaatggatcgtttttaacattttcagttaaatgaccctatactttcctgaagtcttgtttcagtgtggtctccagaaagttcttcataaactctgaaggctaatttgtcagagctgtattatattttgatgtagtataatttgtttttctataatcccacatctttcttgatgttattacgttggtcaactattaaaaatggatacttctcttgtaatatctattcagaaacagcaaaagggcatcatagagcaaacattagacattggggtaagatgacaataaa

SEQ ID NO: 468582 - DNA, 755 bp, Homo sapiens
ttttcaatttagatatattagcttgaaggaggtgcagggctctttgctgagagctatgtttaactggggaaggaggcatgagtacagtaactgtggagagaattgctgattgcacaaaacatcctaagaagtggcacaatgctactttcacagaagtaaaagaatggtcgagaccttgtaatttggcctatgcagcaagacatgtagggattgcaaggtgcctatggcaagttgacttcaccgccaaggagctggaagaaacttttcattggcatagttacattgtagagaagattgaggttctgagagatcagtacaacaaggcagcatatagcacagtggtcaacagcctagactctggaactgttaaattaataatttctggatttaatttcaaatccttccccaaagtccattgtatcattcttatgcctttgtgtagctcccacaaatcagtgagaacatacaatgtttggttttccattcctgaattacttcacttagaataatagtctccaatctcatccaggtcgctgcgaatgccattaattcattcctttatatggctaagtagtattccatctattatgttggctgtgggtttgtcatagacagcttttatcccattgaggtatatcccttgtatgccgattttgctaagagttttaatcataaagggatgctaaattttattgaatgctttttctgcatctgaatgcttttgttttgtattgttagtctgtcttttgttgtaa

SEQ ID NO: 468583 - DNA, 844 bp, Homo sapiens
gctgctccgtgggccattgcttcaccctgcttttcctcactctccatgggtccagctgtctacctagtcagtcctaatgcaataacctggatacctcagttgaaggtacagaattcgcttcctgttttcactcctccctgtgacagctgcagactgcagctgcttctaattggctatcttatctggcaccccttgagatattttgcatttaggtataactttcaagaaggaggaagaggtcaatcgtgtgaaatgtcagagaaagtggaagataatgaggagtatagaaagtcagaaaaagattctaacaaatctctgggtggcgctgatgctgctggtagctggctgatcatcctgaggaatggtgccatatcgagggctcggtgttggtctctgctgctggcaaattggacactcagcagtggccataaccaggcagctcagccttggccaagagctgtttctcaaaaggagagtacttatctgcagaagatggcagaaccttgctccaaaatcctagaagcctctgctgtgattcacctatgggggcctgccgaaggctccaaacagcatccctatctgcccctgacatctcaagcaccattggatctgctgggtcatatggcgcaaatggcagagcagcttgtacagcagcctggacctgttgcagagccttctcctgttctggaacacactcaaaaccggcagtcactcaataaatgggcgggagtaacgcacctaaatgaggaatgtgttgcttccaaaatccaagtacacccactaggcattgtgcctccttcttggttgtaggaggggccaaattcagcaacttattttttacctt

SEQ ID NO: 468584 - DNA, 543 bp, Homo sapiens
tcctcagtcttcaggaaagaattcaggcctgtccttggaatgctacaagatatgttggaacctgggagtccccaatgggccctaaaaatgggaaccagaaggtggctgaatctgagagccagcattccaaccatgggacctcctgtggtaaggggtgacttagcagagaaggctgagccctactccaacgccccatcccacccccaacctgaaaccaatggggaacatgagaggctctgcggagatctgtggggaaaaggacaaaggatgaaaagggcaatggaatgtgagagttgccacaggtattttcctcaggaaaggagcactggaagtgtcctacaccctctgcagcagcctgtcaaaggccaagtcatcaacatatgcccaggatctctctactctggccttttcaagggctgcagtcctgccatcatgcccctggctcacaccaacatgcaaacatactctggtatctcatctctaaaaatatttttcatgccctagtttacttcccaatctttctattctgtttccttaactggc

SEQ ID NO: 468585 - DNA, 592 bp, Homo sapiens
aggaaaaccagagacctttgttcacttgtttatctgctgaccttccctccactattgttacttctcctcgctcctcaaaggatggtccccagaccggcagcctcgacagcacctaggagcttgttggaactgcagaatctcaagacctaccccagacctgcttttaacaagaccctcagattatataagcatgttggaagccaagataagtggaaagccaagcttcttacaccagttagccaagttgtgaaagcaaaggaaaagttcttgaaggaaattaaaagtgctgctccagtgaatacacaaatgatgagaaagcaaaacaaccttatcactgatatgaagaaaattttagtgatctggatagaaaatcaaaccagccacaacattcccttaagccaaagcctcatccagtacaatgccctaactctcttcagttctatgaaggctgagaaagatgaggaaactgcaaaacaattcatccagatgatctgcgattattgataatggtagccacacaaaacaacaaattttccatggagattaaatagccttctattggaagaagatgccatccaggacttttgtagct

SEQ ID NO: 468586 - DNA, 3728 bp, Homo sapiens
gtttacccttgaggaggaagaaaagaattcagaggctaaactgggcacctgtcagccacttaaaggcaattagcacagccgccagactaaagacacaggtgtcaggctgtctggaaaagggctctctaacaacccccgacccttcggggttgggagctttagttggcctggaaccagttccaactctttcactttccgtggtggtcccaaaatacacctgggagtgctcagcggacgtcttagtctcccagatatcctggttgagacaatggtcccaccagaggctccccctgcatgggttactgagtatgagacagccacatcttctgactcctgcctcctggatgctaatgtctgccggctagacttctttcctcatcttgcaagcaaggttattcccactaggcaggatcaagactccctatttagaagtcttgaattcttggagtggcacctggaagatccctgttcatggtgccctccagggtttaggcaagtgtcaccatttgatggccattttgaagggccagttccctaccatagcgtatggtcccccacatcaggacaatttaaagacagtggtcaacaggcacatggcaggggcaagggacgtttccatcccgctgatttaaaacaaataaaggcagatttagggaaattctcggatgatccctataactatacagatgttttacaagggttagggcagtcctctgatctagcatggaaggacatcatgttgctccttgatcagaccttaagtcctattgaaaatgaggcagctttagcggcagcccagcaatttggacatttatggtatctcagccagaggacaaaggccctctgggccagaagcacccaaccagatgattcagcaacaggcctgagggtggccagggcaagtgccagctcatgccatcaccctcacagagccccaggctgcctacaaaacacccacttcatctatagaaacacacgtagactaaaagatactccatgcaactagaagcaaaaaaaaagaaaaagagtagctatatttatattaaataaactataagttaattccactactgggtatatatccacaagaaaaaaaaacaatgtatcaaagagataactgcactctcatgtttattaacacactattcacaatagccaaaatatggaatcaacctaagtgcacatcagtgatgaatggataaagaaaatgtaatgtatattcacaacgaaatataattcacacaaaaatgaatgaaatactgtcagtgccacaagatggatggaattggaggtcattatgttaagtaaaataagtcaagcacagaaagacaaatattatatgttttcattcatatgtgggagctaaaatacgctggtctcatgaagatagagagtagattgattggcgattaccaaaggccagaagggtagcacggagagagcaagaacagaagttgattaatgggtataaatatacaattgagtagaagaaataagatctagtgtttgacagatcagtagggtgattatagttaaccataatctattgtgtatttaaaaataactagaaaaaaataattcaaatgttcctagtataaaagaaatatttaagggatggctaccccaattaccttgatttgatctttatacattatcaaatttgatacaaatgaatgtatcaaattatcacatgtacaccaaaaatatgtacatttatcaataaaaaataattttatgagagcgatttgaacacaagcagtctagacctaaggccacattctttcttaacatctatattattataaatactctacctggttataaataaaataatcatacatgtttaaagaaacaattggattttttaatgaccagacaagaccaacaaaaatgatcaagtatatttgataaaggacaatacaaaaataaaactgacccctaccttgtattacacacggaaaagtcagttctaggaggattgggaatataaatatgaaagataaataaaatttctaacagataacataaaggaatgtcttcatgatcacaaaatagggaaagtacagaaaggactaactacaaaggaagagattattaaaatggactacgttaaaattaaaacctctggccaagcgcggtggctcacacctgtaatcccagcactttgggaggccgaggtgggtggatcacaaggtcaggagttcaagaccagcgtggccaacatgctaaaattctgtttctactaaaaatacaaaaattagccaagcgtggtggtgcacacctgtaatcccagctactcgggaggctgaggcagaagaatcgcttgaatccgggaggcagaggttgcagcaagccgagactgcaccactgcactccagcctgtgcgacagagcaagactctatttcaaaaaaaaaaaataattaaaacctcatttatcaaaaaataccaaagaatgaaagagcaagccatgaagtagaaagattagaaagatatttgcatgaaaagatattggtaataaacgtaactgacaaagggcttgtatctagaatatataaagaactcctatgattcaataagaaaaagacacactctaacagccaataggcaaaagatttgaactagtacatcacacacacaaaaaaaccaaatagcctttaaacgtacgaaatgatgttcaacatctttagtcatcaggaaaaatgtaaatttgaaactgcaatgagatacatccatcagaaagactaaaactaaaaaaaaaaactaataataccatatgtgaaaatggaaattgaaagcagtctgaaaaagcgaaggaagcctaacacaaaataattttttgttgttgttttttggtttttctttgcagtttttacagttttatttaaacacaaaacatgcacatgagctgtctattcattttcttcactgcgcagcctggcgttggggttggtgtgactccgatggacagctgggcagctctttccacgatggctttgcagttcttggaggaaacatctcagcacaattacaaaaacttcctctctaatcaaggcttttaacatgaacagatttcttgaataaaatggaaagtttccagtacactgaaacataaattctcaagttgccatacatacaacacccggcaggaaaaaacaaaaacagcaagtttacatgatccctgtaacagccacagtctcaaactcagatgcttcctccatctgccaagtgtattctggatacagacaacatcgtggcttctggggtcatattcagctgaggctgtgggtccacagagcactcatctggctgggctatggtggtggtggctctacccaagaagcaaagcagttaccagcacattgaaacagtacattgaacatcttctaaatatgaaagtgagaaacaagaaggcaacaaaaaatgttgtcagaaagatgttaggaagtaaggacagctgtgtaaagcttgaggctgaaaagcagcttgccagcttcatttctttggcttcttgggtagtgggcaccggaacagcaatatgtgaggttctggttcatggatcatataatagacccatccctgactctgctgaacgccaagattcctccattcagattcagacatcaaatgggttttacggaccagcttggctatgtccttgggcagcacgacatgtcgatactcaaactcctcgtcgtcgtatttgtctgaatagtaaatttgtttgtgc

SEQ ID NO: 468587 - DNA, 1079 bp, Homo sapiens
ccagtttgcagcagcagtggaatgggaggaagagctcctgtatcacgtggaagagatagttacggaggtccacctcgaagggaaccgctgccctctcacagagatatttatttgtccccaagagatgatgtgtattctactaaagacagctattccagcaaagattacccaagttctcgtgatacaagagattatacaccaccaccacaagattatacttaccgtgactatggtcattccagttcacgtgatgactatccatcaagaggctatggcgatagagagggatatggtcgtgatcttgactattcagatcatccaaatggaggttcctacagagattcatatgagagttatggtaactcaagtagtgctggacatacacgagggcccctgccagcttacggcggaagcagtcgctatgatgattacagcagctcacgtgatggatatggtggaagtcagacatgtgtgttaaacaactacggaatactaaaaaaaagtttggcaaaccaaaaaggaagaagaagaagagaagaagaggaagaggaagcagaagcagaagaaggagaagaagaaggaggaggaggaggagaaggaggagaaggagaaggaggaggagaaggaggagaaggaggaggaaattgttttgtctctcggccatccttggagagcctctccctggggcccatgcagtggctgagccgagagctgaatgctggcgctggattcgacctagttaacatcgacactattgccacttggggccagttaattctttgttacgggggagctgtcctgtgcattgtaagatgtttagcatcatccttggtctgtatcagggatgtcgctggcacgcccccaccccagctgtgacaactaaaaccatctccagcattgccagctgtcctctaggaggcaaaattgctacaaattgagaaccactgttttagatctaaagaacaaactcagcattaggtcatagggtaaatagtagggacaatagaggcttccccatttaagtctgtttaccttacctccattaactaacctttgaaccagatggccctctccaaggc

SEQ ID NO: 468588 - DNA, 1466 bp, Homo sapiens
cctgcacgtcccgcacatgactgggaaagaataggggctgttcaggccctgtagggctgtatgtcaaagccagcccataatgcctgtcagccaagggcagaaattcccactgatataagaatgtgcaagaaatcaactttcaccaccgacgagcagattaagacacgatcaggaaatgagactaccggcccaggtttgaatctcagctctgataatgcttatgtctctcagaccttgggaaactttgggaaagtccctctcactaagccttggttgtgttattctttctcccaaccctgccccagccacacagagatcaaggatggtggctacggttactctggtattgctaagtactctttgaaagttaaaatggtccaaaaggtttctacagaagggagcagagatctaccgttcctggcaatcttcctagaatgggtaaggaggaggtggaatgtggagacgtaaggagagactttcctaaaattctaagatagacttaatgtcccattgatcaagattggatctcatgtccatggtcttgctaaaaggaaagtacaattgcccaacatttttagcctccactgaaggagatggactctgttgtgtaagaataaaaatgggatagttgtggagttgaattcaaatgtcacattatccatgtctccttcccaatttccttgatctgagtgaatttctctttctgttgaacccacaatgattcattcacaccttattttttaaggctttgcattctattgaagatgagtctgcattgtctgtaagattatgaatttcttgaggataggaactgactttatgcatctctgtgttcccccaaaattattaccacttcctgacacataatctgtacttaataaatgtttattaagtaaatgaaaggacaaataaaatataaattagtatatgccttattttcagaactacaccaatagtataaaaggagcaacagactaggagttagtaaatcttgattttacattgaaattattcattgtagcactatctataatataaaaggtctgtaaaacctccaagtaagttaatcaaaacaggactagttgaataaactatagtagatccattcaatggaatactacacactgtaaaaaaaaaaaaaggaaggaagatatatcgttaagtgaaaagaacaagttagaggaaagtttgtataatgaaaatatgactgagttaatgaattataggcctgaacccaaacaaaacaaaacaacaatgattaactctaggaggtgaggagaaaattgtggagatttaaaaaataatgaatgacaggaaattggtttgggaagggagagaaaaacagatgcataattatttctttcattatgaatgtacattcctgacatctctgagggctaagattgtcctgcagggaatatgattaaagttacaaaagacgaaaacaaaataaataagtcagcttt

SEQ ID NO: 468589 - DNA, 706 bp, Homo sapiens
ctctctctctctctctctctctctctttctctctctcagagaaaacatatagatagtcctgagctgttgtaacaggaggcaacacctgtcccctgtaagcctcagatctgctgcgatggcagggtgaacatgacccagagctcaggactcctgggcagtgcctggatcaacttgaagccaggatggggactgacctggtcaagctctccaggggttgagtgggcatcctgtccactcttcaaagaaaaagctgaaatggttgatggaaagaacagcagtagagcactgattggtgcattttacaatcctcttgcgagcttcagagcactgattggtgcatttttacagagcactgatggtgcattttacaatcctctttctagctacggagtgccgattggtgcattttacaatcctagctacagagtgctgattggtgcattttactatcctcttgtaagacagagaagttctccaagtcccaacttgatccaggcccatcaaagggtcagcgggttggtccaggggtccttggtagaagttgtgagttgagctcatttggggttccatttgtaagaccatctgtagcttgatggcctcgatcctggaggaaacaaatttgacaaggaggttaaaaatacagggcctgaaggtaagtaatagcaagatggctgtcacgggacatagaaaggggagaagtcatgtc

SEQ ID NO: 468590 - DNA, 556 bp, Homo sapiens
aaccactacactatcctggaacacagtgaacaggcattccaaatgcctggagatctatctgaacatggggctgagaggaccccactgcaccatgatctctctgcaggaagggtagggcagctcaggctgccaatcaaggtgagcaggtgtctgaaaatttgcctgattgtggagcagagaggacctggtgcaccagcctctgcacagaatagtgggatgggtcaggccttggaaccaggcaagtgtgtgcttcaactgcctggagatctgcctagtcatgaagcagagacggtccccttgcacccaaattgctgcataggaagggtggggcagctcaagctgctgatccaggtaagtgtgtgctccaaatgtctggagatctgcctgggtgtaaaccagagagggccccattacacctggatctctgcacaggaaggatgggatggctcaagctaccaatctgggtaagaaaatattccaaatgcctagagagttgggcctaaatcaaagaaaataagcgatgctcaagctgaatcttgaaaaggggataggtatc

SEQ ID NO: 468591 - DNA, 715 bp, Homo sapiens
taagaattcccctattaggaaagggactaagacccctccaggatgaaggatctatgtaccagggacccacagttactgacatgtggcttctgcgggttggtttcacatctgggtcctgaacctgtgctgagaaatgaggcggtaaagtcactcacacccacattccaattgtggcccacaagggaggaaattgagagcccaatcatagagaaggaacagaaccagcacatagatagagtcaaagagacagaagtaacagtagcagctagcctgggtatactacggcaagcccaatcacacaagcactcttcatgcctaaaactcaatggtcaaagcaagtcacagggcctgtcaaactggagaggctttccaagcttccgtagcaatgtgtgtagatacagtaagaggattggagttgttaattataatcaatttaccacaagtaactatatggcaatatatagttaataatatatagactcaaatattggttcatagatcttcactgacatttgttgaagatgatagaataaggacagtttaatatcagatttgggctctgtcacttactttggtgatatttaacctctccattcttcaactattgcttctgtaaaaaaagaatgtattctctttctcatagggttaaagtcaaggttaaatgagttaatgaaagcaaaatgcttagaacagtgcctgacacttggtaagcact

SEQ ID NO: 468592 - DNA, 2069 bp, Homo sapiens
ccagaaactcaatttttcacagccaggccagtatttgtggagagtttatagcctctcctcccctccccccggcttcctttctctctctctctctctctctctctctctctctctctctctctctctctctctctctctctctctctctctctctctctctctctctctctctctcactttctggctaaacacatgccggagagctcctcatccccttccgccatgggacgatacctagagaaaaaggctgtcttgagtttcaccaaacgaggatttccaaaatgtaacgaggaaagggtaatttctcgatggaagaatgcacacacaataaaagctggtatcaaatgtgaattaggtctactcaaactggctgataaaaacatcaaagatgaaagtcaggaccctcagctgcaggtctgttggagtttgctggaggtccactccagaccctgttttgcctgggtatcagcagcggaggctgcagaagagcggatattggtgaacagcaaatgttgctgcctgatcattcatctggaagttttgtctcagaggagtacccggccgtgttcatactctaaacacttcgtgtatccaggatctcacaatgcaaggtcactgtgcgccagccaaatctccctggagccaggcaccagacaactagaaacagcaggagactgcaaaattgttctaactatccaaactaccgggagtctgtgaaacctagctaagcccattccaattgccatatataaggtgtcctctatgtctctgggttggttcatttgtttatgtttgcatgccatttaaaaatttcccttatcattgttgattctgtttatgtatttgattgtgtaaaacttcagcgtaatttcaacagtcagagctaagcattcgtaaggtgtgttgaactaaagtgatttcctgggctactgccaccatttctatctctgctgatgattggaattcaacctataaaaacaataacgttattcaattatattttatttttaaatacctgataccgttaggtagttagtctacatattgctatcatactaacagcaaagcagacatgatttatatttttatatatctcacatgatagtgaggagcttaaggaatattaatttataaaaatgaattaaaattcaagtgctctaaaatgttaaggcattgttgaattattgttactgatttttactgcatacttttctcatgacatatgttagaaatgtggctaaaatgcctcttataaagtttgttcatgaagttatcacttttgattttacactactgtttgtcaattttgcctcttcattctgattattgtaaatcccctgatcctcctttaaaatatgtaaaaatatgcaatgctaacctaaacaagaacatgatgagtcaggacatacaatagctcattgattattttaagcagttgctgtgtaatatattttaaaaattaatagtacctaccaccacatgctaagccagctgccctacaccaacaaagatcaagttaatacaatttggtaaaatgattaaactgctaaaatatacaaggacagtattactaaactgttattcagctggcattaaaagagctgcagctcttttcaatgttctggcattgaaactttctggcagtcagtgattgtaaatcattccaagtgcttaagcgttcctttcactaacagaggaatacgtatgaggggatcttttacattttccttccctttttctacttttttaaggtcaatacctcttcttagaatcttttcatggtagctttcttcttcttgtaaccttgccacctaaggctagcttagaagcctttctctgtcccttcgtttaccctgtgcttttaataattataagacatgctgtatgtactgaaattgtttagttgtcagtctttatctctaaaatatgaattcattgagggtagcaaatacatattttttcaattttgattattcattaataataaatttgagatgttgttcaataaaagtcattgtaagatttggagaatggggattgagatagaaacagattattagtaaaagtat

SEQ ID NO: 468593 - DNA, 895 bp, Homo sapiens
tgagagtggagaaatgagggcgaatatgaagagtttaatgacgcattcactgagtgaggaggtcctcaaatccatctcccagaggaattctggatgggagtttttaaaaagattgtagagagtgaacagctggagaatgggagtcatttcttggtccgggcagaggagcctcaccctggagccactgccaccccagtgcatgaggagtactgtcagagtaccaacgaatttttccttgtggcccaagggcttttatgtcagcttgtggtgaatgctgcctggcctgggcctcagccttcaggacagtgggctgtcttctggctaacagcaggtccagaaatgctggacaagagtctagtcctggaattggggaccccaagagctgacttggtgctctgctctgatgtggcccagatgatatctgaagccagcacatctagagactcacccaaggccctcagtggccaaagggctcttcagttaacaggtgatgaatgctgtcaggactgggtcctttccttaaaggcagcagtttcccttctggcccaggatgtgtctagaaatgtcatctgggagttaggccctggaacgggagcctcatgcctctgcctcatgccctatcctgctatggctgatctgatatccaggatgcaagtcaaagtcctccccactcttccattccctctcctttgttagaaggaaggggtctattttggatccataagctgtgcagcctgggtttaaggaactggtgctgcgagtactcccttggttgtcccagcttatgtctcagtatgtcacatgtccccctcatactccctagtctactgtctttgggcctggctcagctctaggactgtattagtctgttcttacactgctaataaagacatac

SEQ ID NO: 468594 - DNA, 995 bp, Homo sapiens
tttcctggaaaagacatccaaaatgaagaaaatgaggaaagtacaaggtttaataattggtgtaggaagaggaaagatcatgtatgaatgcatatcagggggccagaataaatgtgacttatgtgaaagcaaactgaaaactaagatttctatgcaatcagtggataatgaatatgattatgacaacaacaatgataaaagctgtcttgagttagcagaggctttgactagcgcagggagtggagaaactaaaatcaagtttggaaccaggaaaggagcaagtattgagtcagcaacattggcaaagagtaatggtgaagaaagtgctagtgttgggaacaggaaggttagtgaggaagacttaagattggcgttctatcttaagatgacaatattcataaggaaatacaaaaatatatgtaatgtcattccttaaaatatttaagagtcaaagcactaaaattaggtacaatgaacgctgaccgtgtaaagaggattaattttatattttccacatggggaaatctgtttcataagcttttcaaaagctccagtttttctaacatttcaaagacaaaagaattccacattttatctattttttttttcatttctgcttgcaagctgataaagtctttcctgaactcacatctgtctcttcattcattgttataaactgcccggaataatcaacaaactgtagcattctagttctttttaagttcttctcatagagatatgggttcagtaggtatataatctactttcccagttaatgcaggaggtattattactaaatatttttccattgtgtgcacaagtcttcaactttctagtttttgatacaattttcctagctgtttttcagtcaatcaactaagccagtagcaggtagtttacctaatgttacagcagcacaccctttagataaaactaacagatgtaattattattaattaaattttctgtttttgcacatagcttatttttttgcc

SEQ ID NO: 468595 - DNA, 608 bp, Homo sapiens
tcatcagttaaggcaggaatcggccatctagatgttctataatggacatatttaaacacaagcataaagagagaaagaagaaagagagaaagtttcaaattaaagaagtatcaaaagatatatcaaggttaacaggtaggctagccatcagccccgagatgcctgtgaggcttgaaaagaagcagcaatggagtcaatttgcccttatttccccaggcatttatgttttggtaaaaggactggctttagggaagatggacaatttaaagacagagaaggatgaggatagggtgaaaaagtcagttttctggaagtccagcctgcctctgaaaggaggaggcctgtgtctgccatggaaggcagtggtttttggaagaaagaggctggttggtgtgggagttgtgggctgcaaggctgtgctggtttggtggagggcagggaaggcccaagatgcaatgatggatgaaaggtgcatttgctatggcagggatcctatggatttccatacaagggagtggctaggtgtctttgaacagaatattttaacggcaggacccatttttaacaaaagaagtcaaaattatatatataatatatacatatgagct

SEQ ID NO: 468596 - DNA, 474 bp, Homo sapiens
agccaacatatgggcttagtgaataagtctgatgaagcttccatagggatatcaaaaagccacgaatttaacagaaatgcaacttctatgtttggcttagtgctattcctatgccagaaaaaatacataagaaatctagagattagatgccaagatccccagcacaaaatttgtatatttttagtatcatacagaattaaaactccaggaactataactttatgtagctcatcccttaagtcatatcaaacactgcaagcttcccttggggatgatggcataatcttgggtgaagcattcaccttcagtcgagggcaattcctagagagcgatgcagctggtggccctcagctgacaatggcatctggaggaatgaccatcgactgatggaaacttagattaatttcatgtctttgctattggaccacacagccttgatcattgtatatttatagaatttgcattagtcagggt

SEQ ID NO: 468597 - DNA, 814 bp, Homo sapiens
ggtctcatgcaccatgacagccgcgcatggtgagacgagggtgaaatttgtcttggaaattcccactctgctcttccccggcagtatcagcagtcgcttagatctagaaaccataagaaatgctttcaccaaagaggagaaacctgaaggtctgggtccagagcctcagatcttacactggcagcacacggggacacagcagctggactggcagcagcagggcttgaagcagctagactggcagcagctggattggcagcagcagggcttgcagcagctggactggcagcagctggattggcagcagcagggtttggagcagctggactggcagcagaatgacccacagcctgaggaggagcagcagggcttacagcagttggactgggagcagccacaagaaccacacccacccttggagctcccacaagagccacagccccctttggagcccccacaggagccacagctggagcaggaacaggctggcacacagcagcacacaggcttgcagcagcaaatgggcacacagcagctggagccacagcccccacagccagagccacagcccccactgccggagccacagcccccacagccagagccacagcctccagaacagccacagcagcccatgattctggcggattgagagtagagcaggtagaggagcaggtgagagggaggtgcaggtgtggagccccctgagcctgggctctttatatacctgtccagaggtcagggaggacgcagggtcctttccttgtgactgtttacactatttttccagagctctatttttttcctctttgct

SEQ ID NO: 468598 - DNA, 1131 bp, Homo sapiens
taatatcttcctagggtgtccaagacacacagagccacggaatctcacaggtgtctgagaattcctcctccttggactcccagaggatccagaactgcagccggttctcgctttgctctccctgtccctgtccatgtatctggtcacggtgctgaggaacctgctcatcatcctggctgtcagctctgtctctcccctccacacccccatgtacttcttcctctccaacctgtgctgggctgacatcggtttcacctcggccacggttcccaagatgattgtggacatgcagtcgcatagcagagccatctctcatgcgggctgtctgacgcagatgtctttcttgttcctttttgcatgtatagaaggcatgctcctgactgtgatggcctatgactgctttgtagccatctgtcgccctctgcactacccagtcatcgtgaatcctcacttctgtgtcttcttcgttttggtgtcctttttccttagcctgttggattcccagctgcacagttggattgtgttacaattcaccatcttcaagaatgtggaaatctctaattttgtctgtgacccctctcaacttctcaaacttgcctgttctgacggcttggacctatggcggcggcagctgtcactgggcctagcccaggatgtggacctggggactccccagaagggcaggagcgggaggctcacggagcgtcggcggaaggcacacaggatgctaaagctttacaaaggcctctcggaaggggaggcgttgggactccctgcggggcccgaccccctggaccccactgatctgaacggggcgcacttcgacccggaagtttacctggacaagctgcctagagagtgccctctggcccagctgatcgacagtgagacggacatggtgcagcagatccgggctctagacagcgacatgcaaaccctggtctatgagaactacgataagttcatcccagccaccgaaattgacaaacagcataaaactgtatgaggaattgcaggaaacccagaatttcccatataaccttgtaaaagaagaacaaagttggaagactcacaaaaaaatgtatatacatatatatatatatacatatatatatataaagttgtattttc

SEQ ID NO: 468599 - DNA, 2167 bp, Homo sapiens
gtccaggtcctgagcccccttgccctggatggttcagtctctcctgtctccagacaagagcagttgcaggcaggaagccggcagtgcctctaaggcctcctccctgtccttctggagacctggcatgaacactcccttccacctggtgcaggtggcacctcatagcactgtaccaatgtacccctgtccccactcccaggctgcacgtctgcaccccagtgaacagacaggtttgaatccctgttcatgccgagctgcctgacttctggtccagccccggctcccagcaccttgctctggcccagcccctgtcattagcctgactttgcttttgagtctgcctggtggacttggtctctgcaccaagatcctggggaccgcctgggacttggctgtgcatcctgaccacggtgtatgaggaactgcccaggacgcgggctctgaaccccatcttgtgagcaggcgtcctctgcaggccctgcttgcctgtacacctggctgtgggagctgggctcccacatcctgggaggaccaggcagacgcttgattcagtgcaaatcctggggccgcctccaacctcatgctaagtgtctccaccctactcctcttcccacatattgcaaacctgcccaagccacaggacaaaagggctcccatcttttcagggctcattgccttgagggtgcttgggcaggaatcaggcctgatgggcaccctgggcactggccatagaggccacagctgtagccccagccacagcggcaggctctggctgtatgatgtgcacaagttacagaagctccctgagtttctggggttggtgggagcattgcaggactgccagtgcagggaggtctccagccttcaaaagagagtgtgtgcacaacgtcctctcagagccaggcacagggtgcacggtggtgaaattgcaccaggacatgccaagcccatctttagttcagaattcctcctcatctgtaggggaccatccatcatccacattgcacagttctgagaatgagcaccagtgccatcaataattccaccagggcaacaggtgtaaaacagggattgtcctagcaagccggaccatatggctgccgcccttatctgtgcaatcggctgatttgcagggataatgagatattcgatgagaaaggttttgtgacttagagcagcaccagaatcagtgccaagccatttttgtagctcacttatttgtcccacaggcagtgtcctctggcgatgtgctttgctgtttgagctctgaaaggtggtgctggagaggcttatagagaggggtaccccatggcttgtgagcccacccagggcccaggcttgcccagaggcagcacggaaaatggaaagaacaggggctttggggctggacccgtccaggttccctttagtttcccaccccacggcttcatagctgagcacagatattggttgttggtgctgtgtttctccaggacctgcctccttaggtcttggtaaggataatctgcccttctaagacacactctaaaagcactggtcccttctgctttccagcctccctggaagctgggcatgggaatgtggattgactcagccaatcagatgagcctgccctgagtcatttgtccaatcaggtgtcctttccctgaaagtcttgcccaatcagatgcacctgtcctaaacagggacagtcagatgcagccactgtaaattgtgtccaatcagatgtctgccctgaactgtggatcggaagatgtctgccctgaactgtggatcggaaccatgggaaaaggaggctgagactgggagaggccagtgtgacctggtggcccgtgtctggggccggcagggcatatgtccacgcacacctcctgtcaccagttccgcagcgttttcccttccttctggccatgtttgtgctgccctttatttttctaatacatttctgttctgcttatgcaagacagaacctgtttttctcttgcttacaactaaagaaccctggctaatgtgctgcatgagctagagcagttcttgccattctctgagccttacacagttatcttcacaatggaacaaggatccctaccctgcagggttttttaaagatgaaggagcatgctttctgcatagcaccgcatccagccacgtagccctggagcagctg

SEQ ID NO: 468600 - DNA, 1085 bp, Homo sapiens
ccacttgtgggtgtaatcaggcaccccctaatgattaatgacatgtcccaagaggatatgctccagagcaccctcctgggtggggaaacaggggatcaagcggcatttgcagggaaggactggggagtggagctgctgggccgtgtggagtcgtgtgtccctcagtggaggagggacaaaccatgttccagagagtggctgcgcgttggacctcctctccagcgtcggatgagggctccacttgctccactcccttgcctgcttctgttcccatctctcttcttggttatcttcatcctggagggtgggggaggcgctgtctcattgtggttcgaaagatttgatttgagcatcagcaatgtgcccaaggtggtgatgttacttggtgctgcccctgctgagactgtggtggacaccgaggctcagagagagcgtgggccctgctgcggctccaggcccttaagccccctggacttacctgggtggcagcagcagtcctgcaccctgcaacgctgtagaaatgggcacagtgtctttcggttcctgctcctcttcctttgcctccacctggggtccctgctcctctccctgtgcctccccctggggtccctgctcctctccctgtgcctccgcctggggtccctgctcctctccctgtgcctccgcctggggtccctgctcctctccctgtgcctccgcctggggtccctgctcctcttcctgtgcctccacctgctgttccgacctggttacccagtgagggaatggggaagaaacctctcctaccatagcaaggattcctggtggcaacaacgtcctagagctttgcaaagctctcggtctttgacgttgacgaagtcgattcatggaaactgctggaaccctttgacgacttggattgactgtattcatccagggaacaagattgtgttcagcatgctcatttctataaatccttccatctcggccaaagatggtctaatcatcttagagcaatgacagccctttctcgtggaatgggcacgtttgctctgttcactgcagcccctggaaacagccacatgatgcacatggatgctaactgg

SEQ ID NO: 468601 - DNA, 663 bp, Homo sapiens
ggctccgtcaccaacatggggtactgctctggggcgacgtggagcacctgcacgggcatccacgacctccccgagccctgtgagctatttcagaaatggccactaagaggttttagcaaagtacctgcaagatgtgatggcctcgatgacgttgatagtgatgatgatgacaatgataatgatgactatgacaatgattatgatgacaataatgacaatgacaatgacgatgacaatgatgactgtgacaatgatgatgatggctgtgacaatgattatgacaatgatgatgactatgacaatgatgatgactatgacaatggcgatgacgatgacataatgatgacaatcatgatgatgactacgacaatgatgacgacattgacagtgatgacaataatgatcaatgacaatgatgatgaaaatgataacaatgacaattatgatgatgactatgatgatgatggcaatgatgacattgatgatgatgataatgacaatgatgatgatgacaatgatgacattgatgatgatgatgacagtgacaatgatgatgacaatgataatgacaataatgataacaatgacagtgatgacaatgatgatgatggattgtcttgatatgcaaggcatttcccccacgtaaatcagcaaatacccaat

SEQ ID NO: 468602 - DNA, 748 bp, Homo sapiens
actctaccacatgctcatgtgcacaggcaggtgtgctcaaacgatggtcagcagcttcactcaaggaggaagagtgaggccaaccctggctacagagaccagttataaggactgtgatgatgatgatgatggtgataatgaaggcgatgacaatatcagcagcatcagtagtatcctctcccacttattgatggtgccaaactggtggaagtggatcctcataaagttcttcatccttgtcatcttcatgctgagtggtgtgatggttaatactgagtgtcaacttgattggattgaaggatgcaaagtattgatcctgggacatcctgagtcacatcacggccagttggctctggctgtcatttggtacaaaagtcagcagggtgatggggtgactgggctatttgtggaaattctcacccaccagcagtctggccctagagcaacaggagagagcaggccctgtgcagaagcacttttccagcctctgcttgtgtcacgtttgctacttgcattatccaaagcaagtcacgtggccaagttcaaattcaaaggtgtggagactgaggactctaaagctacaatgaagagcagcatgcattcagagacagaaggagtatggcccctttgcacactaccacatggatttcaggctaggctggatccagggactcagtgatgtcttttgggcttggtttcctcccccttggctctgcttctttcttggtcagatccactctcaggccag

SEQ ID NO: 468603 - DNA, 602 bp, Homo sapiens
cagcagttccacacactcgcttctggaacgtctgaggttatcaataagctcctagtccagacgccatgggtcatttcacagaggaggacaaggctactatcacaagcctgtggggcaaggtgaatgtggaagatgctggaggagaaaccctgggaaggctcctggttgtctacccatggacccagaggttctttgacagctttggcaacctgtcctctgcctctgccatcatgggcaaccccaaagtcaaggcacatggcaagaaggtgctgacttccttgggagatgccataaagcacctggatgatctcaagggcacctttgcccagctgagtgaactgcactgtgacaagctgcatgtggatcctgagaacttcaagctcctgggaaatgtgctggtgaccgttttggcaatccatttcggcaaagaattcacccctgaggtgcaggcttcctggcagaagatggtgactggagtggccagtgccctgtcctccagataccactgagctcactgcccatgatgcagagctttcaaggataggctttattctgcaagcaatacaaataataaatctattctgctaagagatcacacatgg

SEQ ID NO: 468604 - DNA, 615 bp, Homo sapiens
cagcagttccacacactcgcttctggaacgtctgagattatcaataagctcctagtccagacgccatgggtcatttcacagaggaggacaaggctactatcacaagcctgtggggcaaggtgaatgtggaagatgctggaggagaaaccctgggaaggctcctggttgtctacccatggacccagaggttctttgacagctttggcaacctgtcctctgcctctgccatcatgggcaaccccaaagtcaaggcacatggcaagaaggtgctgacttccttgggagatgccataaagcacctggatgatctcaagggcacctttgcccagctgagtgaactgcactgtgacaagctgcatgtggatcctgagaacttcaagctcctgggaaatgtgctggtgaccgttttggcaatccatttcggcaaagaattcacccctgaggtgcaggcttcctggcagaagatggtgactgcagtggccagtgccctgtcctccagataccactgagcctcttgcccatgattcagagctttcaaggataggctttattctgcaagcaatacaaataataaatctattctgctgagagatcacacatgattttcttcagctc

SEQ ID NO: 468605 - DNA, 1022 bp, Homo sapiens
acccctgtcacacatcctgtgagagggggcttagggaactcccatttgtttcaaggggatctatggctattcgttcaggaaacaccatcatcgtgactgcaatctggatggattccactcggcatgagcccatgtattgctttctgtgtgttctggctgctgtggacattgttatggcctcctcggtggtacccaagatggtgagcatcttctgctcaggagacagctcaatcagctttagtgcttgtttcactcagatgttttttgtccacttagccacagctgtggagacggggctgctgctgaccatggcttttgaccgctatgtagccatctgcaagcctctacactacaagagaattctcacgcctcaagtgatgctgggaatgagtatggccatcaccatcagagctatcatagccataactccactgagttggatggtgagtcatctacctttctgtggctccaatgtggttgtccactcctactgtgagcacatagctttggccaggttagcatgtgctgaccccgtgcccagcagtctctacagtctgattggttcctctcttatggtgggctctgatgtggccttcattgctgcctcctatatcttaattctcaaggcagtatttggtctctcctcaaagactgctcagttgaaagcattaagcacatgtggctcccatgtgggggttatggctttgtactatctacctgggatggcatccatctatgcggcctggttggggcaggatgtagtgcccttgcacacccaagtcctgctagctgacctgtacgtgatcatcccagccaccttaaatcccatcatctatggcatgaggaccaaacaactgcgggagagaatatggagttatctgatgcatgtcctctttgaccattccaacctgggttcatgaacacaatatctgttcagatccagccaatttcaaagatgccttagagatctgcagagcttagtttacctggtgctacaggaattcattctaagatgaaggtgt

SEQ ID NO: 468606 - DNA, 1157 bp, Homo sapiens
gtccctacacgtctggctctccatcccctttggctccatgtacctggtggctgtggtggggaatgtgaccatcctggctgtggtaaagatagaacgcagcctgcaccagcccatgtactttttcttgtgcatgttggctgccattgacctggttctgtctacttccactatacccaaacttctgggaatcttctggttcggtgcttgtgacattggcctggacgcctgcttgggccaaatgttccttatccactgctttgccactgttgagtcaggcatcttccttgccatggcttttgatcgctacgtggccatctgcaacccactacgtcatagcatggtgctcacttatacagtggtgggtcgtttggggcttgtttctctcctccggggtgttctctacattggacctctgcctctgatgatccgcctgcggctgcccctttataaaacccatgttatctcccactcctactgtgagcacatggctgtagttgccttgacatgtggcgacagcagggtcaataatgtctatgggctgagcatcggctttctggtgttgatcctggactcagtggctattgctgcatcctatgtgatgattttcagggccgtgatggggttagccactcctgaggctaggcttaaaaccctggggacatgcgcttctcacctctgtgccatcctgatcttttatgttcccattgctgtttcttccctgattcaccgatttggtcagtgtgtgcctcctccagtccacactctgctggccaacttctatctcctcattcctccaatcctcaatcccattgtctatgctgttcgcaccaagcagatccgagagagccttctccaaataccaaggatagaaatgaagattagatgattactattttcttctctctcaaataagctcatggagaaggtgtttaaatatggtaggctgcttcccattaggaactttacaagcagtttgaagtattaggcactgtgctctccaacttttgtagttccaaaggaattctaagaaagtatacaactctaagtcctaaaaggtggaaaatacaaaacttacaactaaaggatatttgagctacaaagaaggcttgatgcatatgaggactctgtggaaataagtcttccctttcccacagaaa

SEQ ID NO: 468607 - DNA, 1113 bp, Homo sapiens
tcatttctggcccaaatgagcgctttttcagaaggtgaaggagcctatgaagatcaacaaggagaatttccaagagtcatgtcagcctccagtatcacctcaacacatccaacttccttcttgttgatggggattccaggcctggagcacctgcacatctggatctccatccccttctcagcatatacactggccctgcttggaaactgcaccctccttctcatcatccaggctgatgcagccctccatgagcccatatacctctttctggccatgttggcagccatcgacctggtcctttcctcctcagcattgcccaaaatgcttgccatattctggttcagggatcgggagatcaacttttttgcctgtctggtccagatgttcttccttcactccttctccatcatggagtcagcagtgctgctggccatggcctttgaccgctatgtggccatctgcaagccactgcactacaccacggtcctgactgggtccctcatcaccaagattggcatggctgctgtggcccgggctgtgacactaatgactccactccccttcctgctgagatgtttccactactgccgaggcccagtgattgcccgctgctactgtgaacacatggctgtggcagttctacaactctcctctcaggaggcccgctacaaagcatttgggacatgtgtctctcacataggtgccatcttagccttctacacaccttcagtcatctcttcagtcatgcaccgtgtggcccgctgtgctgcgccacacgtccacattctcctcgccaatttctatctgctcttcccacccatggtcaatcccatcatctacggcgttaagaccaagcagatccgtgacagtcttgggagtattcccgagaaaggatgtgtgaatagagaaaagatggccatgtacaagccaagaagagtggcctcggtagcaaccaattctgcttgggtcttggacttctatcttctagaattgtgaagaaataaatttctgtttattaggccccccagtttgtattaccttttatagaagccctagaaaactacttttggcaccagaaagtaaggtgctactgtaactaatacctaaaaatgt

SEQ ID NO: 468608 - DNA, 1478 bp, Homo sapiens
gcctgccacatagataacggcactgattgaatactctgtaggtatggagtccccatgcacttttaggggagacaaagtcttccttttgttgtttgctgacatcttggctgtgaaggcaggaaacaaacaaaagacgacgacatgtaaggaccggacaaagcactcataccaaacaggttcaagggtgttgggcagaagaccagataagcagagtcagatggtgaatggaattagaggagccatgtcagcctccaatatcaccttaacacatccaactgccttcttgttggtggggattccaggcctggaacacctgcacatctggatctccatccctttctgcttagcatatacactggccctgcttggaaactgcactctccttctcatcatccaggctgatgcagccctccatgaacccatgtacctctttctggccatgttggcagccatcgacctggtcctttcctcctcagcactgcccaaaatgcttgccatattctggttcagggatcgggagataaacttctttgcctgtctggcccagatgttcttccttcactccttctccatcatggagtcagcagtgctgctggccatggcctttgaccgctatgtggctatctgcaagccactgcactacaccaaggtcctgactgggtccctcatcaccaagattggcatggctgctgtggcccgggctgtgacactaatgactccactccccttcctgctgagatgtttccactactgccgaggcccagtgatcgctcactgctactgtgaacacatggctgtggtgaggctggcgtgtggggacactagcttcaacaatatctatggcatcgctgtggccatgtttattgtggtgttggacctgctccttgttatcctgtcttatatctttattcttcaggcagttctactgcttgcctctcaggaggcccactacaaggcatttgggacatgtgtctctcatataggtgccatcttagccttctacacaactgtggtcatctcttcagtcatgcaccgtgtagcccgccatgctgcccctcatgtccacatcctccttgccaatttctatctgctcttcccacccatggtcaatcccataatctatggtgtcaagaccaagcaaatccgtgagagcatcttgggagtattcccaagaaaggatatgactcatgggtctgtgtcctctggtagcctgtggattgaatgtgctgactgtgctgtcttctcacagtgccctcacccctatcagtaacttgacagagacttgacccatgggtctccaggtgacttcaccgaaagacacaaagatgcttccaacttcatttgctgaagagaagactttgaaaatctgagtttcttttcttagtcattgggaatttggtgaactatctactcaggacctgggaccacttgttattctcctagttttgcacctttttggttcaggtcttctaaattct

SEQ ID NO: 468609 - DNA, 750 bp, Homo sapiens
tcgtctcctcggctccgagtccctgcagcagctgaggtgcctgtgtctctctggttcccagtggccgccatcatgctctcctccacactcagggtggctgtggtgtgcgtgagcaatgtcaacaggagcatggaggcccacagcatcctcaggagaaaagggctaagtgtccggtcttttggaactgaatctcatgtgaggctaccaggaccaagacccaatcgtcctgtagtttacgattttgcaacaacatataaggagatgtacaatgacctcctcaggaaagatagagaacgctacacccgcaacggaatcttacacatcttgggaagaaatgagagaatcaagcccggtccagaaagatttcaggagtgcactgattcctttgatgtcatcttcacctgtgaggagagtgtctatgacacagtggtggaagatctgtgttccagagaacagcagacctttcagcctgtgcacgtgatcaacatggaaatccaagataccctggaagatgccaccctgggagctttcctcatctgtgagatttgccagtgcctgcagcagtcagacgacatggaagacaatctggaagagctgctgttgcaaatggaggagaaggcaggaaaaagctttcttcacaccgtctgcttctactgaacatctgggctggctttgtccccttcctcagtaagaacttaggcatgggactttattggataattctgctgatagaccttatggttaattttt

SEQ ID NO: 468610 - DNA, 669 bp, Homo sapiens
agaagattggacgtgggaaacatacccatggtcagagtcatcaagaacctcaccactagatcaaaatctgaaacagcactggcaaatctcacagatgaggaaagctcccagggtggcatcttccagggtatcttggatgtccatgttgatcacgtgcacaggctgaaaggtctgctgttctctggaacacagatcttccaccactgtgtcatagacactctcctcacaggtgaagatgacatcaaaggaatcagtgcactcctgaaatctttctggaccgggcttgattctctcatttcttcccaagatgtaaattcacaaaatttttcaccaatacaaaaaaaatcccattctcaaaaacatatctgcttatggtattttaagagttattctacacaacattttctgcatttgatattactggaatcataatgattctccagagaaggcagcaattgctgcaagcctctgcctactttaatatgccttcagagttcaaaatttgtactgacagatgcctcagtgtttcttttttctcatcactctagtccagtatttctccattgttttaatcaacccccacttaaggagacttctcagacatttttccctaatcgcttccccataaaattttaatagcatagatatattgtgtatttgtttatgtac

SEQ ID NO: 468611 - DNA, 963 bp, Homo sapiens
tcgtctcctcggctccgagtccctgcagcagctgaggtgcctgtgtctctctggttcccagtggccgccatcatgctctcctccacactcagggtggctgtggtgtgcgtgagcaatgtcaacaggagcatggaggcccacagcatcctcaggagaaaagggctaagtgtccggtcttttggaactgaatctcatgtgaggctaccaggaccaagacccaatcgtcctgtagtttacgattttgcaacaacatataaggagatgtacaatgacctcctcaggaaagatagagaacgctacacccgcaacggaatcttacacatcttgggaagaaatgagagaatcaagcccggtccagaaagatttcaggagtgcactgatttctttgatgtcatcttcacctgtgaggagagtgtctatgacacagtggtggaagatctgtgttccagagaacagcagacctttcagcctgtgcacgtgatcaacatggacatccaagataccctggaagatgccaccctgggagctttcctcatctgtgagatttgccagtgcctgcagcagtcagacgacatggaagacaatctggaagagctgctgttgcaaatggaggagaaggcaggaaaaagctttcttcacacctccggatttattgtgagaagcatctgcaaagaccttccactgagtactgtttgtgtgacttttgtacacatcacctggaaagagactattaccaagaaaatattttatgggaaatgagaaggactaacatttttaaaagcactgaaaaatggttggcattgtgctaggtgcattacatggcataactaatttcatgcttatatcattctacaagaaagctagcccaccatgacgccattttccagatgagcaaaccgagctgataatggactgctggaaaaatgatttgtttaagggtattcagcagataaataacattgt

SEQ ID NO: 468612 - DNA, 513 bp, Homo sapiens
agaagattggacgtgggaaggctgtttgaccatgcattgtgccacaacccatggattccagcccaatccctacttattcaccctttctggtccaaaaccaggtttcatcgtttatcactataattacaccctttcaaactcctgaagcatttctgcaccttgctcttctgtcacatttgcattgtccatgtccaaacagacagaaaagagaaactcaaccaccttgtcatgtttttccaaatggattggctggaaaaagtagtatctatgggacagtctcacttttatcttcagaagagctctcacaaaaaactacactcaggtttgtattcccatattttaaaacaattatctatgccaaatatcctcaccccatccccaatcatgatcctgactgcccactgccagctgatggccttatcttaagccacattgacagaatagagataaactgtcagtgaggaaacaccacactgccctaccaccaaaactttcacttatatatttggacca

SEQ ID NO: 468613 - DNA, 727 bp, Homo sapiens
cttcagttgcttcaggccctctggatgtatacatgcagctcgtttggaagacctgggtataggtggtcgtctcctcggctccgagaccctgcagcagctgaggtgcctgtgtctctctggttcccagtggccgccatcatgctctcctccacactcagggtggctgtggtgtgcgtgagcaatgtcaacaggagcatggaggcccacagcatcctcaggagaaaagggctaagtgtccggtcttttggaactgaatctcatgtgaggctaccaggaccaagacccaatcgtcctgtagtttatgattttgcaacaacatataaggagatgtacaatgacctcctcaggaaagatagagaacgctacacccgcaacggaatcttacacatcttgggaagaaatgagagaatcaagcccggtccagaaagatttcaggagtgcactgattcctttgatgtcatcttcacctgtgaggagagtgtctatgacacagtggtggaagatctgtgttccagagaacagcagacctttcagcctgtgcacgtgatcaacatggaaatccaagataccctggaagatgccaccctgggagctttcctcatctgtgagatttcagacctttcagcctgtgcacgtgatcaacatggacatccaagataccctggaagatgccaccctgggagctttcctcatctgtgagatttgccagtgcctgcagcagtcagac

SEQ ID NO: 468614 - DNA, 1485 bp, Homo sapiens
accagcactgtgacagctggcagatggggcactgagagccggaggaggaggaaacgctaaattttttttaaaaactcttctcactgaaaaccttatgtccatcgcggagctgtctgcggtggcggcggcgcctctggtctcccgcggcccggagcccgcagcaccgcctctccctccctgccgcagccccgcagcccagcagcgccccagacacacgccgtcgggcaggagccgctcgctctccggaaagtgacaacagaattcatcgaagtgaagaatttcttaagaagataacaaaaagagaaagaaaatgccggaaccaatcaacgtaacagtaactacaatggatgctgagctggaaatttgccattcagcccaaaacaactggcaaacaactttttgaccatgtggtgaaaatagttggtttgcgcgaggtctggtttttggggctgcagtatgtagacagcagaggttattctacatggcttcaactaaataaaaaggtgacgcagcaagatgttaaaaaagagaaggatcctttacagttcaagtttagagctaaattctttcctgaagatgtttctgaggaattaattcaagaaataacccagagactcttcttcttgcaagttaaagaagccatcttaaaggatgagatatattgtccgacagaaactgcagttcttctggcttcctatgctgttcaagccaagtatggagattataacaaagaaattcataacccaggctacctggctaatgatagactcctaccccaaccaaaagaagcagcagagtggcttgaaaaggagcgtcgagctgctgaagaggcgaagtctgccatagcaaaacaagctgccgaccagaagaatcaggagcagctagcagcaaaacttgctcaattcactgccaagattgtacttctagaagaagccaagaagaaaaaggaagaggaagctactgagtggcaacacaaagcttttgcagcccagaagacttggaaaagaccaaagaagaaaaacgaacatgatgaacatgatgagattaatgctaaggctggtgctgaattatcaaatgaaggggtaatgaaccatagaagcaaagaagaacatgtaacagaaacacagaaaaatgagcgtgttaagaagctacttcaggccttaagttcagaattagcccaagccagagatgaaagcaaggaaacacaaaaggatgttcttcaggctaagaatgttaaaacaggccatggtttgtattgtgccgtctacaagtggcataaacacaggaacccctttccctgttcctggcctgtggacctttctgtgaggcatggggtagcaggagagaacaacaatgacaacgccctttcaggctccctcttctcatgaacagctccctctacagcacagagaacagtctctccaggcctctctggaaagcagcattttaaattgcctcacaccagctcctgtctagagtccagcc

SEQ ID NO: 468615 - DNA, 795 bp, Homo sapiens
tgtcaacaggagcatggaggcccacagcatcctcaggaaaaaagggctaagtgtccggtcttttggaactgaatctcatgtgaggctaccaggaccaagacccaatcgtcctgtagtttatgattttgcaacaacatataaggagatgtacaatgacctcctcaggaaagatagagaatgctacacccgcaacggaatcttacacatcttgggaagaaatgagagaatcaagcccggtccagaaagatttcaggagtgcactgattcctttgatgtcatcttcacctgtgaggagagtgtctatgacacagtggtggaagatctgtgttccagagaacagcagacctttcagcctgtgcacgtgatcaacatggacatccaagataccctggaagatgccaccctgggagctttcctcatctgtgagatttgccagtgcctgcagcagtcagacgacatggaagacaatctggaggagctgctcttgcaaatggaggagaaggcaggaaaaagctttcttcacaccatgagcaaaccgagctgataatggactgctggaaaaatgatttgtttaagggtattcagcagataaataacattgtatagataagcaccttttaaataaacttccttttctcaatttgagtggtttctttttaattttttaaatatacaggcatgggctcccctccttcatgaccctccagctccacttcacctggatctgacgatactggacttcatcttggtagtaacaactttcacatttttggtatcagaaactttcaaagttgt

SEQ ID NO: 468616 - DNA, 607 bp, Homo sapiens
gggcaactctgtgagggtatcttaagatcccatctcagagccttcggctgcctccctaggatgctcccttcccagacctatgtcaacatctccttcttccaaccgcctgctcttctcatgattggcatcccagggctggaggcggttcatggctggctcgccatccccttctcctccatgtacactgtggccctccctgggaactgcctgatcctcctggctgtgaagaggaaccccagcctgcaccagcccatgtgctacttcctgtccatgctggcgctccccaaagcgggcctcaccttgtccacactgcccatcaccttggctgtgctctggtttgaccaccggctcatgggcttcaatgcctgcctggtccagatgttcttcctgcactcctctgtggtggagtcctcagtgctcctggccatatcctttgaccactttgtggccatctccaaccccctgcactatgcagctgtcctcacaaatagtgtcatcatcaggattgggctggccattgtggctcaagttaccttgtgcctcttcctgtgccatttccggttaagagtctaaatttctgccctggtgataacatcccatcccactc

SEQ ID NO: 468617 - DNA, 1178 bp, Homo sapiens
aataggaacagctccagtctacagctcccagcatgagcgacgcagaacacaggtgatttctgcatttccaactgaggtacggggttcatctcactggggagtgtcggaaagtgggtgcaggacagtgggtgcagcgcaccgagtgtgagccaaagcagggcgaggcattgcctcacccaggtagcgcaaggggtcagggaattccctttcctactcaaagaaaggggtgacagacggcacctggaaaatcgggtcactcccaccctaatactgcgcttttccaacagtcttagcaaacggcacaccaagagattatatcccgcacctggcttggaggatcctaggcccaaggagcctcactcattgctagcacagcagtctgatatcaaactgcaatggggcagtgagtctgggggaggggcacccgccattgccgaggcttgagtaggtaaacaaggcagccaggaagctcgaactgggtagagcccgccgcaactcaaggaggcctgcctgcctctgtagactccacctctgagggcaggacattgccaaacaaaaggcagcagaatcctccgcagacttaaatgtccgtgtctgacagctttgaagagagtggtggttctcccagcatgcagctggagatctgagaatggacagactgcctcctcaagtgggtccctgacccccgagtagcctaactgggaggcaccccccagtaggggcagactgacacctcacatggccaggtactcctcagagacaaaacttccagaggaacgatcaagcagcaacatctgctgttcaccaatatctgctgttctgcagcctccaccgctgatacccaggcaaacagggtctagagtggacctccagcaaactccaacagacctgcagcttagggtcctgactgttagaaggaaaactaacagaaaggacatccacatcaaaaccccatctgtacgtcaccatcatcaaaggccaaagaatgcctctcctcctccaaaggaatgcagctcctcaccagcaacggaacaaagctggatggagaatgactttgacgagttgagagaagaaggcttcggacgatcgaactactccaagctaaaggaggaagttcgaacccatggcaaagaagttaaaaaccttgaaaaagaattagacgaatgactaactagaat

SEQ ID NO: 468618 - DNA, 1347 bp, Homo sapiens
ccctcttcagcagcactgcttcagcaatgccccagaagccctacaaggcatccatctctggcccctgggccttcagcagccgctcctacaccagtggtcccggtgcccacatcagctccttgagcttctcccaagtgggcagcagcagcagcttctggagtggcctaggcaccagcatgagtctgggtggtggctatggtggggcagtgctggacctggaccccaatatccaggctgtgcatacccaggagaaggagcagatcaagaccctcaacaagtttgcctccttcatcgacaaggtgcagttcctggagcagcagaacaaatgctggagactaagtggagcatcctgcagcagcagaagacagctgggagcaacatggacagcgtgtttgagagccacatccacagccttgggcagcagctggacactgggccaggagaagctgaaggtggaggcagatcttggcaacacgcaggggctgctggaagacttcaacgataagtaccaggatgagatcaacgagcggacagagatggggaatgaatttgccttcatcgagaaggatgtggatggagcttacatgaacaaggcagtgctggagtctcacctggaagggctgactgacaagatcaacttccccagagagctgtgtgaagaggagatctggaagctgcagtcccagatctcggacacccactccctggacgtggatggcatcatcgcggaggtcaacgcccagtacgaggagatcgcccactgcggccaggcaaggctaagagtctgcaccagctccttcagccgcaccagctcctccaggaccatggttgggaagctggtgtccgagtcctctgatgtcctgcccaagcgaacaactatggcagtccctcccagcctaccccctcttgcagctgccccagagcttgtgggggaggctgctgtgcaggaaagcgcagggaacaggagacccacttgaggctcagccctcctccacagcccacttgtgtggggagtagctttcctttgtatatcaaaaacttggaacagggtgtggatgccttttatttctttttcttgcctaattgctctggctagaatgttcagtgctatgttgaatggaaatagtgaaagcaagcatccttgctttgttcctgatattagaggaaatgttttcaatgtttcaccattgagtatggtgttcactgtgggtgttttatatatggctttttattatggtgagggtgtatacttctatttctagtttgttgagtgtttatttttatcatgaaaaggtgttgaattttgtcaaatgcttttgctgttagaaggggaagggtctgtatacc

SEQ ID NO: 468619 - DNA, 1107 bp, Homo sapiens
agaagaaaacagctttactgaagcagtggcaacgtcacagctccgtgactgctcctgccatgcagggctacctcataggcagtgtgctgagaaagccctacaaggcatccatctctggcccctgggccttcagcagccgctcctacaccagtggtcccggtgcccacatcagctccttgagcttctcccaagtgggcagcagcagcagcttctggagtggcctaggcaccagcatgagtctgggtggtggctatggtggggcagtgctggacctggaccccaatatccaggctgtgcatacccaggagaaggagcagatcaagaccctcaacaagtttgcctccttcatcgacaaggtgcagttcctggagcagcagaacaaatgctggagactaagtggagcatcctgcagcagcagaagacagctgggagcaacatggacagcgtgtttgagagccacatccacagccttgggcagcagctggacactgggccaggagaagctgaaggtggaggcagatcttggcaacacgcaggggctgctggaagacttcaacgataagtaccaggatgagatcaacgagtggacagagatggggaatgaatttgccttcatcgagaaggatgtggatggagcttacatgaacaaggcagtgctggagtctcacctggaagggctgactgacaagatcaacttccccagagagctgtgtgaagaggagatctggaagctgcagtcccagatctcggacacccactccctggacgtggatggcatcatcgcggaggtcaacgcccagtacgaggagatcgcccactgcggccaggcaaggctaagagtctgcaccagctccttcagccgcaccagctcctccaggaccatggttgggaagctggtgtccgagtcctctgatgtcctgcccaagcgaacaactatggcagtccctcccagcctaccccctcttgcagctgccccagagcttgtgggggaggctgctgtgcaggaaagcgcagggaacaggagacccacttgaggctcagccctcctccacagcccacttgtgtggggagtagctttcctttgtatatcaaaaacttggaacaggg

SEQ ID NO: 468620 - DNA, 2577 bp, Homo sapiens
tcgggctcctggttgccttagtaacccctcggctttctgttcctggacggtggcggccgccggctctatgatggagcccccgaagcccgagcctgagctccagcggttttaccaccggctgctgcgtccgctgtcgctcttccccactaggacgacgtccccagagcctcagaagcgccccccgcaggagggccggattctgcagtccttccctctggcgaagctgacggtggcgtcgctgtgcagccaggtggccaagctgctggccggcagcgggatagcagcgggagtgcctcctgaggcccgactacgtctcatcaaggtcatcctggacgagctgaagtgcagctggcgggagccgcccgccgaacttagtctgagccacaaaaacaaccagaagctgcggaagcggctcgaggcctacgtgctgctgagcagcgagcagctcttcttgcgctacctgcacctgctggtgaccatgtcgactcccaggggggtcttcactgaatcagccaccctcacccggttggccgccagcctcgccagggactgcacactcttccttactagtcccaacgtctaccgtggcctgcttgccgacttccaggccctgctgagggcagagcaggcctctggggatgtggacaagctgcaccctgtctgccccgctgggacgttcaagctgtgccctatcccctggcctcacagcactggcttcgcccaagtgcagtgctctaacctcaacctgaactacctcatccaactcagccgtccaccagagtttctcaatgagccaggaaggatggatccagtgaaggaattgaagtccatccctcggttgaagaggaaaaagcctttccactggctgccctccataggaaagaagagagaaatcgacatcagttcctcacagatggtgtcgctgcccagctatcctgtggcccccaccagcagggcttccccctcgcctttctgccctgagctccggagaggccaatccatgccctccctgcgtgagggctggaggctggcagatgagttgggccttcctccactcccatctcgccccttaaccccgctggtcttggctacagagagcaaaccagagctgactgggctcatcgtggctgaggatctgaagcagttgataaagaagatgaagttggaggggactcgctacccaccactggactcaggcctgcctcctctcctgggggttgtgacccgtcacccagctgcagggcatcgcctggaggagctggagaagatgttgaggaacctccaggaggaagaagcctctgggcagtgggacccccagccccccaaatcctttccacttcacccacagccagtgaccattactttgaagcttagaaatgaggtcgtggtccaggcggctgccgtacgggtctctgatagaaacttcttagactctttccacattgagggggccggagccctgtataaccatctggctggtgaactggatcccaaagccattgaaaaaatggatattgataactttgttggcagtactaccagggaggtctacaaggagttgatgagccatgtctcttctgaccacttacattttgatcaagggcccctagttgagcctgcagcagataaagactggtcgaccttcctgtcctcagcctttctacgtcaagaaaaacagcctcaaatcatcaaccctgagctggttggactttactcccagagagcaaacactttacagtccaatactaagaagatgccctccctcccatcactccaagctaccaaaagctgggagaagtggtcaaacaaggcctccttgatgaactcatggaaaaccaccttgtctgtggatgactacttcaagtacctcaccaaccatgaaacagatttccttcatgtcatctttcaaatgcatgaagaagaggttcctgtggagattgtggcccctgccagagagtccctagagattcagcaccctcccccattgctagaagatgaagaaccagactttgtgccaggagagtgggattggaacactgtgctagagcacaggctaggagctgggaagacaccccacctgggagaaccccacaaaattctgagcctgcagaagcatctggaacaactgtggtctgtgcttgaggtccctgacaaggaccagctgcgggaggcattgctggcgagactagagtggtttgagggacaagcttccaatcccaaccgcttcttcaaaaagaccaacttgagctccagtcacttcctggaggagaatcaggtccgaagccatctccacaggaagctcaacttaatggagtcttctttggtttccctcctggaggagatagagttaatctttggcgagccagtgatcttcaaggggcggccctacctggacaagatgaagagtgacaaagtggagatgctctattggctgcaacagcagcggcgggttcgccacctggtctcggccctgaaggatccccaccacattcctatcacactacattaaattgtcacctcttttagttctcaaacactattaggaagaagaaaattaattaaatttttaccagttac

SEQ ID NO: 468621 - DNA, 507 bp, Homo sapiens
cagggtccttacctgagtgactggatggacaaaggctcctctgccgtctccctgcaaggaaaggggccagcatggcagccgaatggaagaatggggccctggggctcagatgggatgaaggaacttcattcatccttcaatgcccagttcacacattactacctcctggtgcctccagacagaatccattgttctcgttggcgctcccgtaatactttctacatgttcaattttagcatctactcacttccccacaaatatttatcaagtacctactttatgtcagagtccttccagactgcccgagaacagcaggagcccagagcccggggaccaagggaccctctttacacgggtgggaaaagaggccttgaggagccctgccttcacctctcagctccgcaggcgtcggaatccgatgaggacgcagcggccatcttcgcaggcgtcgtcctggcaaccggccccgccctcgcgtaacgcccaatagtgcccgagcacagggaa

SEQ ID NO: 468622 - DNA, 3279 bp, Homo sapiens
cccacatctcagaggggcaaggccaccagcccacagggtctggaatgagcaaaggcgctgccacccctctctgtgtgtcgttattcctgagtcagtcaccccaaaagtcggttatcgaactacttccaggcgcgactggccggggcggcaacagcacagccaggatcctgagcaccaaccacacgggtcccgaggatgccttcaacttcaacaattgggtgacgctgctgtcccagctgcccctgctgctcttcaccctcctcaactccttcctgtaccagtgcgtcccggagacggtgcgcattctgggcagcctgctggccatactgctgctctttgccctgacagcagcgctggtcaaggtggacatgagccccggacccttcttctccatcaccatggcctccgtctgcttcatcaactgcctcctggtcaacagccccacagaccaatggctgcacctcagaagaggactgaatagcgggtgttgcccccgagtgctcagagtccctagggaagctcacacctgcgcaaccttgtccagagtcccctgtgtatcctgccggcacctcctccagggagcctctgagtcttgcctagttgagcagcagcccccatccctgtcctccacagccttcagtgcagtcctacagggcagcctcttcgggcagctgggcaccatgccctccacctacagcaccctcttcctcagcggccagggcctggctgggatctttgctgcccttgccatgctcctgtccatggccagtggcgtggacgccgagacctctgccctggggtactttatcacgccctgtgtgggcatcctcatgtccatcgtgtgttacctgagcctgcctcacctgaagtttgcccgctactacctggccaataaatcatcccaggcccaagctcaggagctggagaccaaagctgagctcctccagtctgatgagaacgggattcccagtagtccccagaaagtagctctgaccctggatcttgacctggagaaggagccggaatcagagccagatgagccccagaagccaggaaaaccttcagtcttcactgtcttccagaagatctggctgacagcgctgtgccttgtgttggtcttcacagtcaccctgtccgtcttccccgccatcacagccatggtgaccagctccaccagtcctgggaagtggagtcagttcttcaaccccatctgctgcttcctcctcttcaacatcatggactggctgggacggagcctgacctcttacttcctgtggccagacgaggacagccggctgctgcccctgctggtctgcctgcggttcctgttcgtgcccctcttcatgctgtgccacgtgccccagaggtcccggctgcccatcctcttcccacaggatgcctacttcatcaccttcatgctgctctttgccgtttctaatggctacctggtgtccctcaccatgtgcctggcgcccaggcaggtgctgccacacgagagggaggtggccggcgccctcatgaccttcttcctggccctgggactttcctgtggagcctccctctccttcctcttcaaggcgctgctctgaagtggcccctccaggctctttggcagcctcttctcgacgtctccttccggagctgagatccagcccagggcgaatggcgagcttggctcaggcctctgcggggtggaggcccctgggcctgaggctgccagcagcgggcaggagctgctcttcatccacttggagtgctgtggggaagaaatcaccaccggtcattctaaccctcacccaggaatgggggtgactcgcacaagacctcatggaaagggtgatgactagggaaaagagggtgcagggcacggctgctccccaccaccaggtctgcatttgttcatcatcatcaggagcagaggtgaccagagggttcagagtgggaggcggggccagcccaggccaggagcgcctcatcttcccaggcctcagccacccagggtaaaaggtgccagggaagttgtgggcacctgagaggaggaacagatgtggaggacctgagggtgctcaaagggccaggctcagcctcaagcagtgttttcattgccaacacttactgtacccactccgcagagcccagctgggcctgggccccagggccacagctagcctgcatgtgtgtactgcactttacagtttgcaaagctcttccatacccactctctcaccgaagcctaattgaggctcttggaaggagtcaggcaaggattgtgcttcccccattatacaggtgacaaaactgagtcctggggaaagtgactggtccgtggtagagccgggacccaatcccctctctctcctccctgttggtgctgttcttcctgcccaacacctgtttctcttttcctcaaggggtttggggcaggagcctgggcacttactccccgtttttgctgtttctccttctgaccctgctcttgggtctaataaccccatttatttgtatgatgcgttcaccaagtctttatttccgaagtgctgttggctctattggcctcagtgaactgggtggggtcggaaagattgtacccccttgacaggtgggatgactgaggccctgagaggggtagggattggtgggcatctctgtgctgggtcctctggaccacatgatagctggggggtactgacctgcaaggaatcctgagctcctgggcagagcacctagttggatggacaactattgctctcccactccatgagcccctgggctctcaccagcatcctctgcctccccaggatagctcctccttggaaatctggccttagagaggcagtcagtgtgggcagggctttggcgaccccaccaattctacacacggatggaggaaaggcctgcttcaccacacacctatactaccctgcccgtcccagagaaaagcaagggttttctgcccacctgcctttgtgaacattcactgagcacctattagatattaggtgctcagccagcacagggtacctgctcagaagccaggggctttttggcatcaaggaggaagacaggcaagatatgaccttggttgctgaaataagccacagggcagaccccaaggaaggattcattcctttgagcactgttcacagacagctgccccgagccaggccctgcctggtctggagactttgaaacaaaggagacacagtccccgctcccaaggccacaggaagccaaatataacttgtgatacgtcttgtgagggccctgcagaagcatgtc

SEQ ID NO: 468623 - DNA, 1842 bp, Homo sapiens
tctgctacattgtcaggagcaggtctccgttgcacagcaccctgacctcactcttcctggcacacaaaaacaaggcatggcaaggcataacgggctgggccaggctatgtggctggcagcgcagacagaacgacccttggacaggcagacaaccctgcacagccacggctctgagtgtggcatgtgcaagctgactgtggacctgggggtggtctgccctggcctgcccatgtccaagtcctcctgggaggctgtggtggctgtgcttatgtgcctgtgcctaaatctgggaatgactaccctagtctgcgcatatgaagaacaggtggagagcagcagcaagattgtctgtgggaggaacccccagggcaggcctgtgggaggagaccatgaacacccccacttcccagctgaggaaactgcatctggagagcccaggcccactgcccacggtggcacagccaaacagcggcggaagcaggagtggacttcagagccagcactgctgtgtcccctcgctgccctggggagagcctagagcctgccccactggactgcctgtggctctgctgcactcatatttcacccccaccaggaatttgcagtgttgagaactaacttgaaaagcaggaggctggagcccctggctgcccaaccacctgcagtgcctcagcatctgtctcctttggaattacacctgacagcgcatggagcaaacagagggatacagttcacggggacaatgtccgcgtcaccgctgtgggaaggtgccccttctttcctatggaatcacgattgtgagcattgtgagtgatttctctccatttggctgcatttctcaacaatttctggccccgtggctgtgctctggagagctggggctcccagaaggctgactgccagccagaaaatggcttctgagcaacatcagggaacaggaaggagaattcactctacttttgtccctgtatagaaagccaaaacagtggtgggatgtgtgagcttttttcagaaataccttttggctttgttgtactcagagagccagcactaaaccaacaccttcatccacagctttaagaagagagcgtgtgatcggcaactgactttgttgagagggactgttaggctgtggtgatggacacgggggcagggtggccagggacaatcaactttggtgttctgctttgttaagggggttgggaatcttccatgaacagaccagcctttgctcatagtgggcctcctcccagaacccatggatccacacatccccagacctttgaacaacttaagaaaaacaaatcacctcttcatccagaggaatttagcccagacaattgccatgggatttgggcatttcaaggctgttataaaagaggcacagacagaaagccaaacgagactgtgacacctgtctcccggtgctgacaagtgtcggtgatgggctgtggagcaagtccctctgcaccctgggcctcagtttccctacctgctccgcagttgttctccatggatccatccatttctgacttgtacaactggttaattccaggctggaacataatcccagtcctagctttatacgttaacactgaggacttcttgatgcattcagggacaaccaacactgaactgtgacgctgaaattaaaataatcactttgtagatttgatgattgtaagtttattgacactgaacttttctcacttatcgagggacctgcattgcttctcaagcctggagtgttttgcatgacagcgtttaaggttgtgggctttagagtctgagaggactgggacccaagctcagttgcgtctccttgtccctgtgtgaccttca

SEQ ID NO: 468624 - DNA, 1164 bp, Homo sapiens
gggcagtgagaatgatgcatcttgcattccttgtgctgttgtgtctgccagtctgctctgcctatcctctgagtggggcagcaaaagaggaggactccaacaaggatcttgcccagcaatacctagaaaagtactacaacctcgaaaaggatgtgaaacagtttagaagaaaggacagtaatctcattgttaaaaaaatccaaggaatgcagaagttccttgggttggaggtgacagggaagctagacactgacactctggaggtgatgcgcaagcccaggtgtggagttcctgacgttggtcacttcagctcctttcctggcatgccgaagtggaggaaaacccaccttacatacaggattgtgaattatacaccagatttgccaagagatgctgttgattctgccattgagaaagctctgaaagtctgggaagaggtgactccactcacattctccaggctgtatgaaggagaggctgatataatgatctcttttgcagttaaagaacatggagacttttactcttttgatggcccaggacacagtttggctcatgcctacccacctggacctgggctttatggagatattcactttgatgatgatgaaaaatggacagaagatgcatcagccaacactgaagctttgatgtacccactctacaactcattcacagagctcgcccagttccgcctttcgcaagatgatgtgaatggcattcagtctctctacggaaatgagttctgggccatcagaggaaatgaggtacaagcaggttatccaagaggcatccataccctgggttttcctccaaccataaggaaaattgatgcagctgtttctgacaaggaaaagaagaaaacatacttctttgcagcggacaaatactggagatttgatgaaaatagccagtccatggagcaaggcttccctagactaatagctgatgactttccaggagttgagcctaaggttgatgctgtattacaggcatttgggtaattgagataaagcatgtaaagcacttagctcagtgcttggcatagagtaatcacttaataaatgccctccattattaacttgtacttaatctaagttatatgtgttgcaaaatgacatatttgaagatgtctcatcattttccttatctatatttacagga

SEQ ID NO: 468625 - DNA, 1601 bp, Homo sapiens
actccgcctgtggatgaggggtcttctcagctgggatattggagcagcaagaggctgggaagccatcacttaccttgcactgagaaagaagacaaaggccagtatgcacagctttcctccactgctgctgctgctgttctggggtgtggtgtctcacagcttcccagcgactctagaaacacaagagcaagatgtggacttagtccagaaatacctggaaaaatactacaacctgaagaatgatgggaggcaagttgaaaagcggagaaatagtggcccagtggttgaaaaattgaagcaaatgcaggaattctttgggctgaaagtgactgggaaaccagatgctgaaaccctgaaggtgatgaagcagcccagatgtggagtgcctgatgtggctcagtttgtcctcactgaggggaaccctcgctgggagcaaacacatctgacctacaggattgaaaattacacgccagatttgccaagagcagatgtggaccatgccattgagaaagccttccaactctggagtaatgtcacacctctgacattcaccaaggtctctgagggtcaagcagacatcatgatatcttttgtcaggggagatcatcgggacaactctccttttgatggacctggaggaaatcttgctcatgcttttcaaccaggcccaggtattggaggggatgctcattttgatgaagatgaaaggtggaccaacaatttcagagagtacaacttacatcgtgttgcagctcatgaactcggccattctcttggactctcccattctactgatatcggggctttgatgtaccctagctacaccttcagtggtgatgttcagctagctcaggatgacattgatggcatccaagccatatatggacgttcccaaaatcctgtccagcccatcggcccacaaaccccaaaagcgtgtgacagtaagctaacctttgatgctataactacgattcggggagaagtgatgttctttaaagacagattctacatgcgcacaaatcccttctacccggaagttgagctcaatttcatttctgttttctggccacaactgccaaatgggcttgaagctgcttacgaatttgccgacagagatgaagtccggtttttcaaagggaataagtactgggctgttcagggacagaatgtgctacacggataccccaaggacatctacagctcctttggcttccctagaactgtgaagcatatcgatgctgctctttctgaggaaaacactggaaaaacctacttctttgttgctaacaaatactggaggtatgatgaatataaacgatctatggatccaggttatcccaaaatgatagcacatgactttcctggaattggccacaaagttgatgcagttttcatgaaagatggatttttctatttctttcatggaacaagacaatacaaatttgatcctaaaacgaagagaattttgactctccagaaagctaatagctggttcaactgcaggaaaaattgaacattactaatttgaatggaaaacacatggtgtgagtccaaagaaggtgttttcctgaagaactgtctattttctcagtcatttttaa

SEQ ID NO: 468626 - DNA, 758 bp, Homo sapiens
ctagagcagggataccattgccaccactgccagcagctccagcccggaaggacccctgtccctctgccgacgctgccgtcttgattgtgaggcctccccagccatgtggaactatgaatcaattaaatctctttcctttttaaattacctggtctcagaaatcttctctgaggattatagccagaacccctcagaaaactctatcttaaaagctacacaactagagcttctgtttgttttcttccatggctttaaggctcagcttgaggtcataagcccccatcaggtcccccagtgtcttctgttactgagctcttctagcgccctgctgtctacgttggatgaagctgacttgatcattgtggataaggtttttaatgtgctgctggatttggtttgccagtattttattgaggattttcgcatcgatgtctgctggagtttgctggaggtccactccagaccctgtttgcctagctatcaccagcagaggctgcagaacagcaaagattgctgtctgctccttcctctggaagcttcgtcacagaggggcacctgccagatgccagcaggagctctcctgtatgaggtgtctgttgacccctgctaggagatgtttcccagtcaggaggcatgagggtcagggacccacttgaggaggcagtttgttccttagcggagctcaagcactgtgccgggagatctgctgctctcttcagagctgacaggcaggaatgtttaagtttgctgaagctgtg

SEQ ID NO: 468627 - DNA, 583 bp, Homo sapiens
ggaagcgggagggatagcttcaggagatatacctaatgctaaatgatgagataatgggtgcagcacaccagcatgtcacatgtatacatatggaacaaaacatgcacattgtgcacatctttccttctaacagacaggaccctcagctgcaggtcagttggagtttgctagaggtccactccagacctgtttgcctggataacagcagtggtggctgcagaacagtggatttttgtgaactgcaaatgctgctgtctgatcgttcttctggaacttttgtctcagaggagtacccggccgaatctctagctgaatgctgggagaacgactgctctcttcaaatctgtcagacagggacacttaagtctgcagaagtcactgctgtctttctgtttgtgtgcgccctgcccccagaggtggagcctacagaggaaggcaggagtccttgtgctgtggtggtctccacccagttggagcttcctggctgctttgtctacctaagcaagcctgggcaatggcatgcgtccctcccccagcctcgctgctgccttgaagtttgatctcagacttctgtgctagaaat

SEQ ID NO: 468628 - DNA, 2645 bp, Homo sapiens
aagtcatcggtcagacacccttcctgtgccctctggtcagaggagaggccgggtccccagagaccacagcatctatacccagctgttggagataacgctgcacttgcagcaggccatgacggagcacttcgtgcagctgacgagcagacagggcctgtcgctggaggaaaggaggcacactgaggccatctgtgagcatgaagcccttctgagtcgcttaatatgccggatgatcaacctcctacagtctggggccgcgagtggcctggagctccaagtgcctcttccttctgaggactctaggggtgatgtcagatatgggcagagggcccaactctctgggcagcctgatccagttccccaactgagtgattgtgaagctgcctttgtcaaccgcgacctatccatccgtgggattgacatctctgtcttttatcagtcgagcttccaggactacaatgcctaccaaaaagataaatatcataaggacaagaacaccttggtggtctgggaagaggtcttaaaggctgaatcagccagccatgtggtgatggccatggccatgaccctccaggcaggaggaacagcacacgtgaaaccttcaagatgcgaagggctaggagtgattgggaaaggaggtccaatggccagaggtttcattaaccttggcaccagtgagaacaagctctgcatggatctgatgactgaaagagtaaggatgttctgggctgtgttgggacccaccccttcaaggcttagtccccctagcgtgctcctgagctatggtagatacagggtgaggaaaggggcccggaagccacaaggtctctctgggtctgtttacagcctgcgggaagaagtggcccggttcctgacctactactgcagggcacctacccgacttgacccagaaaatgtggtggttctaaatggctgctgctctgtcttctgtgccctggccatggttctgtgtgatccaggcgaggccttcctggtccctgctcccttctatggtggctttgcctttagctcccgcctgtatgcaaaggttgagttgattcctgtccacctggagagtgaggggaaaaaggtccgaggccttgtgctaatcaaccctcagaatcctctgggtgacatctactccccagactcactgatgaaatacctggaatttgccaagaggtataacctacatgtgatcatagatgagatttacatgctgtctgtgtttgatgaatccatcacattccacagcattctgagcatgaaaagtttgcctgatagcaacaggacccatgtgatctggggtaccagtaaggattttggcatctctggcttccgctttggtgctctgtatacccacaacaaggaggtggcctctgctgtgagtgcctttggctacctccacagtatttctggcatcacccagcacaagctgtgtcaactgctccagaacacagaatggattgacaaagtatacctacccaccaattgctaccggctccgggaagctcacaagtacatcactgctgagctgaaggcattggagatcccttttcacaaccgcagctctggcctctatgtctggatcaacttgaaaaagtacctggatccctgtacatttgaagaagaacggctcctctattgccgcttcctggacaacaagctattgttatcccgtggcaaaacctacatgtgtaaggagccaggctggttccgcctcatctttgcagatgagctcccccggctaaaattggtgtcatctcatgtggcagaagaggagggggattacggggagggtctccggagaatctccaacccatctgtgcactgggagaacaagatggagccaagggaagctgtggccatgctcagcggggaggagcctggcctcttcaatttctgtgtggtggcctgggattcaatgtgagtttggaggcctgttagcaggaccccctcttgctctgctgacagtatttttcttttttcctttttgcccagtaaattccgttcccctcacccttcaatgtgtccatgttcctaatccttcctggtggtgtgacaagaacctggttttagctgaactaaggagcaaaattctgcaacaaaatgagtttttttgatcagtcaatctaactgtttatcaactgtattgaacttttcaaagaaccaactttcagtttcattgatttttctcttgtttcgccttcatttctgctcttatctttatttctttctatttactttgggtttaatttgctcttttttctagcttattaatgtggaagcttagatcatttgttttaagttggtttcaaatatatgcattacaagctattcatttctcacttagcattattttagctacattccataaactttgatctgctggtttttaatcattcaaaatattttctaatttcccttgtgatttctttttttaaatcaatggtttgcttagcatatgtaacttagtttccaaatatttggggactgttcagctttctttgttaatgatttctactttaatttcattgtgactagagaatgtactctatggtttcaatcctttgaaacttattaagacagtttatggccagatttgtttacaacatgtggtctatcttaatgtttcatttgcactt

SEQ ID NO: 468629 - DNA, 657 bp, Homo sapiens
gcccactgtgctgcccttcctcggacctgggctgtcgggagagctggaggcctgtgcattttgtctttttgcagatgttcacccttcctcaaaaggacttcagggctcccaccacctgtctgggccccacctgcatgcaggacctgggcagtagccatggggaagatctggaaggagaatgctccagaaaactggaccagaagctgccagagctccgtggagtgggtgatcctgccatgatctcctctgatacctcctacctgtcctctagaggaagaatgattaaatggttctgggattcagctgaggagggctacaggacctaccacatggatgagtatgatgaggacaagaaccccagtggcatcattaacttgggcaccagtgagaacaaactctgctttgacctgctgtcctggcggctgagtcagcgcgacatgcagagggtggagccatccctgctgcagtatgctgactggaggggacatctgttcctccgggaggaagtggccaagttcctgtctttctactgcaagagcccagtacccctcagaccagagaatgtggttgtcctgaatggtggtgcctcgctcttctctgctctggccacggtgctgtgtgaggccgggggtaagtgagctctgtggcctgccccgc

SEQ ID NO: 468630 - DNA, 1904 bp, Homo sapiens
tgcggcccctggaatgtgagggacagcgccaggacctggaccccaagctcttctgacagccgtccaggcagcacctgtgccggaggggtggagactccgtgaggaccagtatgggccgggggaccggaggaactcggcacaactcagaactgagagagggctgctgccagggacctgaggaggggcaccaagggcagcggggggagagggcagggcactgtgttttgggttgggggaggacttactgttcctaggagggagtcgggtatgtctggctacagaaacagtgctaacggatggaaatgttcaagtctgtgtggtatcaggctcctgaggtgtcggagccctgaagaatgccaagggcctgtgaacacagtgaaggtagtgggagaccggccagaggggacctgcttgtctgtccagcttagtcgcatccccatctacctgtgcaggaaaggccagtggctggaagtttggggcagcttcacagaaagggtagcatctaagctggcttttgaagaatgggaaggagttggtcaaacattggagatggaggattccattccaggtggaggaaacagcatgtttgaaggcacagtaggaggaggcctgggggctggtggaagagtgaggaatttagcaagaggaggtgaggctgaaaacagggccaccacaaaaagttttgctggaaaagcaggcaggagccacctcatgataggctggggatgacacagtgacatttggaatctgtctggtaaacattgctgtcctgaaatcagattagatcaactaagtccagtcactttaagtctgttcagacaggtaaagagatttggctgtggcccatccaagtggacacttcctgtgggaaagggagctagtgtctagcactttggatatgccaaagagaagcctctgtgtccttcatgaaccacatccactcccacctctgtgcctttgcatctagcacccactgcctgagaagtccttccccttctgcatcttgttaatttctccaagatccagctcaggcatgttcctagagaagcctcgcctgaagaccctatgctcacgccatcatagcgtttgtcagactgaatgtattgtatctatctgtgttcttcactaggctgtgagctccttcaggaggtgactttgttttaagtcatgtaccaggcccatgaatgtgtataatatttgacatacaaaaagttcaataaataaatgaataatgggaagtaatattactgtagcagtcccccagtattcatggtttcaatttctgaggtctcagtttcctgtgattaaccttggtccaaaatgttaaattggaaattccagaaataaagaattcatacgttttaaattgcacatcattctgagtggcatggtgaattctgttgccatccctctctgtcccatccagaatgtaaatcacccctttgtccagtgtgcccacgctgtagatgctccccgcccgttaatcacttggtagctgtctcagtgatcagatcaactgttgcagtattgcaaggcttgtgttcaaggaacccttattttacttcataatggcaccaaagcacgagtagcagtgccagcaatttggatatgccaaagagaagccataaagtgctttctttaagtaaaaaggtaaaagttctcaattaataaggaaaggaaaaaaatggtatagtgagtttgctaagatctacagtaaggatgaatcttctatttgtgaaattgtaaagaaggcaaaagaaatctatgcatggtctatgtagggttcagtacaaactgtggtttcaggcatccactgggggtcttggaatgtatcacccaaggatgaggggggactactgtattactaatgataataatgtttactgcctgttatgccaagtgcc

SEQ ID NO: 468631 - DNA, 583 bp, Homo sapiens
gtgacaaggcagctggcgtcctccagagtttaaggggaggagaaatagtctccctccacctcttgatgggggatgctgcaaagtcacaattcaaagagtatgaattcagggaggatggaaagagtgtggcaaattttgtaatctaccacagtttactctttgaccataattattcacattgctcccacaggaaaaatatgcttaccaccattccaagacccccaaacacctcttgcaattatgtcatcaggcttgaagaccaggatcttgtggttcacatcaggtttgtatgtgacattatggatgttgttcttcttaatcctgacaccgatgaattaaagacaagatcatggctgtttttacaatttgccatacctcctcagaggccaccctcatcacaaagtgggaggccatccttcccttccaaattttatctttatgtgacatatgtacatatcaaaaatatatagttttttcccctgtgagttctatatgtttttaaatgaactatttcatacatactacataatttgtgcagtataaatgtaaggtataaagaataggatgcttttgtacttaccac

SEQ ID NO: 468632 - DNA, 667 bp, Homo sapiens
ggaaccacttcacacttcctaggatggatacaattaaaaaacagaaaataagtgtcactacggatgtgaagaaactggaactctcatgcgttgctggtatgtatctgaaagaatggaatgatagctgtacacccatggtcatagcagctttattcacaatcgtcaaaaggtggaagcaaacccagatgtccgtcaagagaatggctaaacaaaatatggaatatgcatttaataaaatattcagccataaaatggaacagaattttgatacacactacaacatggatggacttgaaagcattatgctaaatgaaataagccagacacaaaataaatattgtcctagtcctccatgcccctgccccacccctcctctccttctgctatggtgtgggactaaaaaggcactcgtctggaagtcaggtggcctgagctctagtccagattgtgctaaggtatgaccctggacaaatcactttccttgtcagaccctcgaattcctcatctgtaggaggcactgctgatttgtctgccctccccactccagaggagttaggaggtctcaaaggttgtaaacgtgctttataaatgatacagactgtatcatgtcagttattctaagcttgtttgattagtcattctataagtcattatggaatggcatcat

SEQ ID NO: 468633 - DNA, 797 bp, Homo sapiens
cacactgacacagacacagtggacggtgctgtgacagagacactgcagtggggataaaatggtgatcaagagccaactctgccctcgaggagtttgggtctgtagcaccatgactgttaatcagagatgtccactgccattctacgacaaggtactttctttgcatgaggattcaacaacccctgtggctaaccctctgcttgcatttactctcatcaaacgcctgcagtctgactggaggaatgtggtacatagtctggaggccagtgagaacatccgagctctgaaggatggctatgagaaggtggagcaagaccttccagcctttgaggaccttgagggagcagcaagggccctgatgcggctgcaggacgtgtacatgctcaatgtgaaaggcctggcccgaggtgtctttcagagagtcactggctctgccatcactgacctgtacagccccaaacggctcttttctctcacaggggatgactgcttccaagttggcaaggtggcctatgacatgggggattattaccatgccattccatggctggaggaggctgtcagtctcttccgaggatcttacggagagtggaagacagaggatgaggcaagtctagaagatgccttggatcacttggcctttgcttatttccggaaaggggaggaggatgtgggtgctccaaacccatgtgttgctgcccaaacagatttactctcagtgcagcaaacagtcctgttcctttcatggaagttcctggcgaatggatctttgttgtaaaactgtgtatgtgttggcc

SEQ ID NO: 468634 - DNA, 1206 bp, Homo sapiens
tctccacctggttcagcccacctgcctccactcctgcctccaccatgtccatcagggtgactcagaagtcctacaaggtgtccacctctgaaccccgggccttcagcagccacttctacaccagtgggcccatgggcagcagcagcttccggggtggcctgggcagaggctatggtggggccagcggcataggaggcatcaccactgtcacggtcaaccagagcctgctgagcccccttaacctggaggtggaccccaatatccaggctgtgcgcacccaggagaaggagcagatcaagaccctcaacaacaagtttgcctccttcacagacaagatacggttcctagagcagcagaacaagatgctggagaccaagtggagcctcctgcagcagcagaagatggctcagagcaacatggacaacatgttcgggagctacatcaacaaccttacgcagcagctggagactctgggccaggagaagctgaagctggaggtggagcttggcaacatgcaggggctggtggaggacttcaagaacaagtatgaggatgagatccataagcttacagagatggagaatgaatttgtcctcatcaagaaggaggtggacgaagcttacatgaacaaggtagagctggggtctcgcctggaaggactgactgatgagatcaacttcctcaggcagctacacatctgcggtgctgtccatggacaacagccctccctggacatggacagcatcatcgctgaggtcaaggtgcagtacgaggagatcaccaaccacagccaggctgaggctgagagcatgtaccagatcaagtatgaggaactgcagacgctggttgggaagcacgggaatgacctgcggcgcacaaagactgagatctccgagatgaaccggaacatcagccgactccaggctgaggctgagggtctcaagggccagaggacttccctggaggccgccatagcagatgcccagcagcgtggggagctggccgttaaggatgccaacgccgagctgtcggagctggaggccgcccaggagcgggccaagcaggacatggcgcggccgctgcagcagacagagtcccgcttccctttctgctccactaattatccttttaactcgcactggtgtatttttgccgcacgatctgcagttttatttttatccacctctcggtaatggtattggggcc

SEQ ID NO: 468635 - DNA, 514 bp, Homo sapiens
gctcagccttgattgcagtgaaaaggaatacagggagaagcaggagaggccacatcatgcaagccgagggcatggctgtggctggcaccgggcactgcggagcagtcggcaggaagcttgtgtcactggaccaggctccaaaggtcatggcagtctttgtggtgcggctggaaaagcaaggcccagagggcactggacagactgttgagaagattcaaggggaggaggaatctgagggagcgcagttcgagctgcccacgtgtgcgtgtgtgcgtgtgcgcgtgcacaagtgcgtgctggtggtgtcgggagggaaggcagggaacaagcgttgtctctgcctccaggaagatgtggttggcgggggtggaaagtggcctctggaggatgagtcaggaactcctggagtgagaagggctcaggcctcacccagcagtgacctcagagagggtgtgcaaggtcagaagagcctccagctgagctcagcactgtgacaacagactttccaaaatac

SEQ ID NO: 468636 - DNA, 671 bp, Homo sapiens
ttgtctgtaagagccaaaaagtagaaacgacaccaatgtctatcaactgaccaatggaatattattcagccataaaaaagaacaaagttctgatacaggctacaacatggatgagccacaagggatgaggttcagaaaagcaggaacacttgcagcacccaaacctccactttttctcctcccctcacaccaccactgctcccctccagctacctccctggggaagaaggtgtctgatcaatccagtagaaccaaagcggagagaggtactctccagggcaagactgtggcatcctcaacacagaccccccgcgctgacacacgcctggcagccatccaaacaaggcagcaagtttgctcaggagccttccggagtactgagtggagagcagcccatggggatagaacagaggctgccactgagctcctgctcctgctggatcagactcctgctctggatcagaccactaccgccctggctgtccaggtccagctgctgacacagctaggtgctcaccctgaaacaggaagtccccacagctgacccttcagtccttcgctttacctgcagaaacccccaagctcttgtagctctaagtcccctgagagctactcacaagttcaagttttcaggctgagggtcatcaaagcccctctgttcatttgcagaa

SEQ ID NO: 468637 - DNA, 744 bp, Homo sapiens
gattggaatttaattaccttcgccagcgaatgtttggagaacctctctccatcaattgattctgaagtcagatttttattccgagatacttaatggcacttgggctgatggaagcctgggagcaggtggacctgggccacaaggagccctttaacaacaggctcttgcctgtcacggatgagatggacgtgtgctccctgcaggcccgtgcagctggggcctgtggcgcccccagcatggagacggtgctggaggagcagcacaggacgaggaagggcttctcttgcaggctcctcagtgaggtgtcccgcagcatccagcctcctgcagcagcccagagagtggcctgccagagagttccacccacaccggcacttcagcaaactttcctgcagccagggcgcctcggctgtaccatctctaacaaggtttgggtctcagccctgggtgttggggttgcgggaagacgcttccaggtttcttcctgccttcgatgctcggcctcagccctagaggtagaagtgttccttagtgggcgatctcctgtcacggttactgggtgatctcctgtcatagctactaggcgatctcctgttatagttactaggcaatctcctgttatggttagtgggctatctcctgtcatggtgctagtctgagttttgttaaaggtgcctttgaagaactattgatatggttaggctttgtgtccccacccaaatctcatcttgaattgtaatcccc

SEQ ID NO: 468638 - DNA, 2443 bp, Homo sapiens
gcctttaggttttccgaaggtcaacaatgaaaaacagaaccatgtttggtgagtttattctactgggccttacaaatcaacctgaactccaagtgatgatattcatctttctgttcctcacctacatgctaagtatcctaggaaatctgactattatcaccctcaccttactagacccccacctccagacccccatgtatttcttcctccggaatttctccttcttagaaatttccttcacatccatttttattcccagatttctgaccagcatgacaacaggaaataaagttatcagctttgctggctgcttgactcagtatttttttgctatatttcttggagctaccgagttttacctcctggcctccatgtcttatgatcgttatgtggccatctgcaaacccttgcattacctgactattatgagcagcagagtctgcatacaactagtgttctgctcctggttggggggattcctagcaatcttaccaccaatcatcctgatgacccaggtagatttctgtgtctccaacattctgaatcactattactgtgactatgggcctctcgtggagcttgcctgctcagacacaagcctcttagaactgatggtcatcctcttggccgttgtgactctcatggttactctggtgctggtgacactttcttacacatacattatcaggactattctgaggatcccttctgcccagcaaaggacaaaggccttttccacttgttcctcccacatgattgtcatctccctctcttatggcagctgcatgtttatgtacattaatccttctgcaaaagaaggaggtgctttcaacaaaggaatagctgtactcattacttcggttactcccttactgaatcccttcatatatactttaagaaatcagcaagtgaaacaagctttcaaggactcagtcaaaaagattgtgaaactttaaaaaaggagattacacttcaaaatacattttcacttaacaaatatgcattgaatgtctatatttcaagtgctaaattggcccttgaagattaaaataggaaaagtatatgtcttaatttcaagaaaactatagtctagaatcaaggaaagatatataaatggtaaatttatgtaataaatttacaaaaaacaaaataatattttaattgttattagagaagagtgaatggggatctgaaaaggaacagttggaaagaattagttctgttttccataaattatttgaaatttaagaagcaaaacagattgtttatttagaagagtaggaggataagaatttagagtgaaaaaggaaaccagatcataaaagtaagtaattacaactactgagttagctgggtttcatgagtcaagaaattttcagaattgttttgaggagaatgtagtatcagcattgttcttcagcatggagccctggagactatgtttccatcgaggagtgaataatttttcttctcctccattttttcatctatatttcaaatgtaaccattgcaacttccctcctttcataagaggaaaatgaaagaatatatatttagtctacttttctccaaatgaggagaaaatttttaagatttttgtcaacttaatatgtccattttctagtttatggttaaaacaggtttctagagacaagtttagaaggctttcattctcctagacaaaatctattgtttcttttcttaggtgacattttaagttaatggcatgagatctgttttctctctctttgatagtttctggtaattttttccttcctatcatgattttattttcatccttttgtttcactttattagatattagaaaagaaaattctgttatctggctctacttctttaactttcccccagatttttgctttcgtttgtaacataaaccatggatgaccattttataaagtaaaaagaatataaagtgtcaatgcaatcttatatctagaatgttccaaattatgagtcttgaaaaacaactagaaatagactatcctaccaaaaactttacacatggattcaaggcaatgacaacttgaatttgaataggtagtggtagtgtccaatttcaatggaagtaagcacttttttttaatctgagcatttgtacacagtttaataatatcttaaaaaattgcaggagctttgttactatttggggtaaaagtggaacacaatctggtattttcacatgctttatatgtggtaatatgttgagtaaaatgaggtacttctcaagcatttaaggaacaagctggattgaactgattatgagagcaaattatcagagccacagaaggtattggagaatgtataatatttttgaaaaagtattttatgtaaagctgttgctattctgagtatcttgttttctttggttgctagctagagattagtgataatattcaatatattccaaatttaatgcact

SEQ ID NO: 468639 - DNA, 1019 bp, Homo sapiens
gcctccccactcatgaagggtctctttggttacagacggcatgaggtttgagggtctctgtccctcatgtctagagtctcatcctgggaattaactcccaagatactgttaatacttagggatcaagatgacccagctggtagatgtcagtcagccttctccagcatctccagtgcttattcaagggatcacaatcaaaatgtccatggcggaagggatgaaggttaggcacaggcttaccgacaatggttcccctcaccaaggctggtctggctatgccatggctgagtttgccatattgaggacactcggcagcctgtggagagactcacatgaggaagagccaaagcctgccagcaaccatgcttctcaggacactgtacacataagcaaaacagaggataatctcatgttaggtgggatgattgatggtgattatattattgatatagggttgtcatacaatgggagcaggaaggtgctcactttaaaacccaagagggaaaacatagtgatcctaaccaaaccccaaaccaaccaagccaaaccaacccccaagggattgtctggtgtgctggttgcaggggaaaaccagtagagtaagaccaccaaagactctattctttaggaatgaataattgggttttccccatcagatgtctcacatctgtaggaaatgtggtattgcgtttagatccagaagttgtgggtttgaaccctggtctcctgtgtgatctttggcaatacacttaaactgtttgagtatatcaacatcttatgtaaaatgtaaataataatttttccatctgtttcgcagggttattgtgaagattgagtgaggttagtgttgagaaaatgcttttgaaactatgaagtgttctacaaacattataggtgttaaaaatgaaactggcatgctgacgaatgtcagctgttactggagtctagttgagggcacctggggacataggctagctatttctcatttctttggctgacagagtgataaaagaaggtgc

SEQ ID NO: 468640 - DNA, 486 bp, Homo sapiens
tcttggaaaaccaggcttaggcaatgatcagtcacctggtgtccagtggtcagctgttcagtgtatactgttgcctacaagcagcccaagagcagtttcacaaaaggatcttgattgtttgccccaaagggcaaggtttggctcccaaatctgtgattcacctcttggatttaccgcaggctccagtgccactgacactgagcctcttacagtctgctgggcagttgggaggcccagtggcggaactgcagcgtgggccactgggagagcatttgcttcctctggcttttaggacatccgataagtgggttgaagcagccaacccaaaaggactatatgtcgcttcccaaatccagataactacaagaggtcttttcttactgtagggagcaaaagacacaacaattgaccagcattaatgttaaaatagaggtcatgagattgacagaatagactctttgtggcaataatatatcaaattatgaa

SEQ ID NO: 468641 - DNA, 878 bp, Homo sapiens
cgcccctctttcatccccatcttcagtataccacaattatgtttattatgtcccataaccgaggggccgtcatggccatgaaggagaagagctgtttggctatagctgcagacaggcgcttcgggatccaggcccaaatggttaccacggacttccagatctttcccatgggtgaccggctgtatatccatctggcccggctcgtcactgacatcgagacagttgtccagtgcctcaagttccggctgaacctgtgtgagttgaaggaagactttatggtcagtggcacctgtgcagaacaaatatatgaaatgtgcgagtccctctgggagtgcaacatggatccagaacagctgtttgaaaccatcttccaagccatgctgaatgctgtggaccgggatgccgtgtcaggcatgggagtcattgtccacatcactgagaaggacaaaatcaccaccaggacactgaaggccctaatggactaaccctgttcccagagcccacttaaaaaaacaaaacaaaacaaacaaatatatatatatgtatatatcctttcttaaaaaaatcaaaataaaacattctatcattttgtttaaatgttttatacactattttttcctattgtatgattagtggatctcaaatataaaaatataaaaccaaaacaacataatgaacacccaaatccattccacttagagcttatcattgttaatactttgaaagtcactatctgtagcccacacttaaggagtagggggttatgtcttccctccttgagggcaagctacctacacttttttatatttacatatttttacatattttatttatatattatttatatattacatatttacatattttttggagttttt

SEQ ID NO: 468642 - DNA, 401 bp, Homo sapiens
gagaacgggccatgatgacgatggcggttttgattgagtttacgttaagtattgagacccagaactctgcctcttgggcaaagccaagcataaagcagcaagccctcccagaattagacggctttccacggacaggagaacagatacagcagacacagaatgactacagaaggcgaaaacaagcaaaaacaaatgtcactccatctggttttaagccaaataagccctccaaccctaaccaaggcaaaggagaactgcctttccacagaacacacctgactggtttcagtacttgttttcccacgagtacccttgaaactcattttaatccaaaaatgaaaactatgggacaagcacggtggctcatgcctgtaatcccagcacttgtgggaggctgaggc

SEQ ID NO: 468643 - DNA, 622 bp, Homo sapiens
gcacagctagtacaaagcacgcagaagaaagtaaaagtagcttgttaagtccacttgcgcgctgtctctctctctctctctctctctctctctctctctctctctctctctctctctcttccctagcggaatgctttccttcttctactcctgcccttggacatcagactccaggttcctcggtctttggactgtggaacttgcaccagcagtctcccgggggacctcaggtcttcggcctcagactgggggcttcactgttggcttccctggttttgaggcttttggacttggactgagacacactactggcttctctctttccccagcttgcagaaggcctatcttgggacttcttgtaatcgtggtaggcacccaagctggtgaggggcagcttgaggaaagaaagagacaagtatccctggtctttactgtggttagggaatgggaccgggatgaggaaggagagaagctgctgcagaaagataagagcagcaagcagagaggcctcctcaaaacaaggaggaaaatctaagtgagttcagaacatttctttccactaataaagagaacataaatgttaatgtgatcctgaatattaaaataatctttgtttaaaatg

SEQ ID NO: 468644 - DNA, 809 bp, Homo sapiens
ataatccattgctctgagcaaatgacattggctcacagcattaggaaaatcgaggcagtgaggaggtgtggaattcaagtaattttacaagtggatattctttttggatatgggcttagatgcattggctgtaaaaatatacacattggaattcaagtaattttacaagtggatattctttttggatatgggcttagatgcattggctgtaaaaatatacacattgctccattttcaatctggttgtcagagtgtttcatcaagtggaatgtgagaattctggacagtaaaacatacagcactaagcagactctattggttggatgcatattggatgtttatcctggaaccaattacttaaccaagtctgacagttgtggtcaagatactaaaagtgacacttgtaaagtggagatgaaaaagacatggctttctaacaaggagaagactgagctccaaacaagtcataatcctagagacaggtacctgggcaagatgccagtagcacctctccaaaactgtgacagccaagtgtctccaaacattgttagatgtctcctggggggcataatcattcccagtggagaagcactgatttagaataataattaatgaatcaacatttaaatgaatttaaacaaataattattagatccaaatgaaaagccatccatcataaggtgatgtgtagcaccttttgcggctgcaagttttaagttgtcaccttagggaatatttttcttaaaaattagtattaacttttgaggtagatgcagacatttcttctgtatatttgtgtctttctgttt

SEQ ID NO: 468645 - DNA, 514 bp, Homo sapiens
cggagatgatcataagatttcctttgaaaaaaataactaactcagagcctagggctatgggggtctacctggcactgggttttatgggggtctacctggcactgggttctacctggcccactggggtgggcctggttttagtgtctgagatgacctgttctaaggcagtttcccactacaacgtgcctgaaggaaaacagtggcagctggaaaaacccttttcaaaatctgtatcctcagtgaaaggcaattcagcagtcgtttgcacaaatacaaaatctccagtgcaaatacaggatcatttcaattacctcctagaactggctaacagttatcaacaactgaaacatgacatttcattcaaaactagcggggaccatgagtgtggaggagcaggaaagaaccagccaaagactcaggaagccccagagactcaggaagctcacaattatgccagccactccagccctgcagctgaaatgcccttaataacagtgtatttttaaacatttct

SEQ ID NO: 468646 - DNA, 570 bp, Homo sapiens
agggttgctaaacagggatgcagagaaatgagtttggttgtcaccttcctatcccacaagattgttgtgggagagaattatgccatcatacccagcaggaaacagacactgaagacctcagtggaagagctgatcctggaaactggccccactgacttcatcgtatcatggtttaggtcctgcacactggactgtgaaacaatggcttacatctgtaaagggatcaatgcctctattcagaaatcacaggagctcaacgcaggaataaaaagtgatctttattcccaagtgtcaactctaattgattggcagtggctttttggagaactggactgcactgaaaaggacttgaaggggtttggagtagggaaatatgccattaactggccacacagtgagtaaacggcaaaattcagggctttctgacttcagagcccatatgcttgaccattatatgatactgtttatgagctcacactgagctgtttggtcttgatccatggctagactctgatctctgagaaagttatgaatgaccctccaaaccatgatacagtcccccttgtgctg

SEQ ID NO: 468647 - DNA, 876 bp, Homo sapiens
cagccgtgctaaggcatgtaaacaatcatgttatcagcaaacagcaacagtttgatttcctccttactggatagtcagacgtgtgacacggcactggcttcccctaaaacaagcattctacgtgaggatgctgctgcttctttaaagcctcagaaaagcaccaattctgccatattctactggtcaacacggtcacgatcagcccagtttcaaagaaagggaatacatatacctcctctcactggagaggaatgtcaaagaaattgtggacaagcttattccatcacggggcccttccaaaagcctccactggcacactgtacttgcctcctcgtgacatttaaactgaattgtaaactgcgcagtcttagtcaatattgtgacctccagagccagcacagcatgattgatgagtatttattcaatgggtaaatgaatgaaaattaagaaggtttgccttatattttataaacccccaaggcttctgggaaacggaaacaagtcacccagatatattacctaaattaaatcactaaaatgagttactaagagaggtgccatagaaatgtgtatatatgtatacatttataaatgatacattatatatacacaaatgtggtagttttatagctatatgagagaacagaaataataatgctacaattgaataactcattacttatgtagtgcttaccatgtaagcccatcatgagaattgcctcagtacaagaaattcagatctcttatgggatgaattgtgctcctcaactcctcaaaaaaaattcatatgttgtagccctaagctccagtagatcagaatgtgattatatttggagacagagtattaagttaaagtgaagccgttagcacaggccc

SEQ ID NO: 468648 - DNA, 578 bp, Homo sapiens
tctaaagatctgtgacaattcttgaatttctacgttttggtaccagaatgatgctggcattcaaggagcatccctgggaaagagaatacgcgcctaggggtaggtctatagatggccccccagtaatagacctaagaaatgagatagacagcaacacgataatagtgggggacttcaatactccaccaacagcactgcacaagtcatcaagacagaaagtcaacaaagaaacaatggatttaaaatataccgtggaacaaatggacttaacagatgtatacagaacattccattcaacaagcacagaatatacattttattcaacagcgcatggaacttactccaagatagaccacatgataggccagaaagcaaacctctataaatttaagaaaattaaaattatatcaagcactctctcagaccacagtggaataaaactagaaatcaactccaaaaggaagcttcaaaatcatgcaaatacattggaaattaaataacctgctcctgaataatcactgggtcaaaaatgaaatcaagatgaaaatttaaacattcttctaactaagtgacaatac

SEQ ID NO: 468649 - DNA, 571 bp, Homo sapiens
ggtataacatgacccctgggttcagcccaggaccactggctattgatatccacagatttcatatttacactgcctatgaccctaaaagaagatggtgtgcaattctgcagcaggaacaactgatggatggagccagtcaccgggatagagttgaccccatttataatctgccacgcaatatgcaatggataaatgagactggggtgaagaacacttctgggctcccaggagtaaaggcactgaagtcaagagcttctggaagaacttttgcaagcgcttgcttttcactcacacccatgtccttgccaagggctggctgccggtcagacctgggagagaacccagagcaggagccatcctcctatgccttctgtcttttcagctcaatcagcagcagcaggaggaaagagccaatcgactctgcacttcagcacctctcaggaacagccactgcccaaaaagaaggattttgctacaacctcaagttcagcccagccccttgtgcccaagaacaactgcagcaatttccacagccactgggaaccattcgatagtctctcttctgctccat

SEQ ID NO: 468650 - DNA, 749 bp, Homo sapiens
tgtctgatggaagagggagtcattctctggaaggacatcatattccatcaccactgaagttgccttgtatattaccatggctaaaacttcctaccctcagccattatgtcagcaggcagtgaaggctacatggctgttttcagcaggtgctggttctaccctgaaagctgccccctggtctagacctcagcatgccttgccacataggaaagtcctccagaaagccattgccattttaaactctggctcagtgttggggcttctctcagtgacacctggggccaggactggtatttgtttatcccgtgtcctcactctcctttgcagtcagaccactagaggtttctgggtcttgaagggaggtgtcctttcaagaagggacttagaaggtgcagtctgggctagcaagagggttgtggaagaggaacagagagccatgcttagagcaggttcagtgtctagcaaggaacttcagtgcaaatggctgtaagggcataaatcctgcaagccaggaatagtgaagtggctgccctaccagagagcctcaccccttgggttaggggttggggtggaggaacatgtgtgcacgtgtgtgtgcatgtgtattcatgcatgtgcatgcttgtggaagtgtgtggtgttcacaacacttgtgtacgtgcagaaatacaaatatgaaacttggaaaaactgccatgggaatgaaaacccatgaaagtctgacttctatatgaatgggaggtacctgc

SEQ ID NO: 468651 - DNA, 1123 bp, Homo sapiens
ggcacccggctggtcagcagcgcggccagcgtctatgcaggcgctctatgcaggcgctgggggctctggttcccggatctctgtgtcccgctccaccagcttccagggtggcatgggcctgggggcctggctgcggggatggctggggaacgagaaggagaccatgcaaagcctgaacaaccacctggcctcctacctggacagagtgaggagactggagactgagagccggaaactggagagcaaaatctgggagcacttggagaagaagggaccccaggtcagagactggagccattacttcaagaccatcgaggacttaagggctcagatcttcacaaatactgtggacaacgcccacatcattctgcagatcgacaatgcccgtcttgctgctgatgactttagagtcaagtatgagacagagctggccatgcaccagtctgtggagagtgacatccataaactccgcagggtcattgatgacactaatgtcactcggctgcagctggagacagagattgaggctctcaaggaggagcttcttttcatgaagaagaaccatgaagaggaagtaaaaggtctgcaagcccagactgccagctctgggttgactgtggagccagatgcccccagatctcaggacctcaccaagatcatggcagacattctggcccaatatgacaagttggctcagaagaacctagaggagctggacaagtactcgtctcagcagattgaggagagcaccacagtggtcaccacacagtccaccgaggttggagctgctgagatgacactcatggagctgagatgtacggtccagtccttggagattgacctggactcaatgagaaacctgaaggccagcttggagaacagcctgagggaggtggaggcccactatgccctgcagatggagcagctcaacaggatcctgctgcacctggagtcagagctggcacagacctgggcagagggacagcgccaggccaaggagtatgaggccctgttgaatattaaggtcaagctggaggttgaggtcaccactaccaccacctgctggaagacggcgaggacttcaatcttggtgatgccctggacatcagcaactccatgaaaa

SEQ ID NO: 468652 - DNA, 538 bp, Homo sapiens
atatccagtttaccttctaaatcgggagaaatgaacacatggaaaaggcactaaccaccggaagcaggggccggcgaactatggcccgggagtctgccacctgttttacagataaatggagcaaagctactgtcagaccacaggaaggcagagagggtacatggaggataaatcccctgactgttccttctcccactcctgatctacttctggtgaccactattagctcaactcaccagaaaccagccaacaaagttgtctgggtgtttctatcaataaaggtggcttcccagacctcagagcaagacacagaagggcagagaatggacctaggagcaaaagtagaagaaccagggcatacacaagaaagtagggagaagggtacccatcacccaactccaacaattaccaatatttttccattcttgtttcatctctctctgattttttttctggagtattttaaggcaaatcctagaaaccatattgtttcacccaaaattagcttagtatgcatctacaataaataagaactgtt

SEQ ID NO: 468653 - DNA, 727 bp, Homo sapiens
gcagtggtgaacaggtttgatgtggctcctgttagcttatgggcatgtaagggaggcagacagtcagcaggtaaatgagaacagaaaacgattctcaactgtggttttgccagatggtttttctctttactgaagagtacacagtcattaatgaagcctgccctggagcagagtggaatatcatgtgtcgggagtgctgtgaatatgatcagattgagtgcgtctgccccggaaagagggaagtcgtgggttataccatcccttgctgcaggaatgaggagaatgagtgtgactcctgcctgatccacccaggttgtaccatctttgaaaactgcaagagctgccgaaatggctcatgggggggtaccttggatgacttctatgtgaaggggttctactgtgcagagtgccgagcaggctggtacggaggagactgcatgctgttggtcttcgttgctgatttaaaacttcgatgccattttaggtggtttctcgtaaatttaattcagtacctggcagattatgttccagatgctattgcaagtgcagtggggaaccaaggaagagtggtgaagtagaggatggaccaagtgctctgagaactagctaacagaacagttaatgacagggagagggaggtaaggtttcagacaggaagtgaaggttgagctatgcctttgctcttcagttggcagagcaggaagatatttcagggagagggatagta

SEQ ID NO: 468654 - DNA, 657 bp, Homo sapiens
tatcacttccgtagcccagcagcagatgggtagatgggggcgatgaggagtgccagtgacaccatctgttcctcaggcctgttcctcatctggccttgaatgagcccagcggtctcaggactgtccagggcccatctgcttccctccgtcaccctgtccacccacagatttgtcatgttgagcctggagtttgactacatgtgccagtatgactatgttgaggttcgtgatggagacaaccgcgatggccagatcatcaagcgtgtctgtggcaacgagcggccagctcctatccagagcataggatcctcactccacgtcctcttccactccgatggctccaagaattttgacggtttccatgccatttatgaggagatcacagcatgctcctcatccccttgtttccatgacggcacgtgcgtccttgacaaggctggatcttacaagtgtgcctgcttggcaggctatactgggcagcgctgtgaaaatcactttcatgggacaggagataaagaatgcaaaataatcagctagatttggcctagtaccagctgtcaagaaggtgtgagagcctccgatgggacagtcttcaagggctgctaccccaggcctcacctgccctagattgtttccgaaggaggaaaaacttccccc

SEQ ID NO: 468655 - DNA, 679 bp, Homo sapiens
ctgcagtgggtggagagcagctccagctcacctttgcagggtctttatagaggtaataatcaagttaaaatgaggtcattaagcaaacacaatgtactgactctaaaacaggtacgaccagttgctgccaggccctcaaagacacagtgttctactgtggaattagccatacataatgggcccattgaatcaggcagcaggcactttcctctctgggctgcacagatagaggagttgggcctagaccccagggactggtggaccctggattttcagacccaagtgacttgcccatggccacagaagaactggtggcagatctgcttcctatctgtagctctttccactgctcacatggccacttgtgttcagcagctggtgactagaccagctctcagttggcagcagcatagcaaatacagactcctgtggacatctagtaatgctgtgatatggatgattgagcccactctgtgctatgcacattacctacatcagctcagtaattttaaaattcaaagcctatgacagatggctgttattatattaatggccttctcaatccctaagataaacttgatttttcacccccataacttacttttctttgtgttttgtatccccatctcagtaaatgctataatcctgtactcagttgctcaagcccataagtttggag

SEQ ID NO: 468656 - DNA, 532 bp, Homo sapiens
cattggtcagagttgacatttgcaatgaagctgcttccctatgcctgctgctctccaagaagacgtcataaccacaagagatctgaatcagcccattttttcccctgtggcactgtgtgctttggctgcctggccagaaagctgggactgtatttacctatcattttgatactatcttggggtgtaattggaattgagctcttagtgtggaaattcttactcagaacacaaaggattgaagagtgcttggaggctgaactctggaaggactcttccctgaggcctcttggcatctggctcttgtttcttggagcggtggcaggggcgcctggaacatgcttgtccaggaaatcttccactcagttctgctgcctccatgtcccagatgatcacagaagcctcctgagaagggttgaatcccccgtcgcctggggatcccaagaaagctgcagaggaaagactttctcttccaagatcagaacaaaggacggttagcattgtgcccagtagtgccaaaaggtgagggagatct

SEQ ID NO: 468657 - DNA, 708 bp, Homo sapiens
agcaccaccccctgctccaggcgccccgtcccatcgaccacccaagggctaaggaatgcgagcgcacggcgcaggactggcaggcagctccacctgcagccccggtgcgggatccactagggattgtaaatacaccaatcagcaccctgtgtttagctcaaggtttgtgagtgcaccaatcgacactctgtatctagctgctctggtgaggacgtgctcaaggtttgtgagtgcaccaatcgacactctgtatctagctgctctggtgaggacgtggagagtctttatgtctagctcaaggattgtaaatacaccaatcggcactctgtatctacctcaaggatggcttgtaattggcttaagccagtcactatgcactggtctttccaaaataagcaaacaatgcaatctaagacaactcagtggaaggagatattggaacctctgagggggtaagagttccacaagacactctctttcctgaagagtggctataaggactagaggtatgacctggttggcagccattttattaccaagagtggggtgcctggggctgccaggaatccactttgtggagaataaaaccagtagagcagagagcagagaaaaaatatggagagaaacaagtccttagttgaaatgagttgagctgttggatcaaattatacataaagtcagatttcaccgtactttcagttaaataaa

SEQ ID NO: 468658 - DNA, 3066 bp, Homo sapiens
gtctgccctcctcagacctcaactgagccttcagccgcccccagaatccctagtgctgactcgggccaggcagcgtcaggagtctcaagaaaacaaaccctggagattggcaggtctgagagcagggcggggggccacaccagtctcgttcaccttctatccccagtgcttagtctttggcacgtggccatggtccctctgaatgagaagcgtctacggatagcagcggcaggactatttgccctgctagtctcccctcctcagacctcaattgagcctttagctgccccagtgaacatcacagtggttcccaggggtgcctctacagcaccttcatgccgtctccagcccagcagtccccagctgctcctgcatgctggaggtggggctgctgggagcctggccagctgtgggagagtaggaagaagtgggtccctgctgacctgtccttccttaagctttgtcctggaccttttccctctgaaccttgctgccgacgaagatggagcacctgcggaagctctgtactccatccagacaaacagtggaagctgcacggatagtcctccccagggctggagctgccagggctcagaggctaccacaacacagaactctgggcctcactacacacgtgtcctggcctcatcctgaagcttctcacttttctaagctatgcattcagcgattcctgcagggggagcactagtccagaaagaaggcccgccatcagctgcccagtcccgggacagtgcagacctggctgtgatctgcctcctttcctcagagccccaccctgtggcaccgtcaagtgaggctcctttgtgatcgctccctcacgagttgtaaagagcggttctcttctctgttcacaacgtggggccatttgccatgcccttcagtcccactgtccacactagtttaggtgtagccctcacctggactcctgacatcctcctaacaggcttcaccccttctgttgtcccctgaaatccattctgtgccagatggctgagtggtcactttaaacccatcagatgtcatcactcttacacttaaaacctgccacgaggctcaccataacacctgcgctccttgtcccagcctccccggctcagtgggccccctctcctccctgcactttccccaggcatgctgacctccctctgttcctcaatcacattgaactcccttctgcacaagaccttggcaccaactctttggtcaccctagaatacacttcccccagatccacatgtggctgcgcagggttcagccccagtgtgaccttctcagggaggcttccttgaccactcaacccaaagtcacagagcatcttttttacatatcacacttgctgaaatgatcttgtttggcattgtctgtgtactcccactggaagacaagctctaggagagtgtgaaccctgtttgtcattttcactgtggggtccccaccttctggagcttgaattcccttctctttagagctctgcgggagctatatctttgtcacggttctgaatcttttcaacaaacacttttgttaggcaggaggtccagcagccccttgcttttggttttcaaaacttaactaagattcacaaattagagctcagatccaatctcagaggacagagaatactccagttgattggcttctctttctttgatgtgaagccctttcatttctcctacctgcctgctgccttgccccacgccatctgcctccaccctccacagacgggcccctggccccagccctactcccttgccacccatccatcaaaggaagacaagatcggctcaggagcccctgagcttatctgaatcaaagaaaactaggaaaagaagatacaaacaacatgcagggaggggaacagggctatcagaggccctggtcacagaagaagtcagccaagaagcgtgccaggtgtctgtgagggcgcgcaaccctgacccagtgactcacagcgtgatggactcactcttggtcaagctttcccctgcatgaacagcacccactgagccagggagactctaggggaaagtcctagagagctatgtcttaacaccagctttgccttgcaatttttaaggtgtctgcatctgtttattcccttgtctctttatctcctctttaaccactgcccccaccccctgccccaggtgatatgagaaagaaaataatagcaatgtgagccagacactgttctgagccttttaaatgcttagaatgtttcattcacacaacaaccctgtaaaatgagaactattattccctttttttcacagaaaactgggcaccggggaagttatgtaacttgcccaagttcgcataattagtaaggagaactggaatttgctcccaggcaatcttattgcagagtgtgtgctcttagccactctaccactttttctctagtaggataatggaggcgaacaagcctgttaactgtgacacccccatgtaagcattcattgtttttcaacctcttcttccctggcttctagcatcctctgtgtctctattcgagtttttctgccctggggcacagaggtgcccaggtggacccctaccttctgggaaccaagcacccagtgcacagcctggcataacaggtgcacaggtgtttatacagctggactccacctaggagggtggttgaggaatgagggaaggaggataaaatggtggaaaagctggaattcatagagattattgatcattctattagtaataaaaaatagctaatgtttactgagttgtaattccatgtcagacatggtttgaagcatttcaggtatcaaatgaaatggttatgctgttgataagggtaagattatatatcagataagttgatatttggaaagcttatgctgtccaatctcacagatggcctccagggatcctcgcctcctggtatccttatccgtgcttagtcccagcccaaactgagtcaggggtgacctgtgtgacgccagtgcatcgtgacttcccccttggtctcttggatcactcactctgagggaagcctgcccccatgcagggaggacacttaggcgg

SEQ ID NO: 468659 - DNA, 591 bp, Homo sapiens
ttaccatcaaaatgtgggcatctcatggcattttattgtctttgagcaagctgttctttccaactggaatgcttctcattccaaattgttgccttcctaaattcaaacttttgcttggccttcaagggcccgatgaaataatttttcttgccaaccccctccccccacgacagctgggagcaaccctcacctctgcttcaatctgtactcttccaggctggctgcctgtactctgcctgccaacgtggggctgtgggggcagcatccctcacaagtctgcagatgtggacctgggcttttgtgaaaaccaacacccagttcctgccatatccccaggctctttccacaggagagaagtggcaggaaggaacgcagccctgacactcaaaggaactcggggcatcctgcctgttcgtgtccacactgcagtaggtttatttacatcagcaccaccccaagtgtgagtaatgtgctattgaatatttagatcatttatgttcattgccaacacgattgcaaaaagcatccttttagccaaagttgtatgcacatttctttgcataaatgaagagaagttaccaggccaaaggg

SEQ ID NO: 468660 - DNA, 940 bp, Homo sapiens
tgaagttaagcatgaccacgggtcttgctttggacatgcaatatgtctgcatgttgggttctggagatgcagcagggaacaagacagactcgttcctgcctctctatcactttcaattcaaaggaaagggaagttgatacagtgaaaatcaaaccaaaccgacagcaaataaaaacaggctctacctctcccccatccaaacctgagccagacttgggaataaatgtgaatgagcatggccatgctgaacttctgcgctcccattcccttccatctgacacacattttctgagcatcttgcaatatgcctacaatgtgcctggctgtgagcttagcgggattctggaagtcagagaatgtgaaatgatgatgatggggatggtggtaataatgatagtgatgatcgtggtagtagtggtggtagtagcgatgatgagggtgatgctgatggtgatggtgatgggtgataatggtgatgatagtgatgatgatggatatggtggtgatgatgctgatggtgatgatgatggttatggtggtgatgatgctgatggtgatgatggtggtgatagtgatggtgaggatgctgatcgtgatgatgatggttatggtggtgatgatgatggttatggtggtaatgatgctgatagtaatgatgatggttatggcagtgacgatgctgatggtaatgatgatggttatggcagtgacgatgctgatggtgatgacgatggtggtagtgatggtgatgatgctgatggtgatgatggtggtgatggtaatgatgattatataatgatgattgtggtgatggtgatgatgatgtttattatagtcatgatggtggtaatggtagtggtggtgatgatgatgatgatggtagtgatgataatgataatggtgatgagagtgaggatagccaagatatattgagcactta

SEQ ID NO: 468661 - DNA, 626 bp, Homo sapiens
tcaatttccatcccacatgcatgtgggggcatagtgacacagctgataagacccccgagggcacctcccactcacccactaatcaaccctctggggaagcatctggaccacaggggatgatcaatgacagagtagttgctcagctccacacccacggtccatctggagagacacccttggattcaagactaaaggcttccaggaaaagtggcgaggctcaaggtcatcgttcaaatttacagagttttggactcaggaaggtgatgctggagatattgtcatgcttctgcaatgctggtagctgtgtcaaagaacatctccggcaacagccatcacatcttgcagccttcaggtcagcttggaaagaagccacagcctcgtttcattcctgcagccctagcaagcgctggaaagctatgaggttgctgaatgccttcttccagcgcatttcaggtcctcccttgcctcctccttctttggcctattccaaagttcaagatcccttccctcaatgctatagcttcagcatagccattgttgacttttatctcaagggaccaattgccactgtcaactcattcagagtggaactgtttggagttctgctttggaaatcataattccct

SEQ ID NO: 468662 - DNA, 763 bp, Homo sapiens
agcagcgcctcatcagccaagcctattttttttccataaacctaaagccatggcaaagggacagcaagactcagccaggatggcagcagactcattggttgctgcccctttgaggaacttttctactttaactcttccctgcctctgccgttcagcatcaaaatgttattctctttttcaggactccctagacaaacaagagaggcgttcactcagcaagaaggcagccaagccaggaagacagccctcaccagaacccaactatgctggccccctgatgtcagacctccagcctctaaatgatgaaaaacaaattcctgttgtttataagccaccaagtctgtggtattttgttatagaagctcagaggaaagaagcttggatccactactccttcctagaagtagcacctgagatgcaaattcttgtcaataagtacaccatagggactatttgtcaattggtgaagtatgaacaaactctgtagattaaatcataatagtgtgtctgtatccatatcattcctcttattttaatagctgttctgcagtaatgtaagagaccatccttgtttttgggaaataaacactgatgtatttaggagtaaggtgacattaaaccttcaactgattctcaaatggcttagaaaaaaataaaagcaggaggataaaaccaatggggtaaagtgttaacatttggggaaactgggtaaggagtatacagaaatttttttgcaacttgtgtacaggcctgaaattatgct

SEQ ID NO: 468663 - DNA, 764 bp, Homo sapiens
tgatgtacagaaatcagaggttactcagtgtgaagacaatgaagatgaagacctttatggtgatccactttcacttaatgaataaaatcctgcctttgttccctagaagcctgctctctaaggactctaaggaagcattcttgctggagtcatctggagccacctatctatgccactctgccccatggggccctacatggagactgaaaagaaaacaaacaaacaaaacccaacaagctgctctgcaaccacaatactcactgctacgtgtgtatccagcttgttcttggacaggctttgcactggacacccaaaacataccacctggggcctgcttggatcaatcctggtacctggaccacttccagagccgaggtcctatttgcagtccagtagttgggcattgcacactgctgtatacaacagctgcttcacacaggactgcagaactgaactgccctcatgttgcttcaccttctgtcttcttcactgtgcactggcttaagaaaatagcagagctttctccaattctccaccaagctgactcaacataaagcaaagtttcaaaaggtttgaaagggaataaaggtgaaagtgaagggaaaattaagctcacaaatgaaaatgaaagataaagtagcctttcttttctctggcctgattaagcttagtactctttcgttgatgaaaagaggatccaacatgaggattttaagcttgtgctgtccatggtggcttcatatctagaaggtatttttaataaa

SEQ ID NO: 468664 - DNA, 1246 bp, Homo sapiens
tcctaccctctgtcagtgtctcccatggagaataatcactgcccagcgtcctccgagtcccacccgaagccatccagcccccggcaggagagcacacgcgtgatccagctgatgcccagccccatcatgcaccctctgatcctgaacccccggcactccgtggatttcaaacagtccaggctctccgaggacgggctgcatagggaagggaagcccatcaacctctctcatcgggaagacctggcttacatgaaccacatcatggtctctgtctccccgcctgaagagcacgccatgcccattgggagaatagcagcattcattgagcacctactgtctgccagagtaataaagcgctgtagaagcaaagcagaaggaaggtgtgttttgactggagggaccaagcaaggctttgcaggggagagagcctgatactgaagtgactgtgctttcgatagtgggaaggaggcctggaggcaggagagaacggacctgttcagggaagggtgagaaatgccccctcctccctgagcccatgacccggcaatacccttcttgtctgtataccctctcgtcttgtttcttgcatggtgtgtgcagcagtacttgacattttgcagataccttttgcttgtttataattctcaggaccgctctttaaggtagctcatgactgcagtattcatcttatgtggaagggtcatttgtacaggggaaaccacagaggaaactgagccccagagaggcaaaggcctttgccaagtgctataatggcatattcaaaagtttttaaatctcccaatatatattttaactaatgcaaccaaatccaaatttaactcattccactgaaaggcattgtttttctccgaagaaggtaggactgaatcatccctaaagttccttccagctctgccagtctgtagtctgacagtcttgattctgtaaccctcccaagaaaacacaagagttttaagcacctttgtttctttgaggatacccctgtgtgtactccactcttctgatgtctttctggactcctcgatccttgtaaaattgattctgtttattggaggtgaaattcattgggtgattcctgtgtacaacgtaaaagttctgtcattaactgaatagccataaaaagcctttaaatctccgtaaagcagctgttagatgagaaaacttagttccttaaagcttttcaaatgagcacagcacaaaaagaaatgaaggtgctgctgaatgt

SEQ ID NO: 468665 - DNA, 839 bp, Homo sapiens
cagtccagttcatagcagcagaagcagtggccgccagggatggggaaacaaggtgggagttgggcagcttgtgtttcatgggtagagtttcaggttgggatgatggcaaagtcctggaaatggctggtggtgacggctgcacagcagtgtaaatgtgcgaatgccactgagctctggaatggaaaagtgatggtgggaatcggaggagccatcttgggctgtgcaacggaacccgtgaagtattgcagagtgaaaaggcagaggcaggctgggccagcaatagcttcacaaagagctgccaaaccaacttgggccttcgtaggaggaagaaatacacttcgatcagcagcagctttagattctcatagcagtgcgaaccctattgtgaactgtgcatgtgagggatctaggttgtgtgctccttatgagaatctaatgtctgatgatctgaagtggaacagtttcatccccaaactatccccacctgaccaccccatccggagaaaaattgtcccatggaagctgtccctggtgccaaaaaaggttggggaccagcagttcacagtagccatctccctatggcggtgagcaataaactcaactttgccttatgaaaaggttctttcactggtgtttgagagaagccggcatttgacaatatatgtcaacctaaacaaacaaaagtattttagggctttgctactcagagtgtggggttggtttaaaatgcagggtctcaggccccacctcagtcccgtagaatcagaatccgcattttcacaagatgcccaggtgactgtgtgcacattgcaggctgtggtcttgggcattattcttct

SEQ ID NO: 468666 - DNA, 795 bp, Homo sapiens
gaccaatattagtaaataacacataaattgtttcaactggctttatttttggaagattatagggagacaaggctcagctcagcactcctggtctgcatgatcaaactccggagcacgggtattaggcccacagctttgttctctagcctctcaaggcctgcaggcatgcagagtgcaagagttgaggcttgggagcctccacctagatttcagaagacgtatagcaaagcctggatatccaggcaggagcctgctccaggggaggagccctcacagagaacctctactagggtcttgcagagcgaaaatctggggttggagcccccacatagagtctccactggagcactgcctagtggagctgtgagaaggtggtcattgtcctccagaccccagaatagtagatccgccggcagcttgaactcaggttctgcaagaccagtaagcactcaacaccaatgccagccaatgagagcagccatgggggctaaactctatagtctcaggggcagagctacccaagtctttgggagaccactccttacactcgcatactttggagaatggcccaaatctagaacactgagcaccaagtactggcgaagatgtggagcaacaggaactctcatggctggtgagaatgccaatgatactgttaccttgtgacattttgtaaccattatagaagagaatgaatggattcttagaaacctaaacatactcttaccatataatccagcaatcacatactttggtatttacccaaagaagttgaaaacagtttagctaaagttc

SEQ ID NO: 468667 - DNA, 477 bp, Homo sapiens
ttgctaaatgaaagaagccagtcaaggaaagaggacctacttggaaaggactgtctttaatttgctgaccgtgggcatctggccttgtaaccaggccactcccagcctacgggcagaacggagctgctgggaggacacaggcagggtgactcagttcccgtgctggaaagaggaacttgggtgtctgctccggaccttgtcatctctgccccggagtggctcctaccagtttcctagcctagaaaatgaggatgataacatttcttcactcatcggattatcaggacttatcagtgcctttaatatatcaatgagcattgtgaatttcttcacttaccggtttgtcatggggaccaaacgactacagacaaacaaagccctcagagcagtgtcagaaacgtggtaagcactcggtaaacagcagctgctgtttttacccaaagactggtagacaaggttactattggcaatgtttat

SEQ ID NO: 468668 - DNA, 672 bp, Homo sapiens
cgccgagacccaggtcgtccagtttgacagcccctaaactcccgaggctgcttttgaccctgaggtacgttgcaggtcctggcagacctggagaagccgccaaaatgtttctcagtcattcttctaaaaatggctttgtccttggctctggggctggccaccgctggataggggcagagaaagcagcctgtggcttcacgctggaatgtcattacccgggctgtggggcgacctcacaggcaggcaagctcgagctgggcagccaaaccagtgccgttgtccaagcagacactggctatcatcgctctgctacgtcacgctgtgtgagtctaccacgtttgtcctgttcacctgctaacagatctgtgggtaattctcaagattatggctgtgacaaagaatcctgttacaaactttccaggatgtggcttttggtgaacacatgtacacatttctatggggcgtaccaggagtggaacagctgggtcacaggaaactgcccaactatcttccaaagcaactgcaccattttacatcccgcctgcaccgtatgagagccctcgtagctccctgtcctcgccagcacctggtacagtcagtccttttcatttcagccatccttgtgggtgtgtaccagtggaaatgattattaaacacccacaataaaaaatc

SEQ ID NO: 468669 - DNA, 1154 bp, Homo sapiens
catccgcttacccaagccagaaatgtcggcgtcctcctcctccacatccagtcgatacccaagctctgccagtgctacttcccaaatattttttggacctaatgctgctaagggctccctctgctctccttggatggttggtcttggaaaccagccaccatgctgtaaggaagcacaagcagccgcctggagaggccacgtggctttgctcaagaggctccggagaagtggcctctgtcctgccaagttatggaatgccaccttattgtggaatggtcccatgcagaacacacaccaccccacggaaacacccactccaggtgggggccagaaatccgttgtcttcagtgacttcctaacccaggccagtgggatggtgaagctattgggcccaaccgctgaggattcaacaagggagattgtgaacgctccaagaacagcaggttccacactgaaactcagtagccactttgaaccaaactgtgtgtgttttcagaagtatttcttcttgctgaagacccgagggactgggctttttgagggtcatttctccagtggatttagcctgcctgggaaaagttttagacaagcagcaggggacaggggaaaatagaatcctggaagatggctcctgttctgtgattgcattttaaaaatctccaaataaattctccgctgtggaaaggtggacatctgttcaattctgcacttaacaaataataagaatttggaaggggtggattttgttatggattcagaattgaaatttcatgctttaattatttttaaaattttaatcattttttattaaaacataacttacacataataaaatgtaccggtttgatgtgtacagttgaatgagttatgacaaatgtatatacacccagctaaccaccaccacaatcaagattccaaatatcgcaatctccccaatcacataattattctgagatttaactacatgattgtgtgtgttaattgtttttttgggttgctgagtactattccattgtatggacatgccgtaattagtttgtttatccatccacctgtcgatgaacatttgggttgtctccagttttaggcaattacgaataaaattgctgtcaacatttgtgtacaggtctttgtgtgaatttgtaagtcttcac

SEQ ID NO: 468670 - DNA, 896 bp, Homo sapiens
gagaagaggggagagctctgtccaacagctgcccctgaggtccttggcaggatttaatttaattccccccaggacatcctgggattccagtgagggcatctggagggaagccgtcacagccggagcgaccgtcactaggggcagcgtccctccggtgccgggagcgcgccaagctggtgttcctgaatgcttggtccaattgtgtgtgtctccgaggccgttgtgtgtgcaggacctcactccagtgacccacactccacttggcggtgtccacatcagcaggacgttcaccagcctgaagagaagtaagtatatcaatgataatagtaatgatcttctccatcactatcatcaccatcaccatcatcaccatcaccatcatcatcaccatcatgatcaccatcaccatcattatcatcaccatcaccaccaccatcatcatcaccatcaccatcaccaccatcatcaccaacaccatcaccaccatcatcatcaccatcaccatcatcactaccatcatgaccaccatcaccatcatcatcacatcatcaccatcatcacaccaccatcaccatcaccatcatcaccatcacattcatcaccaccaccatcaccatcatcatcacaccattaccatcatcaccatcaccatcaccatcatcaccatcacaatcatcactaccatcatgatcaccatcaccatcatcatcacaccatcaccatcatcacaccatcaccatcaccaccatcaccatcatcatcacaatcatcactaccatcatgatcaccatcaccatcatcataccatcaccatcaacatcatcacaccatcaccatcatcaccattaccatcaccatcaccatcaccatcatcatcatcactaccatcatgatca

SEQ ID NO: 468671 - DNA, 553 bp, Homo sapiens
cttggcttttctgtgtgaaaatgcctcatgaagaaagcaagtctatatttccggttgcccacgggtgtcttttaactggcctgtgcaggccaagataggcaaatacatgtgctcctaccatctgtgtcgtgtggtgccttctgggagtgtcctgggcctcatggaagtttgggttcctaaccgccaggaggccagcgggcggcagaccccaccccaggaggagggagcaccagcattccatctccggaccctcagagctggaggggcgatgcccatacagtgtcaactctgcactttctattccaaagacacaggctcagggagaagttgcttctgggggaggagggcccactttcatttagatacttttacaaataagcacccgatgtatccaacatttttggaacttagcaattttggtttagagtgcccagattttccatttgaaataaactgtcatgggacctgccgtggccagtgctcaccttgtactgctggaataatttaacaatttttttcaactgccatcatcatcatgccattttatgtcttc

SEQ ID NO: 468672 - DNA, 1664 bp, Homo sapiens
agcgccaagggtatggtaaataacactggtattgactggttcatgccctggcctccccaagccctccatgcggtcgcaaagtcctttctagggtataatccaatgatcccggcagaaaatatagaaaatgtggtgaagcatgttgtcttggttcaccaatccgtggaccactacagccaacagtttctacagaaattgaggcgcagcaactatgtcactcccaagaactaccttgattttattaacacctattcaaaattgctggatgagaaaactcagtgtaatatagctcagtgcaagcgtctggatgggggactggacaagctgaaggaggccaccatccagctggacgagctgaaccagaagctggccgagcagaagatcgtgctggcggagaagtccgccgcctgcgaggccttgctggaggagatcgccgtcaacaccgctgtagagggtggctctggctgggcccgagtgagcgtaggaagaggcgatgagaggcagaaggaggagatcgcagggagccgatccccgctagggctcaagccaacctttgaggactgcactctgctcagagccggggccgcgagtgcatctcctctgagcccaagctttactcaccccctgtcctaccctgcagccgaggagaagaagaaactggcagaggaaaaggccatggagatagaggagcagaacaaagtcattgccatggagaaggccgaggccgagacgaccctggcagaggtcatgcccatcctggaggccgccaagctggaactgcagaagctggacaagtcggacgtgactgagattagaaggagatcagtcttcctggccccacacacgggtctcgcagccgagaggctccgttcctgggtcagtaatgggcttccattctgggctcccgctggagcggtgcatgttccctgtgcttcctatttctctgcctctgtgctgcctgtgaaggctgagcagcgctccttgtccaagtcgtttgctaagcccccgaagcaggtgcagacggtctgcgaatgcatcctcatcatgaaagggtacaaagagctgaactggaaaacagccaagggcgtgatgtccgacccgaatttcctgcggtctctgatggagattgattttgattcgattacccagagccaagtgaaaaacatcaaagatggtatcggatggaacaggcaactgatggtcaccagaggaaaacagcagccccatgacgtgacccagggagagtggctggggatgcgcggcggcagccgcctcttgaagactcttaataccacaactgaagaaatggaagctgtcagcaaagccgggctggggatgctgaaatttgttgaagctgtaatgggctactgtgatgttttcagagaaatcaagcccaaaagagagaagatgtacatgtacatgactgcatctgaatatactgctttctgcaatctggagattcaatactgccgaaatgactaacgaaaaggcctgtgggccacatgacctaccacatttaagagacactatacaaggatccgatgaattcaggcctggaaggggctttggcaaataactaagccagccctctctttgtaaaaaggaggaaaagtatctgaagtgacttaccaaaggcttgttagcagagatgtctggattaaaat

SEQ ID NO: 468673 - DNA, 1380 bp, Homo sapiens
ggccaggaggaaggggccaggcctgagaggctggtcaaacgccaccatgccttgcagggaagggaggttccacacgccctcggcttcttccagcctgagagccagcagaactgagaccgtgcccttcaaaaagggaagctctgtcagccaccacatcgtgacacttgtctcggaagaaaatgcagatcagcggaatgtgcacaaagacagagatagttactacagcattgagagggacgagaagatgggtgcacgctgcatcaccatcagtccggggctggctgttgaggtggagcctcctggcaggatgctcagcgatgtcacaggcctgggctaccagggagctgctgccccagcccagaatccatacagagccctagctgcaagggatcctggaaacatggtcgttggcttctgctgttcaggaagacggaccaggaagagtgggagacacatgcagcaggcccagccaggtgtctcccactctgccctccagagagctgcctccatgttgagtcttgttcactgtgggaccccaggaccaacagaaaacgtgtttgttgagtgattcaatgagatagccgagtttggaggtgaacccagatctgtcggattcgaatctgtggatcctttccactttaacttgctagagggaccttccccctgggattttagagccctgtcaacttttcacgtgcaatgctgggcttacaataattctggcaggcaccagagaggcctggaggacccttctgagccagggggaccagcagcattcatttttaaaatgagagatccagtatgactggctcggacaggcagaagccagagggaacccaggagggacaaacaagctcagttctaagaccgcaggtcgcacccactctggacaggcctttggggtctgatctccccttggcccaggtctgagcggggcggtttgggccagggctgctttagagttggatgcagcaacagtcaccactgcagtgcaggctctttcaccatctgtgtgtgtgtctgtgcgtgtctgtgccctgggaagaagggaaggggcaggggttggctttccaggcccaagcagaggggcgtcccctgcacctgcccttgtcacatcctcccccagcccccacccagaggcaacctctgctgtcaatttgtcctgtgtcctccccaacctctccctggctcctgccatatgtccctccctgaactgcccactccatccactgttctcacacggggctctttgctgttccaggaatacaccaggcacattcccaccccagggcctttgcactggcccaccttgaaggtggggaattttttccaggagtggctggaatttgatctgataccatggttgaccatgtgaacttg

SEQ ID NO: 468674 - DNA, 905 bp, Homo sapiens
ggcaccgacagtgggcgcgtatggggcagtcagcacgcaggaggggctcttacgccttggcaaggttaaagctagtgtggtaaacctggttttggctaatgggggaatacaaattggggctggaggtggcatctctccagatacgagagacccggcagaacaaaactgggacccccaaatgggacaattgtgaagacttttatgaagagccaattcaaagacatgtgagtggaacaaagaagaaccagttaggagctgtgtgggacccagaggagcttggggagataatggtcatcagagctcagctggaccagcaggacaagaccactgcagacagcacagtggcatccagtgaagactgcagccactgtcagcccacgccaatgaggaaggagatgggcagacacccagtgctcaccttcctctgccttctgatctcctgccagtgcctcccatgggctgaaagccccagaaaccagacagcaaaagagtccatgctgtgctccatgcaggcacagggcagagtgaaccagacagcaaggcagtccatgctgtgctccatgcaggtcagcctctcaggcacagggcagagtggagaaggcatctggaggcacaaatggggagtcccctccagatgcctctgggaagctgcagtgattccctctggcgacgtggagctatcctcatcactaaggtttctggaactaaaagagcagtatccatggccccaaagtccatcgacttgtaaggtcagccaagtcagcgttggctaagactgatttttaatgtggatactctacttcttggcactcagaaccacctgtttcaaaaaaggaggacgatatgcaatgaagaattggaaaaggaagcatattacgttagtgattgtgactagtgtgacagga

SEQ ID NO: 468675 - DNA, 1146 bp, Homo sapiens
agatgggatggcggctgggcagagacgctcctcactttccagactgggcagccaggcagaggggctcctcacgtcccagactatgggcggccaggcagagacgctcctcacttcccagatgggcctgtctgtgtctgtcctctgcaaagccatgtggctctacctggcggttttcgtgggcctgtactaccttctgcactggtaccgggagaggcaggtgctgagccacctgagagataagtatgtgttcatcacgggctgtgactctggcttcgggaaactgctggccagacagctggatgcacgaggcttgcgggtgctggctgcatgtctgacggagaaaggagccgagcagctgaggggccagacttcagacaggctggagacggtgaccctggatgttaccaagacagagagcgttgctgcagccgcccagtgggtgaaggagtgcgtgagagacaaaggactctggggcctggtgaataatgctggcatctccttgcccacggctcccaatgagttgctcaccaagcaggacttcgtgaccatactggacgtgaacttgttgggggtgattgatgtgactctgagcctgctgcccttagtgaggagggccaggggccgtgtggtcaacgtctccagtgtcatgggccgggtgtcactttttggtggaggctactgcatctccaagtatggcgtggaagccttctctgactccctcaggagggaactctcctactttggggtgaaggtggctatgattgaacctggctatttcaagactgctgtgaccagtaaggagagattcttaaagagcttcctggagatttgggaccggtccagtccagaggtcaaggaggcctatggcgagaagtttgttgcagactctgaacaaatggagcagaagtgcacacaggatctgtcgttggtgaccaactgcatggagcatgcgctgattgcctgccacccccgtactcgctactcagctggctgggatgccaagcttctctacctccccatgagctacatgcccaccttcctggtggatgccattatgtactgggtctctccaagcccggccaaggctctatgaagctaaggttggatgcatggttgcatggatttggggtgtgctatgaggggtgg

SEQ ID NO: 468676 - DNA, 1129 bp, Homo sapiens
gctttattgctcacacaaagcctgtttggtgatctcttcacacggacgtgtggaaagggagagagcagccgtggtgttggtgacattacagcagtcgcagtaatggtagcccccatgctgctgcccaactcatacctcgcacacctctattgtggttcaatgcctggtcctagtccacaagaccaacgggtgcacctaagtccactccattcgaaagaagttgattataaacctagctcagccgccaaatcgactgtttctgtgcacatgtgctccaacttgaccttctcttctgttatggtggatgaactgccttcatattcggtcagtcgtcaacgacttctaaaaacttgccctggaaagcatcaatgggcagccacggaggacgctgccacagagcatgagtcaattttctcaaaacaccatgggatgcctggcattttagatggagaccagcggcaattcctggccaaacatctgtcttgggaaactccaggatcagggtgacagtccttacgtttatgctgccagtactgattattttcagcaaatatcagtgttgatatttgggggattttattctactaatgtaatcaacttcatggattactaatctttgtcctccataaattgaatacattggaatacagatgcaattcacttatgctccaaaatcacaaaattgaacatagtcatgatttaattaatattttaatagcagtcacaagcaacatttgatctctttttggttctgttataaatgatttctaaactgtgttttctgcaagtaaggttcatgaaacacctgcctcagaattggctatcaaattgatccatatacctttttgggaaataggcaccgtcatatgtacattgctgatggagataaaatattgcacaatccctagtaaggggaatttaacagtatctatcaaactacacataacaacatgcccataaatgtgtgaatttaaagaattatcactttttcagtcttcgtcgattttttttttccattttagcatctgtattccttttgcttctgacttgaactagtaaccattagtgactataaacaatatgtgagaatttaaatattaaaaactttaaaatactaatgctactcttt

SEQ ID NO: 468677 - DNA, 511 bp, Homo sapiens
aggtaattccaaaattctatccagacagctgcttcgggataacggagaacatgtctccattaagggccaatggcaggtcaaaagctgttttccaaaaggaaagtagctatctacagaggatggcaggtgattctcctaagggggcctaccaaaggctttacacacatccctatttgccactgacatttcagacaccattggatctgctgaatcatatggctcaagtggcagagaagcttgcacagcagcttggacctctagcaaagctttcttttgttctgggacccactcaaaacaagcagcttttaaggttacttgggcaactgatccagaagagagagagagagcaaggaggatgccacaatgccttttattatttagtgttgcccatcactgactgtccctctgccacattccgttcataaaagccagtcaataagtaaagccaacccttatgaggaggagaatttaactacacttttcaaaggagtttgtcaaagatcagatggtc

SEQ ID NO: 468678 - DNA, 1229 bp, Homo sapiens
agcacctccctgactgcagctggcaccatggcagtggccactcctgataggccaccactagcaagcaaaaaccaaatgcacttatttagatgtgggaatgagacaaccagatgggataggctcccccgaaaaactccaactagccagcgcagtcgggtggagccacagagctttgagctatttgcagcagggaggagcctggcccttcctcttgctgtgtggaatccggaattccagtggctggaaataatagcaaacagaagaaagaagtggaagaacccacttaaggctcagaacgaacaatttcttctaagaatcctacatccagataatactactccaaaaataaaaactgaattaataccatgtaaacagacactattagaatttgttgctagcagatttaccttacaagaaatactaaaggaacttctttagcctgaaataaaataacactatcccataaattaaattaatagaaagatacaaagaatatcagaaatgttaaatatgtggattgcttaagtatggggaagattgcataggctgaaaaggagacaaaagaataatcgtgaactggcacaaaggctagtttagatgatggtaatcttctgaaacaggattgtagtaatggttgtacccctatatatattttctgaaatcaatgatttgtgtacttaagtgaaagataaattttatggtaactaatttatatctcaataaagctatttaaaaattaatcaatgcagtccatgatatttacagaataaagaagaaaacacaagtgattatgctaaagatgcataaaggcatttgacataatttaatattcattaatgataaaatatctaagcaattgaagaaactaagaaaacatccttaacctggcaaacagcagaaacagatttctctgatgtcatattacaatgtggaacatcttttcttatccttatttgccatctgtatatcttctatgatgaggtgtctgttgtggtctttggtccatttttaaaattaggttattttagtattgttgagttttaagaggtttttacatattttggaaaagagttctttatcagatgtatcttctgcaaatatattcttccagactgtggcttatctttaccttgctttggcagtgtcttataagaaaagaaatttttaattttaatgaagttcagtttatcaattaatttttcatagatcatgtttttggtgttgaatct

SEQ ID NO: 468679 - DNA, 1335 bp, Homo sapiens
tgtgctttatatctatctaaaaaattgcctttgtaagtaaggttctgtggcatggtggtgagaaacttgttgaagggctttgaccaaaatgctgatagtgatagggacaatgaagtccaggctgatgtggtcttagatggagatgaggaactgttgggaactggagaagaggcatctcttgctatgtctggatgtccacccagaattttggtgcaggggcagagtccacctggagaacctctgctagggcagtgcagaagggaaatgtggggtcggattcccccacacagaagccccactggagcaatgcctagtggagctgattttgttatctatttgggatccccagagattccatatgaatggatgaagttttgctctgtccccaagctggaatgcagtggtgcaatcttggttcactgcaacctctgcctcccaggttcaagcgattctcctgtctcagcctcctgagtagctgggattacaggtgcatgccaccatgcccagctaatttttatatttttagtagagactgggtttcaccatgttggccaggctggtctcgaactcccgacctcaggtgatccgactgcctcagcctcccaaagtgctgggattacaagcatgagccactgcgcccagacttaatgatcattctttaacagccctttcttgatttgtgtgtttgtatgtgtgtgtgtgtgtgcgtgggtgtgaatgtaatgcatgtagtggaggtgtttcttatatattatttttccttttccttttttcttatgtctattactactccattttataacatttatattctatattagcaaaattgttatctcaaatttaatgtttgtaaggttcttgtcactaaccaatctatctttatagtttctctgtcagcagtttttttttataacagagttatttacttttttattcatgcttcttttcattcatcatcttttggtgtgtttctctctgtagtggatatcatgtttgctcatcgtttgaaatgtcttgttatatataacatttgtaagaaacatgttgaaattttatgctcacattttcaagctgcatttcaagctctttctcttggtctgtaataatcaatttataaggttatttcattcacaaactaaacttaaaaaattctgatatggcatgcttgttcatttgtatgtctggattctggtcatacttactctttatttttatttgtacacataaattatacttcatgaatatatattttcattcattaagaataaataaaacattaataaatcagcattctcttactttcaaaggacattgctattgattgccattatttat

SEQ ID NO: 468680 - DNA, 814 bp, Homo sapiens
ttttgtttgtttgtttttgagactgacctcaggacatggtgccctgcatcctggctgcttcagctccagcctttgctagatgccaaagtaccactcaggctcagtccattgctttagagggtgcaagccccaagcctttgcagctcacgtgtggtcttgggcctgcaggcacacagaagtcaagaattgagaatggtagatccacctacaacttgcaccaggcacctggaaaagccacaaatactcaacaccagcccatgaaagcagccaagatggggcttgtaccctgcaaagccacaggagtgcagctgcccaaggctgtgggaacctacctcttgcatcagcatgacctggatggaatggttgtagcaggtctcaggcaagacccagtggctgtgctggcttcaggtctgacccagcacaatcatagcagtgacgatcacaggggtgcttgtgtcactccactctcagctttaggtggctcagaatggagtgggaggctctgtcactgttatacatatgttgataagctttatggtatcccgcaattctcttaggttcttccatttttctaaattcttctcaattttgctttcagactagataatttcaaataaactaatttaaaattttctggtgattcttcttgctcaaatctgctgtagacactcacaaactagtttttcattcatgtcattgtacttagcccctccataattactgttttgtcactttatataagttctgtttctttatcaatatactctatttattgagacattgttctcatggtcctttagctctttgttcatgg

SEQ ID NO: 468681 - DNA, 704 bp, Homo sapiens
gtagatggatgccctacattgaggatggccctcaacatgaacttcctgggttccaccctcacaaacaatttacttctaaaaggtcccacttcccagtgctatcacattagaacttcagcatataaatttggaggaaacacaagcattcattccatggtacaccccttctgcttgtggaaccaaggggtgggctctaaatgcaaatgtatgaatccttataagatggcaaaagaggctgtagagggagatttgacagtacacaacagaggagaaggcaaagtgaagagagattccaatatgctggccttgaagattgaactttgccctggaaaaactctgtccctggatcaacttaactattcgcctctctgcttgtcctctactgaattactgatcactgccagacaaaattcacacaggcttctgggccgttactgcaagttcacaatggatacttgtactgatttcagtgttgctacttagaagcccaacgtcatttcagatttcagtgttgctatttagaagcccatgacaaaaacatgttagtttgtaacatgtttttgtctctctggatgctttcataatctcatctttgtccttggtattctaaatttttatgatgacctgccttggtggagatctttttaatttgatttttcttctaatgggtgggtacttttagccttgatactataaacttctaa

SEQ ID NO: 468682 - DNA, 1916 bp, Homo sapiens
gaaaaccagtcaggcgtgagagctcaagagatgggtgttcaggtggtccccaagtcatttgacagggaaccaacgtgctcaatgcagatccacagagaaaaggagaatcaagatctaaaggacaagtatgaacaaaagtcaggggagtctcatccagcctggctcctcagcagtgagcacagatatgcagttgtcccactgctaaactgggtggggttcctggcagtggtggtggtgcgctacagactgactgatcttcagcccttaagtgacacacatgggcaccaaatgtggacccaggtagaccagtcctcaggtccagggttgtgtgcctatatgccaacagtgatggtagtgggccccagtcaggttctgagaattagaaatatcacttttacatgggtgccaacagtggtggtagcaggccccaagtgggacagtccatgttcagttcccttggctgtgttatataaagaatttccaatttcttctgggctcacagcaattgtgagaagtaggcagtcatcagtatctgggctcatcatggattggctggtatagaaaatacaaaacaaaatttaaaataaccctttctgaatctgtcagaccttgaactccatttaaagttagacagagtcatgtgattttaagttctgggtttgcaaaaagtttatcaacaaagataaatcttaggaaattaaaacaagctgtccagaactttagcagttaaactttaccagtgtaatttggtggctttgcaacttttcccacagtaacctttagaatgtgaaaggtggaaggtaaggatgaggaagaagagggagtaagaaacaaaagatgtctatgttgaagaagtatccttaggatattctgatacatggtaatgaccctccatgactctggtacctcatcattaccaatgtgagaattattaacttgatctaatattcttcacaactaatatacctgagagaaataagtctatttaatttttaattttggggggaatatacacattttcttttgacttttagcaatagtgaattggttagacacttttctttaacaatatatgaatcattaatacatcatcaacaatatagtcatctggagtttgtcatattttcttatattcttggcactttttttgttcttaggcatttctggctgttattcaagtctgatcttaatattactgattcagttttggggaatataaattctgatatttccttctttgatttctgttactcttccatcttcttaactttcctcattcacatttcacttagattatgcagtttgaatcttggagtcgggtctgttggggccagttatttaactactcttattctcagcatttacactagaaatgaaaggatgagaactatgttatagggcttctgcaggattacacaaatagacagtaagatgccagcacagtatcaaacatagttggtcttaagtatataatatattagctttattttcaatcactaactcaattacaaggcagaaataagcatattcttttttggaaaaaaaaattctaagataatcagaaaatacattatagtagggcataccatcctggttttaatgctttgcatttgtttttatttacttttggataaagaaagcagatgagggttaggtttattgataatttcattatttataataatagcaaaattaagatttatttggcatttaaaggatacattgccaagtacttttatgtcatgtatcttaattactatgattaataataaaaactaaatgtgcaaggcactttacaaattacttttgtttaaattatctcattctactcttaaaataacctatgaactcattatataaactgcgtggcattaagtctttattttatcaaaatgacaaaaccatgtctcagagct

SEQ ID NO: 468683 - DNA, 776 bp, Homo sapiens
gccgcagtcactcaatgccagtctgtgaaagcagctgcaggagtggtaccctgcagagccacagggatggagctgcccaaggccttgggagcccacccctttcatcagtgtgacctggatggaacagcactttgccccttggtggaggggatgtgtttcactggtgggaaacccacttctctgggctgcccagattcctcagaactaccaggaggaaaggctaagtctgctggtccgcatagactgcagccaccacttcccctaggggctcaggccaagggagatccaggttctgtccctgagcctctggctggagttattgaagttccttcagggacgccacacccagcagttgtgagtcccagtgctggctgctgcccttccctcaaggagttcaaagggcctagacagcacgcagctgcagctgtggtgctggttgacactccccacgattgtcttgagatttacccagttgcctgcaattcacagggctccacaacaggggctcaggagtctggggtactgcagggaactggggatttgttgggcctaaccaaggcagtcagtcagtgtgcagccccgcactcgaggtccaggagggaacgatgcttgatatcaggacgcaagccgcctccagcccaagcagcccctctagatattttataatgtattttagcactttggaaatagatatgcctttgccgctcagttttttaaagtttactttctttttttacattaaaaggaaatatttcatataaatatacataagtaca

SEQ ID NO: 468684 - DNA, 694 bp, Homo sapiens
cggggtgaggccatagcttctttacttatgtcattttttttctttgagtatgctcagcgcgtgccatcatggggccatgttcttcccctttgctcttggagaatagacaaagctacccagcccagccacagcctcataatcttgttctacctccctctccagcctcaactatttccaggctccagctcaagtcatacatcagcccgaagatccagtggcggggagtgggggtgctgagttggcaaagtaaacagctcagcaatgtcaacttgtcccaggttccattcatctctctgcatggccatcctcctcagaatggcttcttccttagactagtggtcccctgttggtggggaattgaaaaggagcatttcctgcctttcctaagtccctccacagtctatgggccctatgctcacacagacccccatggaaacccacccacagtctgcactcccccgttcccagctgcacagacagatcaacatgcagaaacagatgcacacaatgatgccaaactcaggttccaaccacgtatcaagaaagatgagaaattctgaaatagtatcctgaatctgctatgcatgggtttttcaaaagaaataatacttttttttcacaattattgaaatcttttatttgctttaagactttagaagctttgagaggtgaggaagaaagattcttggaggtg

SEQ ID NO: 468685 - DNA, 758 bp, Homo sapiens
aaagtcaggccatctccttccctgaagtcaggccatattctcctctactgactgagtctgggaactttataggcacaggatggggagtgtgtgctgattggttttgaacattctctggctctcagcatgcagtgtacagaccaggagcacactggccagcagatgtcaggagttcctcatggaaacctaggctctgggctccggactgaattccgtgggagagtaacaataaacagctggcctgtgaagcccctctcctcaaggccaaatctccctcacatgaccccaagatacgatcaggtgggggaccacaggtttcctaggctcgtaaagacatttagcatccccccaaaacctgggcagccaaaacagaacactgactcttttgaccctgaatctccaggtgatggaaaacattctttgcactcgcatcttttcacggtagcgcactcaggctcccctcagagtgtatgggcccgacgctgtccaagaaaacccacgactgccaaccctcatcccagccagggaaattgaaatgcttgttccaaaatttcccagcatttctgttgaatctcctctttttaaaaaatatatttatagtgtttctacagcttgccttttcctactggtatttttgttccaacagttatattgaggtattatcgacaaacaaaaactgatattttttatgtgtgcagtgtgatattttgatattcatgtgcgttgtgaaatgaccatagtcaagctaattattggtg

SEQ ID NO: 468686 - DNA, 769 bp, Homo sapiens
cgcggtgggcgagggctctggtgtctcattatgcagatgctgagacgtgttacagattggttgttcaagaagaaaagtgagatcatttaccaaaatggaaataagacagaaaaagcctggcagcggcccctcctggctgcccactctgccctcacctccctgggctacacccacatgctctccaggagagcacagcgtgtccaggagcccacagttcctgggataattgccatgcagaggccctggctgctgggcctttctgagaagttattaaaaaagagaacactttgctggcttctgggttcagatggtttatgtcaattacattatcttcagaggaaagaaaaggatgaaacaaacaaaaacaaatcaaaaggcacctttagcacatggctctattcacagcaggaaaaatctcccctagaatgttcaccttgctcttctccagtcaccttccaggaacacgaccatatcttccccacacgactcctgctcttctttctcgcctcgactttaatatcatgtctttatttttaatagtttcttaaagttttattgaggcataattgacaaaattgtatgcatataaggcctgaacatctcccaggaagggaatgacagagcgagaactggacacaactgcctgcagaagccgccttctcaggaagctgtccccctctatggctggactaacctgggcccatctccatggtctcccaatcccttcttttgccagtaggttcagagatggagctgtcattagctttgc

SEQ ID NO: 468687 - DNA, 510 bp, Homo sapiens
gtgtgtgtttttccatccaacagaattatggcagcagcaagtaagaaggtaatgatcctgagaatcagcacccaagaccagtggtcagtccagcaggaaagagataaaggtggcatgggacaagcgccaccctcacctctggggaccatcccccagacaccaagcagtggcatgcgtcttgcatggggctgtttaaggggtctgtataatgcacaactccagacgcgtccctcctttgcttttgggaaagctgtcagatttaaaatactcactctgtcaaaccctgacaaaatgaagccagggaaaaccatgagaggagccccttatgcatatttgcctgataatgagaaccatctcaggagaccgccagaaaccacagccctgcaccaaggccactgcaaccttagacacaacattgacaccttatagctgtcggtgagacccaaacttagctctccttctgaggcccttcggggactagtactgatcatcttgtgtttttatcacccg

SEQ ID NO: 468688 - DNA, 729 bp, Homo sapiens
gaccgtccatcaaccacctcacttctcagtcaggaaaccaagaaatgtaacaggatgagctgcagacaaaacccctcagacaccaggttaaagaaggaagaggctttattcagccgggaggttggcagacttgcatctcaagaactgagctccctgaagaaagaattcctggcccttttaaaagcttacaaccctgagggggagccaagaggctggcaaggcattcttcacagaaagcttattccagaacaagacgcacagcgtggggggaagtttccagagagccacccagaggacaggaggcccacggtgctggactcacctgcacgcctgcagagcaaaggggatgtctccacatcccacactgtcaagtttgttgagctcctttcttgttttatgaatgggagtggtgactttaaaatgattcacatgttggaggtgaaaccagcagtcttggatgttgcattcataactgagcaagctcactgggattggaaagcagattctgaagatgaaacctagttgttggcctttttaaaaagcaatgttaggctagattaatcatttgcaaatggtattctgccattttatcttagttcatactatattttatgttttttgttggcaataacatttctgaaataatttttataatatgtaaaatttatatacagaagagaaataaatgaaatcttctcttggtggtttttagggtcagaaaattctatt

SEQ ID NO: 468689 - DNA, 658 bp, Homo sapiens
cagcctggatgacagagcaagaccgtatttcaaaaggagaaggaggaagaggaagaggaggaggaggagaaggagaaggagaagaaggagaaggggaagagaaacaaaacaagaatcattttctggaacagacccttctgcagcaagattatgtgaaagctgtagagacttcaggccagcagccctcccggaagactcaagatgaaaagggcactgacttttgttatgataatgtcagagtgtcttgtggacatcaaggacagggaattagccacccctcccttaaggacaagctggaaccaacgcttttatttctgcttctctctgatagagaaaagctctgtttctcagtgcatgtctcagccaatgaccaccaactttcccaagcttatatcccttcttttcaagaagaaagctaagacagagactcgatgcctaaatttcattcctgcagcatagagttgaataatgttgttgttgttgccaatatttgccttttcactggaagggactccctttagtgtttaaaacagggcaaatctgctggtaatgcatcctctcaggtttttgtttatctgagaatctcttatttccccttcattttggaatatctcttttccccttcatttgctaaatatggacttattggttgacatat

SEQ ID NO: 468690 - DNA, 745 bp, Homo sapiens
cagcgagtgcagctagagctggagccggaagccgggcagcaccatatgctgggctttcaccagataatcaactcccaatcccttctggggcaccaggaagacctggaagaagattattccaagcagagagcagcaattgcagaaccctgttgtgcttccatttcatcctccattatggcccccaggaaaaatagatggacatggaaagtgaccagtgaccacgccagagacaaaatcaaggatattggtgctagattggatgtgaacagtggagaacataaaggcattagggacaatccccaagattctggcttgtacagtggaacatatggagatgccattcaaggtgaccatatgggtgtccagactctccctgcggattcagagcttcgacagggagctgagccagatcaagggctggaggatctctgtggcctccaacagaagaggcctggagcacagcccgggcgtttcggaagagcttgatggttacctttcattccccgtttcccaattgtgtttttcttagattagccatttgttttctacttgcaaaagtcaacacaagtttcctgagtgccttacaagtatggacccatgaatatctagtatatgctttgagttataatacaagatgtttttatttagctggtcaatatttcttttttaaatgattgcagctttggccacagggagctctttcacttagcccctgtctccctttcacatatttccatcaatgtac

SEQ ID NO: 468691 - DNA, 744 bp, Homo sapiens
cgggataggggagtgtgtgctaactggtttgcgagtatgcaaaaaaggttaaagccaccagtcagaggtggacagagtgtaaaggcagttagtgtagatatatgtgaaataggtgaagggtggggatccatccaaggaaagcacaccaaacaggaagacgggttctcaatccagtctgtcctctcgccgttgtctgactccatcctggctgagaagacggtgattgtcctggatgaccgagtcgccatcgtggagctgggagtgcagctcgtagctggcatgtctctctccctgcagccacaccgagcagacaaaagggccatcgtctccacagccgctgccctggatgttcttctgtccccacagcaggtgagcattccaggggccctgcgtccctggttcgcgatgaagaaaagagtcaagtttacttcctacaccagcatcctctgaggggacagtgggccatatacaactctgtcctgtttgacagtgatgatatcatcaagtgggtctgccaaggtacacttcagtgtctgttgtttccttctttgcattcataagttcttatcatttagctcccacttctaagtgagagcatgcagtatttggttgtctgttcctgcattagtttgctaaggatgataacctccagaaatcttttgtatatgaattggacaagaagttttatttaacatgtgagtgtacaataaaaaagtactagtttataaatgatttttagataaa

SEQ ID NO: 468692 - DNA, 915 bp, Homo sapiens
gttccttggacctttgcccagcgggatatggattcctggatggctgaccctagctgtgtatattatatttcatgggtgatttgtgcaggcttagagtttgtcagaataaccccaggacctaggagagatggtagagtaacacttaatgttgttcttagttttgttcctgtctctgccagaaagacactcaatgagtgccagatggagaagcgtctctgtttcccaggcaaagaccaaaactgtatcctgaggtttgagtttctgagccaggtgatgtcatcctccagcttggccggcctctttctgggagcctctggtgtgaaagagagcagatttattaaaaatcatcaacttcaaattatttggatggaaacattgccaaatcatagagatgtttgctaccacccgcacaccaagcagctgggtaactagaagtgcaggatcagcttattcacctccgaaagcctgcatgcaaccactgaggccgcctctattttttacatagttctacttggtgtatgtaaccccacagagaaacctggaagaatgcatgaaacctagtaaggcaaccagcacatgcaacagaatgaaccgtttctttccatctgaatgcctaaatgtggactctgatcctttctaccaagtcctaagtttgggaaaagaggacaaggacaggggctctgtcccatatcataatgtgcttgtgaatggctaaaattacaatgctgagataagtgtgtgtaataaaataattgcaccccgaattgaagaatgtttcactgtttattttcatgtttcaatatatgacaccctgtggtggaaagatgtctttatgctggaatatgaactcttttcactgctgaatttattttatttattgtattgtgttttattttattcccatctttattgaag

SEQ ID NO: 468693 - DNA, 767 bp, Homo sapiens
aactgcctcttctggaagactaactgaggagaaggggcatctctggagcataagggaggcttgcagggtccttgctctgtgcaaagcccctcccagccagccagtttccctttagagccctcctgattaatcactcactcatcaatctcctctcgctgaagacaccagccattttggattggggttccatacatctgcaatggccctaggagagtcaagatttcaacctatgggttttggcaggggacacatttcaacctgtaacacaagtgctcagcacgttttcccaggtggcttgtgtcctgcctttccaccccctttcccatctcccacttatttccagcctccagcacctctaccatggatgttctgccttccagttggtctcctggcatgtcctatcagctcctttaatctagtggccgtattgcacctcataggatctttccaaattgcagatctgatcctctcccatctccacctgtcctttggtctccctcagtcttgtaactcctccttggcttcccactgtccttgggataaaaacttcaaatccttagctatgtgtgcttctgcaggctcatctttcactgtgttctaccacctgcctccaatggtcctgccattctccgaaggcctctgtcatttcttttgcacatgctcttctacctggaacactgccctcttcaccagcctctgcctggcatcctccaggcactgactgtttctcctaggggagctgggaacatgtctgctttttatcttcc

SEQ ID NO: 468694 - DNA, 559 bp, Homo sapiens
tcgggatagaatacacccagcaccgatagacgtggcttccagaatgggatctctgtcgaggttccagcttctggggaaggcacagtctgcacacgcctcagacaacagatccgactcatttccactcattgaatccctgcaccgtgcaccaccaccgaggatcccagccaatattatgcatttcacagtgtgtcttgccatgttgccagctggaaatctccacagctggtgtgcctctcccgggctttgcttggctcttgagcttgctactgggctcgctctacccactcggcctggtgggctgtgcttggctcctgttaccagcctcaatttcacacccactgtggctcagtgctcagcccgtggctgggccaggtgtgctgagatctgcttccaccttggtgctggagtctggaggaggggaaagtggtggcaccccaaaactcagagatgccagcaactcgcctggtaagtcccaaagtctgagccccctccaagaactgttacgactctctccccttcccaccacccacagcaacaaactggggggcatgttacc

SEQ ID NO: 468695 - DNA, 1339 bp, Homo sapiens
cggcttaagactggacattgtgaccaaaaacactcctcaaaatgcctacaggagagatgctgcgtctggagtctcctgcttggcattggagcaatgatagggtccctgtggagaagtcgctgcatcctcacaaaggtgctggcaggcatcaggatgtcagcctgcaggtgatgagaccccaacaagcagaagcagaaccaagtaccctggggctgggaggagtggttgtgatggtggtagtgatggtggaggtgatgctgctgctggagatggtggtggtggtgttagcgatagtggaggtgcttgatgacggtggtggtgattatagtaaaggtgctgatgtggatggaggtgatggtgtaggtgatgatgttgctggtggtgctagtggaagtgatgatggtggtggtgtaatgatgttgctggtggtgctagtggaagtgaatgatgttggtggaggtgatggtgatggggttggtagtgatagtgaaagaattgacagtagaggtgatagtggaggtgataatggtggtgtaagtgataatggtggtggtggtgtagtggagatgatgatagtggaagtgatggtggtggagaggatggtggtggtgttcatactggaggtggtgatggagacagtgaaggtaatgatgatggtggtggtgatgattgtggaggtgatggtaatggaggtggtgttgatagtgaaagtggtgataatagttgaggtgacagtgcaggtgatgatggtggtggtggtgatagtggaggtgatgatagttttggagatgatagtggaagtgatggtggtggtggtgatagtggtgatgatggtagtgatactggaggtgatgatggtggtggtggtgatagtggtgatgatgatggtagtggtgataatggaggtgatggtggtgatagtggaggtgatgatgatggtggtggtggtgatagtggtgatgatgatggtagtggtgataatggaggtgatgatggtggtggtggtgatagtggtgatgatggcagtggtgatagtggaggtgatgatggtggtggtggtggtgatactgaaagtgatgatgatgttagaggtgatcatccaggcatccttgttgtaaccatataatcttgtgtgattcgacatgtataggtttatatttgcatgaaaaacatgactcaaatattcagacattttgttcttgagtgacacagttagggcagtttccatgatactctattttgtttacattttctatttttcttgttcctaaaatgattttctaatacgccgtttaaagctgttatggaattgtaccactcagatttcaagaatttttgc

SEQ ID NO: 468696 - DNA, 870 bp, Homo sapiens
cacccacagtgccagcagtcagatcccagatttctttgtacaatgacatggctctctcctaaatcgaatttttctgcaataaacactatggaaagcaggcttgaaaagatacccatgcaaagacacatcctcaaaatagatcccatcactagatctattcatcaagcctgtttcaatggtgtgcatgtttccctgctattggcctcttcaaccccagaaaaggtcatgaactatatccctccagctgcccggcttgttacaacacaattccgaaatcttgagctccacaccccatctgtcccaacggcacctgcagtcctcaagggtatatcacagcccgaagaaaaacccaaacagaataaacatggaaaagctggtcggaaggtagggggtctattgagaagttcaggaagatcttggtcagggaaatcatcttctccaactaacttgccaagcctgattcctgattttacctttcactatataacatacctacccactctttatacccaagtgtcttacccaggggtgaagaactgaaacatcttcctgaaccagcctctgtcaccactgtcctcctggcagcatcctgaattgcgaagagccaccccgccccccagacattcagtgacctagactcagacctctggggaaggacacagtctccaggctcagccagtaggcaggggactgtgacagaaagggacatgtggccaagtccctctggtgagatacaaacctggactttggccaaacctggtgagaaagaggtttaatctcaaaatcaatctcgctcttcctttccacccccagctccctttccccactccctgccttctgctgtggttgttaagctgatagaacgtaaag

SEQ ID NO: 468697 - DNA, 619 bp, Homo sapiens
caaactgggacgatttgcgcaccttaattcgatgagctgatgccgtcatatcaacgcacactttacctagcatgcataagcctagagtcagcagtctctggccgcattacttgcaccacagcactggagaatttgagatgggaagaggtcaaaatcatgaccccagagcagccagtacaaatcagtcccactaatggagtcccactaatgacaccatttatgaggaaagagactccaagtgcagtgctcagcacacagaaagaccgtcctaatctgcactggctgcagctctgttctactctaatgaacacagtcatggaagacgggtgcaaagacaagatctctgctcctgtttcctgtgctccagccaagctggcctctgagctgagcttgggagataccagaagcaagaatttaagcttcagtcactcatattacctggggcaagaaaatgtttggaattttgtattttggcaaatgtttttgtcttgcctgtgttcagacaagattgtgggatgatctcaccgttgtcttaatccatcatggtcacaaagagggcttctgtgatatcaatattctgtgaaaattattcctattttataagaggacagcaaggcct

SEQ ID NO: 468698 - DNA, 558 bp, Homo sapiens
tttcaagttgacaaaccaacacagatgatggttatcacctttgttttggagcggggggataacagctcaagggtcttctcagcttccagagtcccctcctgcccatgcagagaatatgatgtaaacatggctgagattgtaggagcttatctgtttctgtccaatactgtactggagctgacatctgaaatgacacttctcccctttatgggagaaggacttggcggggacaagatggccattacaggtgtttctgccaaggaagacgaagctcaggtcacattcatcatggctgaactccaggtcacctgtggtgcagagaaagtggctggctcagatgtccaggccttactgcagtgctgtgttgagcagacagacatggctgtgagtctctgggcttgtgccctggcccagtcattgcctaggcaactccctccccacgggcacctggcctctctccactttactttctgaacctgtaaaatgggtaggaggatggaggatggtacgtcctacctcatagagctcatgagaggattggtacagatgaaagcactc

SEQ ID NO: 468699 - DNA, 588 bp, Homo sapiens
gtgtgtgtttttccatccaacagaattatggcagcagcaagtaagaaggtaatgatcctgagaatcagcacccaagaccagtggtcagtccagcaggaaagagataaaggtggcatgggacaagcgccaccctcacctctggggaccatcccccagacaccaagcagtggcatgcgtcttgcatggggctgtttaaggggtctgtataatgcacaactccagacgcgtccctcctttgcttttgggaaagctgtcagatttaaaatactcactctgtcaaaccctgacaaaatgaagccagggaaaaccatgagaggagccccttatgcatatttgcctgataatgagaaccatctcaggagaccgccagaaaccacagccctgcaccaaggccactgcaaccttagacacaacgcatgttttgcattgcaaggccctgctattcctgattaaactcaaaatcttcagtgcctctctttgtttgttatttagattgacaccttatagctgtcggtgagacccaaacttagctctccttctgaggcccttcggggactagtactgatcatcttgtgtttttatcacccg

SEQ ID NO: 468700 - DNA, 530 bp, Homo sapiens
tcccgctgctctcctcactttgagtcaggaaagctgctccctgcctcgtccacccgcgttggcatgtgttactacaaagaagatgccctccattccagacctcagtggatgagaatagcaaatgtgtattctcaagctctcaggaatacaacaaataatgcaatcagaagtaagcagggttacaggcccggggctgctacagatgcagtagtgacaggaggcctcttctgcactgggggcaaggataaggaggagctggacagggagaagccagagatgacaggtagagcaggagctccaagacaggcagcaatgtgttataatctctgtgggccctttgcctcatcacgtggggcagctgccctccatcagcaaggacaaacaaccagtgtgacagccctttttggggacccaaatacttgtccagtgcccaagaagaatgaggtcatgcagatgaatcgaaagatggtgaatatggagaattttcttgagtgatacaagtgactctcagtggagaggagagctggaaa

SEQ ID NO: 468701 - DNA, 1061 bp, Homo sapiens
gtacaccccttttttttttttttttttttttttttttttttttttttttttttttttttttttgaggcagagtctcactctatctcatgagacttattcattacccggagaaccgtatgggggaaaccacccccacgattcaattatctcccaccaggtccctcccacaacacgtaggaattatgggagtgacctcaagggggctaagggacttcgagattggcatgtatgccctgctctacgtcttcttcccggccattctggtcttcttgatcaactgcgtggcattttcctggaaatacagacacaaaaggtttgctgtgagtcagcagggcaacgttccccattcccacaactgggtctggcttgggaatgaagtgggacttttggagaaccgtgttgacattacactcccatctgaggagtgcacaaccatgatagacaggggcctgcagttcgaggagaggaacttccttctcaacggcagtttccagaagacttttcatagtcaactatttagacttgttgactatgtctatgagaaagaaattaaaaatgaacctatgaattcttcaggcccaaagaggaagagagtcaagttcacttcctacatcaccatcctcccagaggacggcagcccgtacaccaactccatcctgtttgacagcgataacatcaagtgcgacgtgtactgagattgaaaagcaacaactatgctcaataaagtcatgcaaatgagtggatcaggaaaaatatgaatgagctctcaagctcaagaggcagttgtcaagaacacaggggactggaaaaataactgtcaaaaaaaaaacacagaaattactcaaatcccaaaagtttttaaaatagaaattattgttgaaataatagtattatattgttgatattaagcacatataatattaagcaaatgaagatttttagaataagaaaatgagacagtattttaatttattaagatgggatggctagaagagcagatattgggctagtaaggcctcagtgtgtgttctattgagacattggcatatttaataaataga

SEQ ID NO: 468702 - DNA, 751 bp, Homo sapiens
cagctgcttcctccactttctcctcctccaggaagccttccctgaccacagcagaccatgatggtctttcccttctctcacttccacgctctgaccccacagttgggctaccttgatgctgaacatcccctgaagcaacaggactgcatgagcttgccagccaggcacctgacagtaatcaaaatctgtaaagaacaggatgtggagcctcctctgcttgttcagcacgaacattttgtggtgggtgctgcaaagatgactcagacacagtctccaccccaggtcactcatagtctagtgcagtacaccaaagctgtgaaagctaaagggcagaccattggcccatccagggagagtggtagaagagggagcatttatttgaatagctgtgatgctaccagtctgaaaaaaggggaagaaacaatgatgccttcttggaggagaacactagctggctcagaaaactgtttcattacccacccattgtttacaacattggtgtacccaaagcaaccaatggaacaaagaattggacaaaacgcacaaacaaagcaagaaggaatgaagggttttattgaaaatgaaagtacactccacagtgtgggagtgggcctgagcagaggggctcaaaggccccattgtagaattttggggagtttaaatatccccaagaacctgaacaacctctgccgttaacatattttggtgacccgggaaggaggaagagtctttcaatggctgtctcctagta

SEQ ID NO: 468703 - DNA, 725 bp, Homo sapiens
agaatttaaatctctctctctctctctcgtctctcaagaatggttgaagaggctctgcgtggccgtctgcaagctgagaagccaggaagccagtccaagtcccaaaacctcaaaaactgggaagccgacagtgcagccttcagtctgcggccaaaggcccgagagcccctggcaaaccacgggtccacactggcagctgattggatggtgcccatccagattgagggtgggtccgcctctcccagtccactgactcaaatgtcagcctcttttggtgacaccctcacagacacacccaggaacaatactttgcgtccttcagtccaatcaagttcacactcagtattcaccatcagacactgtggatggggtttacagaagagctgggagtctggagatttgggtccatctagtctgggctccatgatgagaaatcttcatggagtcattcctactgcgcaaaaagagttttaaactcgttggccgctttggtatcatctatctgtgaattagaatcagaagggagagaggaagagttagtttaatgacactctctcaattattgatacaaatagaaaataaacaaaagtataacaaacttgaacaactcaattaaattggactcaaatgatcgttattggaccctccacctaacaagatcagcgcacatattcttctcaagtactcatgaatcatttcccaatatagaacatattctggcccgt

SEQ ID NO: 468704 - DNA, 578 bp, Homo sapiens
ctgccacttgctagtttgtctgtgtgtcatccttcagtcttgcaatttccttaccctcatatccaatgctggaacaagttttattattccagccactaaatgccctcctctctccacctaatttccaccaccctactccttgctcacctattcttatgcttggactattgcaaatccagcatggttcctggaacagggaagctgctgatatcacacgtatttgtggaggcaaatgctggctgcctaaaaacactttatatttactcatggccatgaaactgtctctggccaatgaaataatagaagcccactgtggatctcacggtgccgaaatcaaagagtcgtcagggttgtactctttcttggaggctccagggcggacgcgttttcctttccttcttcagcttccagaggttccagagatgaagatgtggacatctttgaggaggagacgggaccattccacctatgacaagcagccaacactttcgaggtaactctcaacgaagaggaaacgcaattccatggaccaacgtcccagacgtctatccttaaggggagaatgtctgaggagtgct

SEQ ID NO: 468705 - DNA, 566 bp, Homo sapiens
gaatctgcctctcccagaagattgggaaactttgaagccagaagcaatgctgcgttaatggctgtgttgctaggttccaacacaaggactattgcaagggcagtggaggagcaggctgcagccaacacacatggcccctttctgtgcatctgggagacaccttattgtcctaaaggacagcatcaggccaagacacccagctcggactgcacagggcagccaagatgccagacccactgtcccaatccacccacatttgtgcagtgtacagctgctgctagaggcctgcagcttggtgtagagagtggaatattaacagacagtggagcagacacctgcaagtatgattctgaaacatttttcccccagataaaaagaggcaccctaaaagaacattcctccttatcctcctccttcctgttttggacctggttgggtgagaaagcattgcctggagctgcagcagccttcttgagaccatgagaagactaatctaatctttagattagtctaaattagattagtctaatttaatctttagattagactgacagaagcaaagttgg

SEQ ID NO: 468706 - DNA, 692 bp, Homo sapiens
tgctgcctctcataaggggttgaagcaatgggtttgaaagaagctggcagggctagcccagatcagcttgagggcttcacttggcagcaggtatgtgctgggccccagctgagtgagcagtactgcagagtcgacgccccttgggacagccctcggccagtgacaaacaggagcgggaggacgtgtgccctgcttcctcacccctcgggcgacagttcagagttgtgccctgcaccttctcatggaagggctcagcgggattgggtcccagttgctcacagcagtaaatggctcataaatatactttacgtcatcgtgaatttgtgtcccaaatggactctggatgctcaaggtctggcttcagcatctatttccaggggatctcagccgaagatgttactgtctaaacgtttaataaagttcccgaaatcatgaaatacttggggtaaagaagtgtttgtgtatgtgtctgtgtgtctgtgtgtgcatatgtgtgtttgttaatctgtgtgtttgtgtgtgtgcatgtgtgtgtatgtatgtgtgcatatgtgtgtatgtgtttgtgtgtgtgtgtgcatgtgtgtttgtgtgcgtatttgtgtgtgtctgtgtgtatgtattgtgtgtatatgtgtgtctgtgtgtgtttgcatatttgtgtgtatttatgtgtgtctgtgtgtatatgc

SEQ ID NO: 468707 - DNA, 779 bp, Homo sapiens
cagtgggaggcaattgtctcatggcggcaagtctttcctgtgctgttctcctgataggagagggagaatgaccctgcacctgggtactgagaagacattccaaccaaccatcaggtttgatatctcagtctgggatggaatgccatccaattgtttggaaacttccattttgtgtgtgcttcgtggcttcatccctctggacaactgtctaaattacagaatgagaatgaaggcagtagggagcttggtggacacccctctccctcttgccccggtggacactgaggttttgaacactgccattctcactggaaagcctgtttcagttcctgtcaaagtcgtgagggtccaggaggatggttctgtggtctatgtgtctgagtctgtggaatgcaagtctgccaatgaagatgtcattaagtctgtggaattttcactcatgtcagttcaggaaatgccgagcaatccccaaggaggatactccacagatagcaaggatcttatggagcttctgcaagaaaagtgtggactgaggaaattctgtggattgggatatagggaagggagaaagtgtgaatttggaaaaatgaaaactgtggtgatatgaagagaatatcagcatttgtgaactcaaaagtatctgagacagatctcaatcaatttagaaagtttattttgccaaagttagggatgctcccagtgcctaaggttggcgaggtggaaatctacagagaggctgagcactgataaataaattataattaactagtttaaatgtc

SEQ ID NO: 468708 - DNA, 1398 bp, Homo sapiens
atgcaaacagcaggttgcataagagccttgctggctttttttttttttttttttttttttagagatttcgtagtttcctggcgaggcgctccatcggactcactagccgcactcatgaatcggcaccatctgcaggatcactttctggaaatagacaagaagaactgctgtgtgttccgagatgacttcattgtcaaggtgttgccgccggtgttggggctggagtttatcttcgggcttctgggcaatggccttgccctgtggattttctgtttccacctcaagtcctggaaatccagccggattttcctgttcaacctggcagtggctgactttctactgatcatctgcctgcccttcctgatggacaactatgtgaggcgttgggactggaagtttggggacatcccttgccggctgatgctcttcatgttggctatgaaccgccagggcagcatcatcttcctcacggtggtggcggtagacaggtatttccgggtggtccatccccaccacgccctgaacaagatctccaatcggacagcagccatcatctcttgccttctgtggggcatcactattggcctgacagtccacctcctgaagaagaagatgccgatccagaatggcggtgcaaatttgtgcagcagcttcagcatctgccataccttccagtggcacgaagccatgttcctcctggagttcttcctgcccctgggcatcatcctgttctgctcagccagaattatctggagcctgcggcagagacaaatggaccggcatgccaagatcaagagagccatcaccttcatcatggtggtggccatcgtctttgtcatctgcttccttcccagcgtggttgtgcggatccgcatcttctggctcctgcacacttcgggcacgcagaattgtgaagtgtaccgctcggtggacctggcgttctttatcactctcagcttcacctacatgaacagcatgctggaccccgtggtgtactacttctccagcccatcctttcccaacttcttctccactttgatcaaccgctgcctccagaggaagatgacaggtgagccagataataaccgcagcacgagcgtcgagctcacaggggaccccaacaaaaccagaggcgctccagaggcgttaatggccaactccggttgtattctaaggtttggggtgaacatagctgttgggaaccagaactcaaccgactatagtgaggaacaatgtggccagcatgatgagcgtggggcctgccatatagtgaggttgtgatcctctttcagacaaaagtaatgaaagacttgagatgaagatcatactatatttaaatgaaaaagtttctaaacagaatatgatatccattttcttttaaaatatgtgtatctgtgt

SEQ ID NO: 468709 - DNA, 1497 bp, Homo sapiens
gcatctgtgtctaggatgagaggacacttcctgcttttctgcttgttagtgccattaccctgacccactgcccagacctcaggctgcctcttccctgcggcagtactccccagacagacccccaccccggcctggctggtccctgagggtctgtgcgtcttctcgggactgctgatttgttcttgcagttgacctggagctaaaattcacaatgcgaacctccacatgctgctctgtctgtccgaaatacgctgccagatttgacctaaccctcttgttagcgtgtacaattacctttgtggtatcagctcagagagttgggagaaaaagttatgcccaagacagcttgaccatccattttgccaaaactagtccatccctgggggatgagcagagaagggagagacagagatggctgtgtgggctccagccccacctgccgtcctgcccacggagcactgggaattggctttgggaaaatggcagaacaagcacctgcagtcttagatcattctttcctggatcacagcctgcctaccaacagccaggctgccctgaggaaccatctgaagatgggaaaactctctcaaacttcacagagcaaatgcaggcaagaaaagagggcccaggcctctctcaactgtcttgtgaactgattacaaaaggcaaacttagaaattgaagtttgtttatggtgcatttaacatgcactggaaagaagtgaaaagggctataatgtgttttaactttgttgtatgttttgcgtatagaacttttacattttaagtcaaattgataatcttttcctttaggttttgttttttgttttatttggagtagaaagttggaaaactagttagctatacatatatatatatatatatatatatatagagagagagagagagagagagagagagagagagagttgaaaagcatgtatcccttacccagcaattctacttctacagatatattctagagaaactcctgtacaagtacacaggcaaacacatacaaaggtgctctttgcagtatttttttaacagtaaagaaattgaaaatgatctaaatgtcactgaatggggaaatgagtaaataaattgaagcatattatagaatgctcttacaatggcagggcaaagactgttaacccatcaccaaacctgtttcctattttgcggtaaatcgtttcacattgattaagtcagttgatgaatttcactcattcagtgaaattcagtgaatggctattaggttttaagtactgtgccatgtaccatggataaggcaagaagctcatagcttagccatctttgtactttactagccaaaatatgatgttgaagcttatttaggcttatcattaattagatcattttagcagttggtttggtcttgaagtcaattattaaattattagtattcaaattgatgttaaattcttttaccaagtatagagtaaattcttgttttctgttcaaccttggcttctcc

SEQ ID NO: 468710 - DNA, 716 bp, Homo sapiens
taaacaaagttggggcagggatatggcttcctgagagctgatctgtagtgactgttatctctcttctggatctagccacccagcaaatctacaaggctccaggctggtactgggggttgtctgcagagagtcctgtgatgtaaaccatctgtggatctctcagccatggatgccagcacctgttctggtggaggtggcaggggaggaaaatgtgctctgttgtcatggaagtggggaaaagctggcagtcacaggcctcactaagctcccacacaacccaaagggctggtttcactcccactgtggcccaccccctacaacagcaccaagtctgttttcaggcagtgggcgaacagggctgagaacttgccccaggctacccacttaccagctgcaaaaccaagtaggacgtttgttcttcccaggcctgtggagtctgcacactgaattcatatctttctccaagtcctggccaggagacttctcaatcagttcaaactgttacaaagttcagctagaggtttcctgctccctgtggcctttttccagtgcctctgactgccccccgccccaaggaccctgtgaggcagggcagaaatggcttgccaggggacccagtgagtccacagggcttttcccgctgcttcctctaccctgtattttgtttggctctctaaattgattcaactccaggtaaggtcagaattttctgccat

SEQ ID NO: 468711 - DNA, 538 bp, Homo sapiens
aaaccacatcaagcaacaactttgcagcagggagactgtaacaattccaggtgtcaacttcagatgcaacacaacaatatccagaagaggatggcattgtctttctttgtgtcacaaaggatggctaaacccgtccccaaagcccccagcaagctttcttctcataagagttatgtcacaaagaggcacctaagccaatctctgaataaggtggtcaggaaagacctcaatgagaaagtggcatttcagcacagagctgaaggaggtgagggagcagaccatgagttatctcaggaaagagccttccaggcagggagaacagcaggtgcaaaggccctgaggctacttcagtgtgcttgtccttggagagagcaagggaagggagagccagggagactgttcaagggagccaccaggctcgagaaagaggaacccctgaagacagtagaaagtgcaggtgccaagaatttgaatatctacatcagagtttctcaatgtgcacacagtgaactaccagtttaggatcatttgatttgct

SEQ ID NO: 468712 - DNA, 1019 bp, Homo sapiens
ataatggtaaaaggatggctactacataccaagcactatcatgggagacatatattgtttcacttagttctcacaacaaccctttggccagcattcatcctttaatgttcgtgcccgtctccttagtgcttgatagaaaggatgcacttcttatgttagcaatgcttgtggagcctttgtggtcattctcagacatgcacagagtggggaaaaacattgagtcacctggaatccacgttcagctgaggttgaaccagcaatcctggaatcagggcactacgggtaaccacattctcactttacaaatgataactcacacaccccatggaagatccgggaagtcttctgatgcccctgctttccaagacaatatgatgcttctctacattccatggactatgacaagtatatcagtcgtcgaagtgggtggtttaatggcatgattagctccattttctcttcctgcagcatagcaaagtgcataaagcttgagctctgtgtccagcagatctttattagaattccagtccccccacagttacatatgctctctccctgacagttttcacagatgaatcatccagactccatttcctattagagctggaccctccacttggacttttgacacttagacccctctagcccacacagggacatcagtgcaataattctcccctttctacagcatcattaaattttgcctctctcctggatcatcccattcacatattcatatgctgttatttctcccatctaaaactgaccaggcactgtggctcatgtctataatcctagcactttgggaggccaaggctggcagatcacttgaggctaggagtttgagaccagcctggccaacatgacaaaaccccatctctactaaaaatacaaaaattagcagggtgtgctgcactccagcttgggcgacagagcaagacactgtctcaaaataaataaataattaattaaaaataaaattactttctcctgatcccatatttcctatgattaaaatg

SEQ ID NO: 468713 - DNA, 967 bp, Homo sapiens
cggagagctgaggtttgcaaggcttctttcctgtgatctttttggagacaggccttctacacacgtcgctgttctatcacaatggttctgtgcctggtgcctgtgggcgccgcaggcagccttttggaaatggaagcactctcccctgcctgccctccactctcttgcacatcttcacctgaacaaggagaaagggaggagagtgatgccttggcacgggaggaaggcatattctgcaatcttctgtgcataccagttgtcgtggaagagctgaagtgctacgtgacaaattccagaggagctgcttcccaccattgcttcaagaatgggaatgaaacgttaaaaaacagtggctgtcacaatggtggaaatcaactttctgattgccgaattcctgcatatttcaccaggaaaagggattcaactatggaatatatgtttaatgctgcagacagcagcaacacatatggtatatgcattgctcttaagtgtgagccaccaagcctggttcctacaattgttaataagagcaataaaggaaaaatacaggaagacgtgaacctgtattatgtgaacatcaaatttcaaaagagatggtcaaagaagcctatctgagacgtgacatttaagttgagttagccaatggacagtactggaatttctagacagaaatatattttttaaagaaatattaaagtaaaactcttctacatcttctattgtttcagtccactttggagctgactttaaattatttgactgtgtatgaagcctagtgattataaactgcctaataaacactagatactcaataaatatttgctgtggaatttcatgagttgtcttactgaaaaaaaggtattaaaatactcattttttaccagaacaatttatggatactttatatctttccacttgctggtgaaaaagctctgcctcttttgctcaggaagtactgttattttac

SEQ ID NO: 468714 - DNA, 695 bp, Homo sapiens
aaggacaaggacaactatcttgatgggcttggacaaactggggcggggcagctcatgtttccggagccaggagaacaaatggtttctgcaagtgatcaaattattctcccttcaaaaagttcattgtaactgggagagtgactacagcaagatggtggaatgggaatttccaatgctcttcctctcacagaaacatcaatctgaacaaccattcacatataaaaataccttcacaagagctaaggaattcaggacagtggttacagcagatgggtggaacacagaaataagaaaagatacattgaagaggtctgccccagagaaccctagtgccaggctgaaacctgtggccccaggctccaggcccaccccaattcccagccagtccccacaactccaggctctagacagcccccacagacccaggttccaggacatctccaacaacccaggtgccaggctggcctctgtggatccaggcaccaggcccacctgcccattgacccatgcaccaagccacagtccaaggattccagcagcatgtgcctatggatgcaaggatagttcaacaagttgaaatcaataaatgtaatgtaccacattgccaggaggaggataaaaaacatgataatcttaacagatgcagaaaaagcatgatttgacaaaactcaacatgttttcatgattaaaaaaaa

SEQ ID NO: 468715 - DNA, 1298 bp, Homo sapiens
ggcccggctccgcgcctgccctgggcccccgccccgccgcccccgcgggctccggccggccggccggccgtcccgcggtcctccgagcccgcgcgtcctggccgtcccgcccgccgtccgccgtccgccgtccgcccggccctcgccccctcccgagctgtccagcgcagccgccctctaccccggatccagaagtcccctccccgctggctcccggactccccgccttaaaggcacaagctccttttgtctgggcatccccctccccctccccagaagtgggggccgagttgcccactccccttcctagcagcggggtaggggcggaggaggccaaataatgggacccctccctccgcgcgccccctcctctcctccggccgcttcctcccccagtcctgggaagacaagcagctactgttctgggatcaagaccccgcggggaggggacctcgcagcccggtccccttcccttcaccccggccgcctcctccggcattcctctcccgccctcaccccgggggtccccgagcgcgcccgcaaacccacccctcacggctacatcccccgccccgcccaccgagggtcgccttccttcctgtcagggtcccaggggttgggccggcgccccgcgcccactcttcatccccaattcctccctgcccctgccccaccccagcccccacctagccattcccgccctgcctgtcacggccctgcgccctcccgcgggaactcagtttaataattaattaagctctcattccacaaggcgccagttatttccagcacggagcagctgcccaagttacctgggagatgggaaaatcgtgtgaaagctggttaaccctttgaggattagagtaatggtggaagcagaaaggagaaggagtttcactccaggatgtacgtaggaccagccctccctgcagtcctgtccttcaagactcaagtcttgtccactccaaatcaccactgggattcctaagtccaggacagagcttcaggcaaggaaaagaagagttgggaaagccagtttccaacatttatcagccacgtgtacctgcaaactatataccttgggtaaatcatcaatctcttgaaatgggaataaaaccatctgccttgtctttcttacagggttttcagaatcagatagagaaatgtttgttataatgtttgaaaatgggaaagtggtactttctcatttctcagttgtgcaggcctggcctgcaatttgatctttggggcctctttgcctgacttctcacttcaaaatttccttaaaaattgttttt

SEQ ID NO: 468716 - DNA, 614 bp, Homo sapiens
ctcggagacagtggggggaagatgagaagcgggggaagtgagagaactgccgcttctactagtggccactgtgccctggggtggtctctactgtggggcaaaatgattgcttgcttttcttttagtgtagcccccttccctctgcacttgctctttggatgcagcattaaaaaaagcagcagcagcgacagcaacagcagcgacagcaacagcagcagaaatgatgaaatccatcagagaaggaggcagctgcaggagcagcaaggcagtgatagtgccaattggggaatgatttctgtaacacggaggaagttgttcagctggaaaatcccgttgtcactactgccatcagcagttttttccattaaaggcctgggtgttcaaattactctcacactgaaccaagcagatccctgtgtcagagagagcaaaaggtacatgcaagagaaaaggtggaaaggtagcggaggagaatccttggaaggcagcacagaaaaaccatccttggaaggtttctctacatgagaaagagtaggtttggcatggagaaaaatgaagaaagatattcaagggaagttgaaatagtttcatttcttgtaaccaataagatggat

SEQ ID NO: 468717 - DNA, 732 bp, Homo sapiens
taggcttttagaagcagccagaccaaatcttgagtggtttgctgcttagaattttcttctgccagataccatagatcatcaatctcagattcaaagtttcacagatccttagagcaggggcaaaatgctgccaggttatttgttaacacataacaaaagtgacctttgctccagttcccaccctccacactcttccaacctctgctcattaaccagttccaaagtcacttccacattttcagagatcaaagcgggaccccagggtcctaacccaggccagggtagaaagactgttgatttagcccttagaggtcacactgtgtccagagttggttccttccagcaggcttttggtcttgctgacttcaagaatgaagccgcagaccttcacaaaaagttctccaagtcccgactcgacccagaaatccagctggcttcacctctcaacactcttgatagctcatcccaatgctgcaagaacaagaggctcttctccaacctgcacaagggaggggcgctctcctcctctagaaaaggcagttgcatccatagcagcacatacggaatagggacaactgtcttctgggtaaagacgtccaggagagaagttgactccaagcccaaagcaggaattttaccaggaaccaaggtcaaattcattggttggcaagggcagtgcttctaactttataatcataagcattggctcagagtgtagacttcagaagtttc

SEQ ID NO: 468718 - DNA, 870 bp, Homo sapiens
ccatcttggaacctctccaacaatgattcttattatcccttttgccattttgcacagtgagagagaagacaaaagcctgactggactgtccaacaaccctcaggttcaggcactgctctttgttctgttcctggtgatttacctcttgactctactggggaacctgctgatggtgctggtgatcagtactgattcccacctctgcacccctatgtacttcttcctgagacaactctccttcctggatgctttctattcctcaattattgtgcctaaactgctagagaaccttctttctaagggggagacaatatccttccttgagtgtttcactcagatctccctggtcatattttctggagctactgaggcttgcctcctctcggtcatggcctatgaccggtttcaggccatgtgtcatccactgttgtatgtggtgattataaacaggagggtgtgtgctggcctggtgggggcatcctgggccataggaatggggactggcctaattaacaccctcctcctggctcagcagcacttctgcggccctaatgtcatccacagttttgcctgcgagcttcctccggtgctcttattgacctgttctgacccctgcgctagcatcgtctccattctcactaccatgtcagtcctgggccttggcacccttgtccttttgctgggttcctacagctgtatcatcatgacagccctgaggatcaactctgctacaggtcggagcaagatcttttccacctgctcttcccatttccttgtggtcaccatcttttatacttcaggagttctcaggtatgtcatactatacccctgaatataaatgcgggatattccttaccctaagtggtctcc

SEQ ID NO: 468719 - DNA, 522 bp, Homo sapiens
tgatcaattaaaaaaaaaaaaaggaagtggaaaagcagcagcagctgttagatcctaaatccacctttttacagcccagctccgggtgcttaggcatgtcgacatccttcttggccaccatgactctccttaaaaaggagttcataaatggcaacccagttcttcttaggtatcaacatctcagcggctataggatccagggccagggctggcagtttcttataaaaccaaatatccacctactgtgttacccagccatgaatggatccagtgactgttggaactgtgggttgtctcccttgggagaaagtgaattagaagccccagaggatccagagaatttggataccttacccacctgtggtctcattgtctcttctatggatgtgctgcaaagaaagaatgatataaacctgatgaggagcacagaatgtgggctaaagccttctcctaactctattctatcactcctagcaggaattcttgaagtttctatactaaaaatccaggaagggtagccac

SEQ ID NO: 468720 - DNA, 1677 bp, Homo sapiens
ccgggatccatgcagccagcaatgatgatgttttccagtaaatactgggcacggagagggttttccctggattcagcagtgcccgaagagcatcagctacttggcagctcaacacttatgaatgacatgtatgggaaaaatctaattacggaggattctggaaccctaactaatattttgttttattatgcttcgacattcctgaagctaaataaacctaactctggcaaaaatgacgacaaaggcaacaagggaagcagcaaacgtgaagctgctaccgaaagtggcaagacagcagttgttttctccttgaagaatgaagttggtggattgatgctcgtgtttccacaggaaaaacgtgtcaacatggttcatattgaatccaggaaatctcggcgaagaagttctgaggttgaaatctttgtggactgtgagtgtgggaaaacagaattcaatgagctcattcagttgctgaaatttcaaaccactattgtgacgctgaatcctccagagaacatttggacagaggaagaaggcaagggtggtcttagcttgtcggagctagaggatgtgccctggttccctcggaagatctctgagttagacaaatgctctcacagagttctcatgtatggttctgagcttgatgctgaccacccaggatttaaggacaatgtctatcgacagagaagaaagtattttgtggatgtggccatgggttataaatataccacccccgctagccccatgtcccagtgtttcctgattaaattgccaagagaggactcggatgggctgagctcacattttcacctcaggccctgatgatggttaaatacagagaaagatggagtatggatattttggggttgtaataggggttagcaggatatagtttgagttgtctaaaggtaaggagaaggcaaagaaatgaaatacagaataatatatattgaaaccacaaccaagaagccctctgggggattcgtgttgaatactatattttctgtgatattcttgaaaggataaatcaggggggaagaataaacacaagcagagaaaaatgaaaaaattccactctatgatgaaaaaacagcaggctcaaagtctgtattaccatgaacccgaaagaggagagggggcgggaaagcgccggcatgctaactgtcgatagatgccactcaggcgagcttctgattgacagtgctgctgagaaacatgattgattacccagaggcccacagcagcctgcagacatgagtgtgggaaggcctaattgcctcaccaataatagcgcaggaaacactcattagtgcaaatatcattcttcatagaagatctgagaatgaacgccctgtatcgagaggacactttctaaaatcatctgtgctttcttgaataagaaggaaaggggataaattacaaatagctctctggaaattatgccaaattcagggtatatttattgaggagtgcaacaaaggcatctgaaaaatcaagaaggaacaagagaccactagccttgatgttcccataatctttcttcaaaggccctgtctaaatctttttttttttaaaggattctgtggttttattgattcaacaccataagttacactttagaaattaaggtatagtttacatacagtaaaattatacatattttattatacttta

SEQ ID NO: 468721 - DNA, 1270 bp, Homo sapiens
aacccataacaaattcaaagaaatacaacacattctgattttcctcatgactatgatttttttctcaaatgtcaaatttcaaagtcctaaaaaaatggtggagtatactgaagaagaaactaaaacttggggtgttgtattccgggagctctccaaactctatcccactcatgcttgccgagagtatttgaaaaacttccctctgctgactaaatactgtggctacagagaggacaatgtgcctcaactcgaagatgtctccatgtttctgaaagaaaggtctggcttcacggtgaggccggtggctggatacctgagcccacgagactttctggcaggactggcctacagagtgttccactgtacccagtacatccggcatggctcagatcccctctacaccccagaaccagacacatgccatgaactcttgggacatgttccactacttgcggatcctaagtttgctcagttttcacaagaaataggtctggcgtctctgggagcatcagatgaagatgttcagaaactagccacgtaccttccgcatgtcaggcaggatgatagagagcaggaattcaacaacaacaacaacaacaacaataacaacaacaacaacaaaagtcagaccctcttcctgattccaggaagctcagggtctggtggagaggacaggcaggaagactggcagtttctgtgtggattcgtatgggctacactggggaagggaggagggccacctaacctgccagatggacacgaatcagacgaaggggctcggcaatgacaagagcattccaagcagagagaacacagtctcaaatgcaggctggaaaggcttctagtaaattggtggctgaagaggaggaatgatgcaaacaggaggagcatcaagagagtttattcaaaggctcaagcaaacacagcttggagctggggatactcttaaaatgtcttatctctatgtccactttctatgcattgtattcacaaacatacacctttcttggtgtacttgtgtttgggaccatattatacatagtgttcctttactagcattttaaaacttagagttatttccatatcaaattgtgtacagattggcaatatggcccgtacaagcactgtttggggtgctgttgttacagaaacacaactgatgtctcctaggggtggtaagacaacaggataagtggtaagttgaaaagtttctctgcttatgtatcattggaatgacccagccctgctctcaactcttcctttatgattc

SEQ ID NO: 468722 - DNA, 1738 bp, Homo sapiens
actagagctgagtgctaagtttacctaaaggaatatgataatagtgacatctgtcacccctttctttgactaggaaagggaattccctgaccccttgcgcttcccggatgaggtgatgcctcgccctgcttcggctcatgctcggtgcactgcacccactgtcctacacccactgtccgacattccccaatttctggtacaagaagttcatgacaacacttggagttgttgcaggatatatcttgaagttttcttctagtagcagaaagaacagatataatttcacagacctccccttatccactcctgctgaaagcaagacctgccaggataagcattctgtacagcgatcataccaccctggtggagaaagaatacccaaggtgtataggaagggcaggccccaaaagaaagagaatcaacaaaagcctggattctatatgtccaaagatgctcttctcagcctcaccagtcagatagatcctgttcagggaaggaagtgtaggaagagggtaaagagaagatacacttccttcccaatactcttgaaacagggaaaatgtccagttttatgggccaaagcaggagtctggggctggcgagaggcttattttctccatattgtcttggaaccagtgttgtaagacaatgttatgggggaataggaattaggagtctgtaaagagaaataatatgggcagaggaggggagatatcaaacagttggcagaaaatgaggaaaaagtagctacctgacatttctatccccatgaggcttgccccttcttcttagtatgggttctgtgagagtcccccaactctttataacaaacttctattacttaacttggatgaaaactctcctctttaaccaagccatccctaagacactaactaacctttactaaaactttattatgtgctcaacactgtgttatgtacccgataatcttgagttaatttggtgaaaggctgatttgttgtaatgaatgtaattaaagatttgatatttaaaaggtttagcattttaatagccccctttgccccaatatagactcccagaaattgcacagaatgtgataaggagcacttagtaaaatcttctctcgaacactagttcatgtgtggagaattattaaacgctttctttagataagatataattccccagaattgctgtgaatacatttgtcatagttctaacgtttatttgacattataaaatggtcaagtacagacaaaaagatcatgatattaggtttagccatatgacattttcatttttttaataggtcaaaatagtcgaatattggtaatttcatatgcatcaacttcattaagcaccataatagtgttaatggctttgtgtatctgagagatgagggcttcttcatgcagagtttggagtctagtctaagttttagtttagagtctagtctagactaaagcatacagaagtggtgcccaaaccccagttaaaactttgcacagtttgtctgtgcaaaatgagagaaataatgacagtataaaggattttttcaacagttaaatgtcttcaattttaaaatcctgatattatgggatttgggctgataaaatatatatttctttgtaaagtgatgttatagtagatggtacttttaaaatctactcactcaaaaataaaaaccagtggaaagtgtatatcagccttcaaatttgttcttgaatttttactaatctgtaaaatacaaatgttt

SEQ ID NO: 468723 - DNA, 653 bp, Homo sapiens
ggacacaatttcactgaagaagcaagctgctcatgagtcactgttggaagtgtctcagcactgtcgctggtgctggtgccgtgctgagcatctcagaccattctgctgccccctccataactgtcccacattttagcgcttgggctttactaggcctgtgccatctgggcgtatatgtgcaggtcacaggggatgcgatggcttggcttgggctcagaggcctgacagtgcaccctatccatgacctacttgccagtgatgggaagcacatggcctttggtttcctaaataactatccatccacatcttggttaaggactgttcctagtgcctttagtaatcaatggatggtagccttactcaacagcttcttaaaaagccaaagatcatttactatatttggaaaaattcaatggatatctgacagcactttagctgtaaaatcagaaaatgagggcagattgtacaatatagtctcctgggatctgaaattggtgatgatatcatggaagcttggcatccagaggacatctggagatttatttttcctggttttacaacccaaggttaacagctctgaactttgtagaaaccctgatactgtgactggtaaagttattcatagttaacttaaaagccaagccaaataaagt

SEQ ID NO: 468724 - DNA, 590 bp, Homo sapiens
accatttcctgctccctggggctgtatggatttcagaattgttacaggccaagtatattgtaaacgtctggaaaagtatcaccgtctagatgccattaagaacattagtgattcatgggaggagctcaaagtatcaacattaacagcagtttggaagaaggtgattccagccctcatggatgactttgaggagttcagagtcttaaatggagaaaggaaaaattgccacagccaccctaaccttcagcaaccaccaccctgctcagtcaacagcccaaccatcaacattaagcacttctctttcctgctgccatgtgaagaaggacgtgtttgcttccccttctgccgtgattgtaagtttcctgaggccttcccagccctgtggaactatgaggtgtacatatttgtggctgatatggtttttctgtgtccctacccaaatcttatcttgaattgtaacgccaacaattcccacatgtcatgggggtaacccaggcaataactcttatatttgcccttttaggctattttctatatcttattgacatgcttgattcttcttattttcttatgtctcctctgactgtata

SEQ ID NO: 468725 - DNA, 742 bp, Homo sapiens
accactagatgatggatctgagtcatggcaccgaagtacattaccagctggacactgctccctgcatctcagctgctccagctccagttgtggctaaacagaccctggatatgtttcaggttgctgctctagaggttgaaaaccataagcatttgtggcctccacatggtgttaagcctgtgggtgtgcagagggcaagaagaaattcttgggaggctccacctagatttcagaggacatatggaagcaccaggatttccaggcagaagcctgctgcaggggcagagccctcatggagaacctctactagggcagtgtggaggggaaatatgaggttagaggtcccacacagagtccccactcggatactgcctagtggagctatgagaatagggctacggttctccaagccccagaatggtagatccaccgacagcttgcacagtgcacctgaaaaagctgcaggcactcattgcaagcccttgagagcagtcatgggaggtgagccctgcagagccacaggggtggagctacctgtcttaggagcccaccctttgcaacagtgtggcctcgataaacatgtaagcaaaggaaaaatatttaagttaaacaagagataaattactcttgtgaaataaaatgaaagtcaatacctaagcattccattccattcaatgaacttcaaaataagaacaagaagtttctgtaaggcattattttctgtcccacactaataacatta

SEQ ID NO: 468726 - DNA, 1866 bp, Homo sapiens
gctgcagcagtcctcctacttggggaggcctttgaaatcaccatggggcagtcaacccagctcctaatgttccaccaagttggccccttactggacaaaaaagggccacagtggctcactgacagcagattgttgaagtaccaggttttgttattaaaaaacctgcaggcctcaaatcttagagctgctagagtctgttcatttgccccagaaggtggcagtagtgcactacaagggacaccagagggccacgatgaaaccgcacaagaaaatagtttggctgaccagaaaactaaagaagcaactgttccaaagtttacatttctgggagccttgctcccttctctccccactgaactacccccactccagtacacccaggaagaaatagatttggaccacccaacagggatatcaaaaagaaaccaatggatggtacagcctgggggcacttttccatctgccaaaggcctcccagtggaaggtcatccagagtctgcatgactcctgctactttggaaaggacagtctagggaaaatttgatactagtgatattggactaagaccttaccctactccagaatgacctcattttaacttaactaatttcatttataacacttttcaaattaggtcaaattctgagagaataggcgttagaatcccaacatataattttggagggatgaaattcaacccatagtaaatatgtgcatttctaaggcaaaattacaaaaaaaaaaaatagcttgaaagaaaatataaaaatacttttagacattatggtacacgaaaattttcttaaaagacccaaaatctaaaataataaactataaacttgcctacactaaagttatatacttctgcataaagcaattattttaccacttgatgacaaaatctgcattctcagaaaagcatatagaatttgcactgctcaataaagtaatagcaatttgattatgtaaaaataattacagcaaaactcccacacgttaacaaaaaggcaaattattttaaaatgtggaaatatgagaactgaattcacagaaggtgctgaaaatcactagaaatctgaatactcaatttgaacaggagctaactaatcattcatttgattgacatgaaaataaaaatacgacactgtcagcatgtaagaatgtgagatacatgattttctcagtaatgctaagaggagaataaattgataaagtcatcttgaaaaacaacttaagtgtatgttataaaaattataatgtaaatgtctcatcctttgattcatttgtaaggttatatttgtatcggttagctagtaccatgacaatgctatataaaaaacaccccaaaactgaatggttcaaagcaaaacttatttattctcatggatctgtgggtcagcttaaccatgcttttaaaagagtgttagcaaagcacagatgaccaagcagtaatcatttgaggccacataaggttatgtgcagaactagcacactgtcacttccatcctcatcattgaccaaagccaacagaagtgcacttaacccttttttttttaatgagaaaaactacaaaattatctatcaaagcacacagacacaaggaggaatagagaatgttcaccaataattcctttgaaagcagtgtattctcctggtcataatcataatatttaaaaacttagtaaaacacagtcatctcaggacacctaatctaatcacatcagcaggcctgaagtttaagatcctacaatctataacaagtttagatgagttcttcatgattcaatgatttatgaatttaagaggaaacattctcccaacatgcaatggtaggaaaggatggaagaatatccaaaagtaaagtta

SEQ ID NO: 468727 - DNA, 1402 bp, Homo sapiens
tttttttttttttttttttttttttttttttttttttaatctgtcttcccagtagattttataaaatcacatctttggctgggcgcaatggctcacacctggattcagaggctctggctgacctatgtggcagtgctttctgggaccagtcagatgcagtgcctcgaatccaagtctgttcaggttgccacaacaaaataccatagattgggtggcttgaatttagaaatttattttatcgcagatctgaggactggaagtccaagattaaggtgccagcaggaccagtatctggcaaaggctttctcctcggattgcagacagccacctacgctgtgtcctcaaatagcggagagagagaatgctgatatctcttcctataaggacaccatccctatcagattagggcccagcccttttgacctcattaacctttatcacctccttacaggctctatttccagaggagaaaataaaaatttcttctggaagagtaagacactggatggtgaaaaacaatattttacagaacagattgaattatatgtcaaaagtactcagcaaacaagttcagttatttcaaatatatcaaatatcaaaacataactttcaaataaaaaatactattaacattaatgtctcaatttttatgtggcttgttactattactttatgtggcttattcttttccctttgtgctttccaaaatctgtaatgttattccattccaatattctttgctatatttatatataaagtataaagtcaatagctttgaatacattaaaatcagattgaaagtgatgtttcatcactgagaaaaatctatatattttttacatataaaatatcaatttgtaggtatgattaggaaaattaggaagaaccctttagttttttatcctacaaaattagtggaaaaaatcataatcccactatggaagtcttgtctgaataccactgcctatggtcagtgtgcttctggtaagttggtgatttccgcaatggttgcttcatgtttgctattcataaagtgcattgggacccgtaagatattggtgctggtgttgataaatgatcttttcctcttagactctgctagatccagttttttattgactgtcattattaggttttagaagcttaaactgatacatagtccttgaaatataaaaatagtctttatgttacaaaattatttgccatagagtttcttttacaacagtaagcttcccctgtggctccacctccagctgggccaagatctggtctgtaattgaaagaattatatttgtggctgttcctttttcaatcaactctccgaaaccattgttgcaaatccgcaccgagaagcccccaacttcctccgaagggccccccaattgacaggccagcttgctcc

SEQ ID NO: 468728 - DNA, 821 bp, Homo sapiens
tttcagacatctctttgctcacacatatgaccatatgctgttagaagcagccaggcgacatcttcaatgctttgctgctcagtgtgtgggggtgaggatgtgaccaaagtgtataataccaagggtcgggttaccatgagtcaggagttgaccaaagagcagaaagttttttataaaatggtgcaacaattacttaaggctatccagtgcactgtagagtccgaagctttgcataagcttatgcttttaatttggcaggaatgcccttggttacatgatcaaggaacattagatttaaagttatgggagcaggtgcgttgctgcctgaaaagaggattggagcagggccattttgctaatgttaccgttttgaccacctggagttggttacactctgcgttatacccttttgatatgccagactgtgatgagtcacatcacccattttcttcacctgaagggaattcagaagatttaaagggaaagggtacacaggaaccagaacaacaaagaggggctcctcgccccacttcactcccttcagtagggcataaagaagacactctggtaaaagttttggtttcagctgccgaatatactgtctcaggctcaggctcaggtggacagcagttgatttcctcaatgctcgcagctagccatacaagtatggaagaggatacccgtgggacaatcccagggttcctttgtgatggttagacaggatgcaacagaaacatacattgaatttatcaaccaattgcaggctgcaatcaaaagacaggtaccccatcctgaagccaccagacttcttaagttgtaat

SEQ ID NO: 468729 - DNA, 670 bp, Homo sapiens
ctccaacagacctgcagctgagggtcctgactgtaagaaggaaaactaacaaacagaaaggacatccactccaaaaccacatctgtacgtcaccatcatcaaagaccaaaggtagataaaaccacaaagatggggaggaaccagagcagaaaagctgaaaattctaaaaatcagagcgcctcttctcctccaaaggaatgcagctccttgccagcaatggaacaaagctggacggagaatgactttgacaagttgagagaagatggcttcagacgtttggtaataacaaacttctctgagctaaaggaggatgttagaacccatcgcaaagaagttaaaaaccttgaacaaagattagacgaatggctaactagaataaccagtgtagagaagaccttaaatgacctgatggagcggaaaaccatggcacgagaactatgtgacccatgcacaagcttcagtagccgatttgatcaagtggaagaaagggtatcagtgattgaagatcaaatgaatgaaatgaagaaatacagagaatgccacaaagatactcctcgagaagagcaactccaagacacataattgtcagattcaccaaagttgaaatgaaggaaaaaatgttaagggcagccagagagaaaggtcgggttacccacaaagggaaacccat

SEQ ID NO: 468730 - DNA, 891 bp, Homo sapiens
ctatacctacagctctgttaccaccacttatgaaaccatttcagaggatatatgaaaacgcctgaatgctcaagcaaaagtctgctgcagggattgggctctcatggagaatatctactagggcagtgtggagggaaaatgtagggttgagccctcacagtgtcctcactgtgacactacctagtggaactgtgacactacctagtggaactgtgagaagagggtcactgtcctgtagaccccagaatggtagatccactgacagcttgcactgtggacttggaaaagtcataggcactcaataccagcctgtgaaagcagcttccactgactcaaatgttaatctcctttggcaacaccctcacagacacacccaggaacaatacttggcattctttaaaccaaccaaattggcactcaatgttaatcatcacaatgtgagacatggaacaaaaggagatgattttggagcttttagaattacagctgccctgctgaatttagacttgcatagggcctacagcccctttgttttagccaatttctcctttttggaatgggagcctttatccaatgcctctactcccattgtatcttggaaagatatatgcaccagaagctatgcgtcaaattagttaactatttggtcaaatatggcttatgtagataaggcctgtattatattttaaatttgttaaaacaatatctttcatttgcaagggacttttgtggttccatgggaagtttaagatcttttttatatttttgtaaaaaatatgtcattgagattttgatgggtacagtattaaatctgtagatcactttattagtctgttttcatactgctgatacagacatacctgatactgggaagaaaaagaaatgatgttt

SEQ ID NO: 468731 - DNA, 511 bp, Homo sapiens
tccccgcaccatgcggtcggagaagaccttcaagcagcgccgcaccttccaacgaagagcagaagatgtccgactcattctagcgcagcatccaaccaaaatcccagggataatagaaggatataagggtgagaagcagcttcctgtcctgaataaaaggttccttgtacctgaccaggtcaacatgagtgagcacatcaagataattacaaagcgcttacatctcaatgctactcaagccttcctcctgttggtgaacggacacagcatggtgagcgtctccacaccaatctcagaggcgtatgagaaaaaccttaaagcctcaacaaacgaactgttagaactaatgaatgaaaattcagtaaactgcagtacaaaatcaacatacaaaaatcggttgtgttttttacactaacaacaaactatttgacaaggacattaataaaacaatcgcattttcaatagcatcaaagagaataaaatacttagggataaatttaatctaagaggt

SEQ ID NO: 468732 - DNA, 681 bp, Homo sapiens
attattgtttgcttggttgtctacccagaccaagaggtattttagtttcctgactcgaggcatgagaggaagatgtgaaggaggctttgggttgggaagaagggtggcaatgatatatggctgtagtcaaggaataatcagggaagcagataatttggttaaaatgtcttggcctaataagggaactgggcagggggcttccgaggcgattgggcagtgtcagtcttcagctgctaagccgaggagatctgggaaggagtcggccaaggaacattgggtttgggctccaggggctttaggagcagcggtgatggtcggggagcagaggctgaagaagagttggagcctgattcagcctggcggggagcgacctgaggaggagcagtctggtgagaaggtcatagaaagatgagaaggtaggtagtactctcccatgaaaaagaagcttcatgagggcagagatttggagcacacctactttgttattcaacatcccaaccctcccaccgcctgctgccccgcaggacagacctctggatgcattcagagacttggtcctgcaagtcaagattgtcaagaagggccagatggtaaaaatgtaagatgacattgtgtgctaggatggccaaagagtggtggaatgaaggagcttgcttggatgatgttgggttcctaggtccc

SEQ ID NO: 468733 - DNA, 854 bp, Homo sapiens
gcagaccaaggcccagagggactaaacaatgtgcctaaccacagctagaagtaaccgtgcaacaaagacaccagggaaaattgataggcacctacttctgactgtctttgaacaggcgcttcaggtcttcaacaggttcacaggtatagcagctggcgggagcctcaggttccaggtccggggcttcaggggtgcaccaggttgccaaaatgaattggacatctccatgataaagcaaaagctagagccaaagactggaacccatcaacaaacttgccagcatccccagtactttcacaacctcttagtgccaggggagctgctgactttgacaaagataaaaggaaacaaccccagacaactgagcttacctcctgctggctcaccaaaacgttactggatggaaagtctttaccgattgtccatgttcttggcacatcaaagcattgaacaaaatgtacaaataaagcaaaagaatggcaaaacagtgcagatctactgaaatgaaagtgtacactcttagagtaggaaagggctctaggaagcagctcaagacacccaatgttattcagggtgtttaagctacaaaccttaacacccctagggtgacctttagaggcctctaacttggttacatgctatgaaggattggcccatggccaatccaaggctgaagtggctatctcaagagtgaggacatggcctgtgtgctgcctaaccttgtctacaactggctgcacctgcctgtctcatgccttaacccttggttaccctaattcccattctcctgcctcaattcactggctctcatcttcactagttggattgactctggggctaaacttacaaggtac

SEQ ID NO: 468734 - DNA, 1340 bp, Homo sapiens
ggtgcccaaccgcagatagccccactctgaggatgacagcagcgaggaggagcactcgcacgacagcatggtccgcgttggaaccaattaccaggccataattccggagtgcaagcctgagagcctcgcacgctacagcaacaagaagctgaagggggtgctggtgtggtcacccaaccactgtgtgtcagatgccaaacttgacaagtatattgtgatggccacggagaagcatggctacaacattgagcagacgctgggcatgctctggaataagcaccatgtggagaagtcgctggctgacctggccaacttcaccccattccctgaggagtggacagtagaggacaaggtgctgttggaacaggcctttggcttccacgacaacctggtgaaatatcactactcttggaagaaaacccacagccgaactagcatgacggacagacaggcccggcggctgaggggctgcaaggacaaagaagacagtgatgagttcgaagagagtcgaggaggcctgagtgaaggagagcccgatgctggacacccgaagagagagaggagcagcttttggctgcctaagccatccggaggtatggcagactttggggctattgcagaggtgattgggaacaagactctgacccaggtgaagaccttctttgtgagctattggcactgcttcaatctggaggaggtgctgcaggaatgggaggctgagcaggatggggcccgtggagccacagtccccgtggaggaggctaggagaggggctcccttgctagccccagcccaagaagaagatcatgaggtccagattacatcgatctccatgtctgtgtcccgatcggtgcccccctgcaccacccccgttccacctcccacctccctgccctaggtgccccctgctgctgaggccacctttgcccacggctcccactctgctctgacagccacccacagtgcagcagggccgcttcctccagccctggttggcccccaaccagcgcccaccacctctcatcctccccgctctggctgcctgtcctggccctccgcccctacccaccctgattggagcccccagtgccctcactctgaatcctgaggtcctccaccaaccacaggctccaggacctctttgctggccatccccaggcatctctggtgtcactgaggacggaaggggctagggctcttgccaggtctttccaagacccagagctgccgacagcccagcctggacctgtgggttctgcatgtgttcctggcagctgggcctgtctcttggggccatggcccgggctcaggggcctttgagctggactgagggcactttc

SEQ ID NO: 468735 - DNA, 591 bp, Homo sapiens
atacattcatgcccaaggttaaggtgggcactgctctcgtggccatgtgtgcaggtcatggttcctgggagcagtgtctccccatcaccaggcagaggctggttccagattcttccctccaggtctacacaacactccagtgcacccagcccaactcacatagggcagtaccaggcaaaggagagcttccttcctcacctttcccctgtctgaggtttatcccaggcactggtgccagtgaatggaaccgaggagtgatagcatcttacctgctgcaatctgaccaagctcagctggaggagcctcgggtcagagcagccgaagccctccagcatgcaggctccttttatccacaacctctccccactggtgaccttgttcgtggtcggtcactcaaactcttcctaaactgccccctgggccattggccactcaccatgagcgttcctgcgtctaatcattgcttccttcctttgatcagaacagctgatggcaaccagtttgaagaccccaacagaggcactgagtcggcagtactatgagaacacagtttcttcctctccctgtcccatgacttcacgctgcactctt

SEQ ID NO: 468736 - DNA, 971 bp, Homo sapiens
ctcagaagagctcaactagaggattggagatgtaaaataaaatggatttacagaaccccagatgggagggccagatgcacctctttgtcccactggcagtgctggatgaagggcaggctctctctctggggctggtggaaggtcccgtgaggtttttggcagctcctaccactcatcctggcaatcagggtctcatagtgctagcaggcctgatggctgccagagttttgattgcaggagtctttgatgtgctggttgtctaccgctcatcaaagccgactctgtacctttttgccgtacagaagctagacaccactcctactggtgccatccccgtaaggcagagtgcaacaccgcagcccgttgataataatgaccaaaagagagcctttgaaagagttaacagtattgtgcaatgtcacacagcattcaggaagcagatggccagcagctccggcttgggtactggtcggcgaagtcagcatgggtgttccagacccaggcacggtcactacctgcttgggcttcagctccatcatccgcatgatgtagtggaagacaaactgagagtcatggttgtactcgtctgtattctcagtggaagtatcatggtcctcacgagtgtccttggcggccgccatgggggcgcagcggtggccgctcacctgggtctgttatcgctggctccgcggcctctcggcggctacgtagctccttcccgcccgctcttccctccgccccgcgacctgaacctcgacccctgaccccagcagcaggaaacgcatggcgattcaaaaccagtacagctttattggctcaggcagcggacactctcattttcaactactcctgactaaaagcgttaatgcacttacctttaatgtaaagagtattttctgaagctcaaattttaactaaacatgaaaagttgttgaattttgtcaaatgctttgaactttttcatgaatact

SEQ ID NO: 468737 - DNA, 1019 bp, Homo sapiens
ggtcctgctctctctgtgatgtcaaaaaatctaggggatcaacagttctttctctcatcctctctcccatgtcaaactgtagcaggtctaagtcattaattatcaagggaaaaactctaaagaagagaagtaaattggtaccagaagagtggggtgttgctgaaaatatacctgaaaatgtggaagcacatttggaactgggtaacaggcagaggttggaacagttggagggctcagaagaagacaggaaaatgtgggaaagtttggaacttcctagagacttgttgaatggctttgaccaaaagcctgatagtgatatggacaataaggtccaggctgaggtggtctcagatggagatgaggaacttgttggaaactggagcaaaggtgactcttggtatctggcagcagaaatttctaagcagcaaagcattcaagaggtgacttgggtgctattaaaggcattcagttttataagggaagtggagcataaaagctcagaaaatttgcagcctgacaatgtgatagaaaagaaaaaccaattttctaaggagaaatccaagtcagctgcagaaatttgcataagtaaacaggagccaaatgttaatccccaagacaatggggaaaatgtctcaagggcatgtcagagaccattgtggcagcccctctcatctcaggccccgaggcctaggagaaaatggtttcgtgggctgggtccagggttcccatgctgtgtgcagcctagagacttggtgccctgtgtcccagccactccagctgtggctgaaaggggccaatgtagagctcaggccatggcttcagagggtgcaaacctcaagctttggcagcttccacacagtgatgagcctgtgagtgcacaaaagtcaagaattggggtttgggaagctccgcttagatttcagaagatgtatggaaatgcctggatgcccaggcagaagtttgctgcaggggcagggtgctcatagagagcctctgctagggcagtgcacagggaaatg

SEQ ID NO: 468738 - DNA, 899 bp, Homo sapiens
aaatggtcaattgttttggacattgtgctttgtttcatgcaggtctaggaggaacatgttcgataagaagctgatcgtcagcattgtaagacacagcttgaaggcagtcagcacatgttgcagcagttacacactggaaatgccattgagatcagccacctgggatccccttggcaagtgtgatatgtgtgacagaggtaagactgtggccacctggttgctggatatctgcacaaccacctggtatctgagcaagtacgtgactccaaaagtcctggtagggggctggagcttcctaagaggagccagatcaggcattcttgtgaaaaaactcttggtctattgcctgcctaggctccccaaggcttatgtggccctgggaaatacaggaaaggttcttgatgaaaacattgagaggaatgttttactgtttccgcttgtgaagaagaaatcccagtcccctctgggaaacattacttcaggcagcaagtcagatacacttatagatgtgtgcacagacgttcacacacacaataaaagagaaagttatctgaagcgaagcaaggtcgttgaacagcactttcaacaattccccagggcacaattcacagttctgttgccctcctcgcaagatgacaaagtaagtaatagccatgaaaaccttaagtgcccatatttgaatctcctgggcactgtgaagagggaagcagacccaagatacattcaaaattcattccataagagctgagcacctacaaagtgggaactggaagcaacctggttgtgtaagtaaggcattcaggttgaaaaccaaatcttcccctgtgtggtcatgaagaaggctcttacgttttctctgatcatgggttctgtcctcatctgtaaaatggggataataa

SEQ ID NO: 468739 - DNA, 1317 bp, Homo sapiens
agcaaggggttccctccacatccatatgatgaccgaattcccagcttaccccacacctatacatgtactgtttgagagaactaagctttctatttccaagcttctattgaataatatagcctctcctcctcaatttctatccaaaatgctgtgctacctagatgcctacctcggcccatgcccagacaccccctcacccatgcactggatttcttctcaccttatttgggctctgacacactactctcagcaacaactaccaccaccccatcccatcctaccccgagcagacttcctctttaccactcttgactccaacactgtgcattgggcctcatggataaacttttcatccttcttgagttcaacatcccacatttatccatttctcctccccctgcccccacaacagatgccctcttctttctccccatttggactttgttactccatgctgggcatctgctgccaccactaccccctaagaaacacatgccttgcttggtcctgactaatggtttctggactaaattatataggaaacaggagagggagggagagaattagggaaggaaggaaggaagggagggatttttatgcttttataaataagggtattggtgttgtcataaatttggaaaagcaagatatttttaactatgagattattaaggatactgtttcttcccacttctgcctcccctctgtcacatgagcccttgtgttgggcggcattggggtgaccataaccattttggcgatgcagacaaaaagttgggttggagttatagtttggatatagtggaatacatttgtatggaatacatatcatattcatatttaactattttgctgaatgaaaagccttcatgtgtgactttaacgacatgaaacaaatctgttcaactgtaatctgcacaatgcaacattttcaatggaaggttgtgacaacacaactcttagaaaagtgaggaccaagatcttggaaatcatcattctcagtaaactatcgcaagaacaaaaaaccaaacaccgcatattctcactcataggcgggaattgaacaatgagatcacatggacacaggaagggaatatcacactctggggactgttgtggggtgggggaagaggggagggatagcatcgggagatataccaaatgctagatgacaagttagtgggtgcagtgcaccagcatggccatgtatacatatgtaactaacctgcacaatgtgcacatgtaccctaaaacttaaagtataataaaaaaagaaaacataaaaaaaaatttaaaaaaaagatcattaataagttc

SEQ ID NO: 468740 - DNA, 1122 bp, Homo sapiens
aaaactgggggtgggtatgggagtccgatgagagaagagcacatcaaacccagggtatctgtgagagggagctggatccatagggcctgctctgcatctgcaattccacatggctgggaggcctctggaaacttacaattgtggcagaatgcaaaggagaagcaaggtacctcttgcatggcagcaggaaaaagagccgcaggggaaactgccgcttgtaaaccatcagatctcgcgagccctccctcactatcacgagaacagcatgggggaaaccgtcctcatgatcctcccaatagcccccaatcacctcccatcaggaccctccctccacacgtggggattacaattcaagatgagattcaggcccccgaatcagcagtttctccctccactcaccggctccaggctggcaaagctgacaccagtgccacagaaaatgcaacccgctgccctctccccaaaatgtggggagagcacggttttgctatgaagatgtcggctttgacctgaggctgacttgagagcccagctgtcatgtctcttccaaataagctgctgaacttggaattatcttggctgaataattaatcaggactaaaaataacctcaaactgcctgggctttgcttaaatcctacacaggcacagcatcaccttacatcgaagacagattcaacgaatctgcctctcatcctaggtggccactaggcaactcctctgggaccatttcttcctgctctatgctcccatgaccttcattcatactccctcttcccctgctggaaacctacttcttttacctcctcaaaggtaaaaggaccagctggtgaacaaaagaatacatttgctctatctaaagagaagcattagagcaagggaggaaaaactgatgcaagacaaatgacttgggctcatcataaaatactgagcagtcagcagaacattaagaagagacttctactccccaccacacacataaccatctgcacacctgaatgccgagactaagcctcaccagacgccagcagcataaatgagaggagtcacttacccctctgaggctcaggcttctcgactggaaaaaaaaaaagataataaaaatatcagttcagttgggcat

SEQ ID NO: 468741 - DNA, 543 bp, Homo sapiens
gcaagtttgtgatcttaaaggactccaagaccttggacttattttaagggagcaggtgccaaactgctaccttgagaaatggatgcatacacagcaagcacaggaatgggcacaggcagaggggcctcatcccagagtcacccctaccccaaaccacgaagagtactgccagactactgcccatgttcccttaaggcccaaggtctcttaaatcagcttgtggtgaatgctgcctggcctgtgactcacccttcagggcagtgggctcccctctggcccagggcaggtccaaaaatgccagcaaagggccaagtcctggaatcagggaccctgagggcctgcttggtgctctacccctctgatgtgtctagaaatgttctccacgagcgagggcctggaacaggggcctcacagctctgtctggtgccctatcctgctgtagctgagctggtatctaagatgcaagacagtctcccctactctttcctctcttctcttcaagcagaggaaggagtctcttttggagccccgaactgagtagta

SEQ ID NO: 468742 - DNA, 549 bp, Homo sapiens
cctgactgttagaaggaaaactaacaaacagaaaggaatagcatcaacatcaacaaaagggacatccactcagaggccctatccgaagatggggagaaaccagcgcaaaaatgctgaaaattccaaaaaccagaatgcctcttctcctccaaagaatcacaactcctcgcgaacaagggaacaaacctggatggagaatgagtttgacgaattgacagaagtaggcttcagaagatgggtaataacaaactcctctgagctaaaggagcatgttataactcaatgcaaggaagccaagaaccttgaagaaaggttagaggaattgctgactagaatgaccagtttagagaagaacataaatgacctgatggagctgaaaaacacagcacaagaactttgtgaagcatccacaagtatcaatagccgaatcgatcaagcagaagaaaggatatcagagattgaagatcaacttaatgaaagaaaaaatatgggactatgtgaaaagaccaaatctatgtttggtctatgattggtggaactgaaagtgac

SEQ ID NO: 468743 - DNA, 828 bp, Homo sapiens
gatgaggggagacagcatttggccgatggggctgagatttacaaacgaggaccacctggcagttcataaacacaagcatgagatgacattgaaatttggcccagcccgaactgactcagtcatcattgcaggtatttgctgccccaaaagccacggctccctgtgccactacttgacccagtacaccagtgactggggaagttccctgcggatggcactgtccctggcccagggcctggcatttctccatgaggagcgctggcagaatggccaatataaaccaggtattgcccaccgagatctgagcagccagaatgtgctcattcgggaagatggatcgtgtgccattggagacctgggccttgccttggtgctccctggcctcactcagccccctgcctggacccctactcaaccacaaggcccagctgccatcatggaagaccctgatgggctgagggagctcctagaagactgttgggatgcagacccagaagcacggctgacagctgagtgtgtacagcagcgcctggctgccttggcccatcctcaagagagccacccctttccagagagctgtccacgtggctgcccacctctctgcccagaagactgtacttcaattcctgcccctaccatcctcccctgtaggcctcagcggagtgcctgccacttcagcgttcagcaaggcccttgttccaggaatcctcagcctgcctgtaccctttctcctgtgtaaatatgcagtttatgtgtcatcaatgtacatgccaacataaatatggcgatttctaaaattatttcagaataaaagaacactgtctaggc

SEQ ID NO: 468744 - DNA, 4247 bp, Homo sapiens
gtgtgtgtttctgtaaggactgggagggctgcctaattgggataatggaggttaatggggcgcctggagggggttgccacgctcctagatcaaaggggccagctcttcccagccaccacagctggaggtcacagctggagggggagggggaggggcttcgggccagccagcagggggtgctccggccctggaaagcccgtcctctgagtctctgattctcttcttcgcttggaacggcttttgcttagagagtgcattggggagcggaggataagagaatgggggagctctgagatccctactcctctctgtgtggggtgatggggaagagaaagggcatgagagactggcaggctgggggccaacgggatgttggcaccgtcgggacctcgggcactgcaagatccggaggaagaagcttggatgcagcctcgagaaagctacggcggaagaggcaggactccggtcctgggttcgggcggctgagaaaggactgggccgggcagcggggggcgctggctgggcggaggcgaaggggcatccggagttcccccgccgccgccccctcccccgggctggcgctccctctcgggctctaatcggcgcggcggccgcagcgggcagagtcagcgccgccagtctccgggacgcgactcccagcaattgtggtcgggaccgcagatatgcagctgcctcctgcccgggcgcctggcccggccggccccgcccgcgccccgccccctgccgcccgcccctcggccgcgccgggacactgaggcacgggatggaggcgagatccccggcggccctgagcctggcctaggccgcaagagacctcccagcagccccggagctcacgacctgtcctgtccttctgagggtgcctatctcccccacagctgtggctgggggctaagaccccccaaatcctgcctcagcttcaaccgtccttcttgcctcacacggctgggctgggtgcatgggcgggtagtggccagaccaggggcccgggacatgagcgcaactttccaagcttctcttccaggcccctgtggttggggagctccacagagggagagatgagtcagcggggccgcagagcagcgggggcctgggtggggtttcctgcctgatctaactgggtcgggcttttctgctggtgatacaggaatttctctaaagcttctctttctcaacttctgagttcggggccccggaaagccatctggcacctcagtctcagactcccccccaacaagggggagaccgcgaggtcacagggacaccccaccacgggcacttcctctcaggcagacgggtggggtggcccgtgtaatcagcggacacaattatgtgctatttatactccttccccgcccccccacctgcctggcaacacaaccctcctcctcctcctcctcctcctcctcctccggacctggctatgcctcaggctattttctctgtccttcccaagccattgtctccccatctttgttcctctgggcctgtttctttatctttttagtttctttcctgctctgttttttgttgttgttgttgttgttgtttaaagccacacatctggtcttctccacctggttcccaaacccttcccctaaaccttgggttcccagagttccttgagggagagctgggagggggagaagtgtgtgttaaggaataacctgtaaaacaaccccagcgggctaagcccccctgtgggagagctgccggtgtcaccacttagctgcccagtcctctctcccataaatacctcagggcccatggcccaggtttcagcagcggcgggcggcagcagcctaggcagcagcagtagcagaagcagcagccgccgagcagcagcaaggactctggagtcagagtaggactgtaggaccggagcctgagtggaacaggagtggagctggcctgggagagagcggatccctcccagcaccctcaggccacccgttgcctgcactctccctgccagacctccagagaggagagactcgggacagccagccccaggttcccccaggtacatgacactggggagctctgggaggggtgcccacagatgcctatgggactgctgccgcgtgtaggacaccggggtccaccatccctttaacctctcccctcagcagccccccgaggaagccctgacaacttgcccatgctgctctcccctcttcctgcttcccaccccttccatgggcgcccctttttctcctctccctccctgatcccttctttggggagctcagcaaatggagcaggaaatttggaccctctgcctccctctctcgccctcctcattggatctggagccttctccgctgggaaagctctctctccatctgcctggctccttgggacccgttccccagcctcaggatggcgtcctccctgcttgaggtaactgtcccctcttccccccaggaaaccagccacaaccttaatggtcctagtccttgcccacccacctcctccaactcacatagatagtagctgtggtgcttgtcaattccaggggtccttctgatgaggagagaggagtggggtccaagaaaggggaagcagagggcaggagaaaagggagggaagaatagggccaggggtcagagggcagtggaaagaggctgggtggggtccctgggcttggctgaggcccctgtggccgcagtgtgagggccgggcgggggacggcgtcggcgtttttaaaaataaaccgaccgcagggaaaccatcggagccgggctgggcagagggagagggggcggtcaggggggagaagaagggaggagtggcctggtctgggggttttctggggcccagcaccatggtggttttctcttagcagtgcgtccctctttccacaggaggaagttcactatggctccagtcccctggccatgctgacggcagcgtgcagcaaatttggtggctctagccctctgcgggactcaacaactctgggcaaagcaggcacaaagaagccgtactctgtgggcagtgacctttcagcctccaaaaccatgggggatgcttatccagccccctttacaagcactaatgggctcctttcacctgcaggcagtcctccagcacccacctcaggctatgctaatgattaccctcccttttcccactcattccctgggcccacaggcacccaggaccctgggctactagtgcccaaggggcacagctcttctgactgtctgcccagtgtctacacctctctggacatgacacacccctatggctcctggtacaaggcaggcatccatgcaggcatttcaccaggcccaggcaacactcctactccatggtgggatatgcaccctggaggcaactggctaggtggtgggcagggccagggtgatgggctgcaagggacactgcccacaggtccagctcagcctccactgaacccccagctgcccacctacccatctgactttgctccccttaatccagccccctacccagctccccacctcttgcaaccagggccccagcatgtcttgccccaagatgtctataaacccaaggcagtgggaaatagtgggcagctagaagggagtggtggagccaaacccccacggggtgcaagcactgggggtagtggtggatatgggggcagtggggcagggcgctcctcctgcgactgccctaattgccaggagctagagcggctgggagcagcagcggctgggctgcggaagaagcccatccacagctgccacatccctggctgcggcaaggtgtatggcaaggcttcgcacctgaaggcccacttgcgctggcacacaggcgagaggcccttcgtctgcaactggctcttctgcggcaagaggttcactcgttcggatgagctggagcgtcatgtgcgcactcacacccgggagaagaagttcacctgcctgctctgctccaagcgctttacccgaagcgaccacctgagcaaacaccagcgcacccatggagaaccaggcccgggtccccctcccagtggccccaaggagctgggggagggccgcagcacgggggaagaggaggccagtcagacgccccgaccttctgcctcgccagcaaccccagagaaagcccctggaggcagccctgagcagagcaacttgctggagatctgagccgggtggaaggtctcccaccccagggctgccctgacagtctctcttggctctctagaccactgcttgccaatcactctcttt

SEQ ID NO: 468745 - DNA, 828 bp, Homo sapiens
atgatgcatgtatgagtatgcacctgtgtatctgcatgtgtgcaggcgaacgtgtgcatatgtgtatgtgtgcatgtggtgtgccttgggggagctggaagactcagctcctggtacttctgctctggttgcctctgggcaagttaacagctctaggctgctgtgctggagcccctggggcgctgggtgtggtgtgggcagcggcaggcagcccctctgtgattctcaacttgggcttctcaccgcacctgactgcctgctcccccacttccagcccatttatccgaagagctggagtccttccagaacgtttctcctttcctgggtccttcggggttggcagcccccaggtggggaagggttcttggagatcttggccaggagcctcggctctgcaggtcccggcgccctccctctgaggtgccattcctcccctgcctcatttgctgccactgaccttactgagttaaattaaaaagcaatgttctgtgtgcggctccagccctgtggagcttgactctgggaagacgaagacaattactggcccctccatctccctctcatctggctgccttataatttttccccccgctgcctggtatgcaacatttatgtttttaataacaccagaatggttttgaccttgggaattcatagcagaatgggcactgcaagaggccccgacgtgattggcgtttgtctcagtcctttgcagggacaagactctggtgcctcctggattctggggaaggtgtgtaggggctgcaccccatgcggtttaagaagaaatctcaaaaaccagagtggacaaggacatgggaagggggg

SEQ ID NO: 468746 - DNA, 510 bp, Homo sapiens
cagacatctcagagagatcaggaagctgcagacggcccactggagagtatgaagactgatgaggagaagcatttgaaatacgttcgtaacctttccctaaaatctggatgcttaggtgtggagatggaaaagaaagttgagatgatcagggctgtaattaatgtggaagcatcaagaaaagttacagaatcacctggaggactttttaaaccaccaattgctggttccactcccaaagtttctgatgcagtagatctgggcctgctgtccagccgtgagtcccaacgcatcccatcatcaaaggtttgtgctcctggccccatagaagttgagagcctctgcagtctcctgcaggcctgccgtgacagtgctggattttgctccaggacttccacttacaatggcatgcagagcaggcttacctcatggcgagatctcagcacaggacccatgggcatggggattgctggggacattggacccctcctggggctgcagcactgacgtcag

SEQ ID NO: 468747 - DNA, 583 bp, Homo sapiens
cggaattagtttagcctgtgtggtctaaccctagccaatgggctgaggtataatgactggagcttcagcagcaattttacaaccaaaaggaaaccttactgggaagtgcctgtggcttcctttgctcagtgtgagccaccacacctggcaagagagtacacatttttatccattcttcctccaagataaggacttactgcccttgcccctgctttgtttttgctcccaacctgggagctggtggcaaagattagggtccttctctaaggcaaaagcatcaaagccaaaccttttcacaatgaggaccaatcctttaggcctccattgcaacagcatcatggttcaggcctctcctctgaatggatgctggtccttcctgattcctccactccttaatagatgttcttgggagttctccttggttaatctcctgcatgcaaatctccatctcagaggctatgtcaaggtaacagcctacaacagtggccttagacagtaacaagcagagtctggagattaaaaataattttaaaaaataatttaaacatataatttccttttttggattaatgctatgaagcta

SEQ ID NO: 468748 - DNA, 595 bp, Homo sapiens
ggaagctgcggtaatgggaactgccctccaccgccgctgatgcgggcagctccacctgccaggcacacgggcagccggtctctgtagtaccgcgtggtactcactgcgtttctggagttacaaatgcacttcaataatgatcaagtcatgctgcaacaggcacagagaacaaagaaacaactgcaacaagaaactgctgaacttgggtctgaaatcccagcattaacaaaaaaggatgctctcctacttatcaagggaatgaagacaagtggacgtgggtcccgctgtgttgcagcacctttgaaaatacttgtgaaatataaatcattgcttccatttctgaagcaattgcaacaactctttagcccagagaatgagagaaagatttgtgatgatttttccagaagatctactttgagaatcactgttgggcccacatatagtagtggcctggttctgagaaaggctatcagttacactcctggtcctggttttgttgtgtgtcctccacagatgatgtcaccttgttactgctactcctctggctatctgaccaatgtctgtcaggtttctagataaagtgtttccacagcct

SEQ ID NO: 468749 - DNA, 576 bp, Homo sapiens
cagaagagatctggatagcgcaccatgcacctgttacgcctgcctgggatgattaaattaagtgtcagagcaggatttaaacccgagcctgacttcaaagccatcttccactgtgctttgctgccttcacctgagatgatgccaaatacctgtgccacatactggcacctgcagtttattaggctgttggcatctagtcaaggatcctcacagggtgttaaagcagcggaagtcatttctcctgttaaaaggagtcgtaataggaagcagaagtcagatggtggagttgatagtgttctgctccctcggggcccattcctcaatgacaggaagggactccagggctgcgaatgcagctcatatattagaggcctgccctggtatccatgggacctattagaagcagatctgtgcatcttgattagaacgagtccctttgaggccattgattcatctgagctggctgtgtttatcatctggggctgctcttttttctcctccgttgtatcactgatgcttgtgtaaccactgttcagttctcttttcctgtatataatttctttggacatttgttat

SEQ ID NO: 468750 - DNA, 1206 bp, Homo sapiens
acagctggttcatctacagtaacaagcaggaaggcacagtaacacaacatgagacccatcaatcagcttttaacagacaattccaggtgtggccttgccattgttccaaatgcatggagcaccctttctgcagaaagcaaagattgccttgctgagaggtcctttgtctccgtgctgacttttcttcgtggcaccgattatctatttctaacagagagtcatgggcatttggacaaagaaaataaaaggattgtgcatttcacatcaaatatatatagcctgcacagctgccttcatgggttagaggtgagtacctgcagcttttccaggtacaaggtgcaggctgctggtggatttaccattctggggcctggaggacatcagccttcttcccacagcttcacaagacagtgccccattggagactctgtgtggggctccaaacccacattttcccgccacatggctgtagtagaggtggagcgggctgtcttagtgcccctgctgcactcagtcctcacctgggagcagccagtgggaaggatggtctcagtgcagacacaggaatggatttcagtgaaaggcagctggggcccttatcaatttcagtgtagtcagagaaaaggcacaagaaactccgcagcccctgaaggagttgaagccggttccagtgtgacatatatcatgaggtttctgcaggacttcgctgtccatttaaatgctaatgtgcaattctggcatatcctcagaatgaaagtgctgaagcaagcagcaacactggaaatttcagaacattgttgaatattcagtatccatgcactaaagagctcaggtagacttttaaatatcagacaacaaaccacagttctcacttcaatatgcttggctaagaattctctggcaatatgctactttttaaagaaaggttcagtgaagttttgcatttccaagtgatttttcttatgaagttaatctgacaagcaaagcaagaggtcgtcggctgcaattcatacataaggtatatattaaaaggcaaattcagaagttcttcctggttgttttctctgaagtctcaattgtcttcacctgtgagaactgaaacttatcaggcattgaagggaaatttcaaggttttgcctcattttcttactctatttatgtagtgcatcaagctatattaatataatatcactgagccagcaataa

SEQ ID NO: 468751 - DNA, 586 bp, Homo sapiens
gggctggtcgggttgaaaacatgaatatcttaaatgttatttttatttatagcagttacaccatcaaaggagaaattggcaaattagaatttaaaccaaataattttgaaattgatgatggtgatgatggtaaagatagtgatggttatgattatgatgatgatggtaatggtgatgatgatggtcatggtgatgaagatggtgatggcgataacgatcgtgatgatggtgatggtagtgatgacgatggtggtgatgatgatggtgatgatggtggtaatggtgacgaagatggtaatggtaatgatgatgatggtgatgatgatgatagtgacgatgttaatgatgatgatggtggtgatgatagtgatgatgctcccaaccttttgctggtggctgcactgaccatcaccgaatgcttcagacacctactcttccgcctccatacacattcttcagatcctcaggacaatgaggataattctgatctgatatatccacccataggtcaaagtttgaatcctgaagccattgagagcacaattcttgttgagtaagcagccccacttggggttagatcagatac

SEQ ID NO: 468752 - DNA, 614 bp, Homo sapiens
tgggatgggagggcccagtttttatgatctccacgccaagactcgcccaaaactcatcggggctaacagatgagccacctgtgaagacaccaaggcaggccgtgggccggtcgcagagtttctgtaaagccttcgccaccgccatcgccatgggggatgatctccactccgtccgccctgtcacagtggtgccagatttcagccgccagcttcggttcttacgagcgggctctgacgggctcatgcttggccacagcagctgggaagggattcggctagctggtggtgtttccaggcaaggagggcggccaatcagaggccccgcggaacggaactccaggggcaagcccaggccatccgagcatgcacctgtcttcgtgtccactttgcttttccagtgggaagtcggcagcaggaatgacccagccatagagccgtatactatgatggagccgtgggtccccaaaaagaaactagggggctgttaccaagaggaaatagatgctgacctgccaagaatgacaagtgtcccctcggccatcctatccacaaggttagacaggttatccatggcctttctggttctgtattaagagccctagctatgtcgggca

SEQ ID NO: 468753 - DNA, 609 bp, Homo sapiens
cgacgggactgggcgccgtggagcagggggtggcactcgtcggggaggctcgggctgcacaggagcccatggagggggtgggaggctcaggcatggcgggctgcaggtcccaagccctgccgcgtgggaaggcagctaaggcccggcgagaaatcgagcgcagcgccgccactggcccgggtgctaagtccctcattgcccggggccagcagggctggctggctgctccgagtgcggggcccaccaagcccacccccacccggaactccagctggcccgcaagcgccacacgcagccccggttcccgctcgtgcttcttcctccacacctccctgcaagctgagggagtgggctccggccttggccagcccagaaaggggctcccacagtgcagtggaggactgaagggctcctcaaatgccaccaaagtgggagcccaggcaggggaggtgccgagagcaagcgagggctctgaggactgccagcacgctgtcacctctcacaagctagggtttcccaacctcagcactatggacatgtaggctggatcattttttggttgtggggctgtcttgtgcattataggacattaacagaatagaatccctg

SEQ ID NO: 468754 - DNA, 696 bp, Homo sapiens
tccatccatgcatccatccatccatccatccatccgtgcatccatccatccatccatccttccatctgtctgtctgcccatccatccattcattcatcattccatccttctatccacccatccttccatctatccatctatcatttcatccatccattcatcattccatccatctgcatattcattcaacaaatgtcaaaggccacatgccttcagtgaacacagagctcagcaggaactatttctaagtgttgtgaggacacaggacagtaactgccttctgagcaccaacaatgcaccccataccgtgctgggcacagggaagaacttgccatttgtaggagagataggggaacatgtgaattacacagaaaaacataaagttagcactgtgggtgtgctctggaggatggggcgagtgtctctggatgcagataatttggcagttgacttagagtaactgggaagactcgccttgtctgaaggatgggctggcgttaccggatggactgggaggatcccaagtgatccacataatctcccatcttgacttagtcacgtcgccttttaacatttccaaataaagtaaccaacattcccatatttcagggatttggatgtgaatatcttttgggggagtgcacttctgcctttcacaaggttgacattctacaactattttctgcctcctctcct

SEQ ID NO: 468755 - DNA, 446 bp, Homo sapiens
aatggatacaatttgggtacatgtgcacaacatgcaggtttgttacatatgtatacatgtgccgtgctggtgtgctgcacccattaactcgtcatttaacattaggtatatctcctaatgctaccctccccactccccccaccccacaacaagccccggtgtgtgatgttccctttcctgtgtccatgtgttctcattgttcagttcccacctatgagtgtgagcttcagcagatgaagttttccgtctgcgtgcggaagagcagcgacctgaaggagatcccctcgaatgactgcagtgcgcagaaacgcttgcagcaggtgttccaggtgataaggaagccactgggtgcagggttctgtgatcactatgatgtaactctagaacattttcgtcattgctgaaaagaaaactcataccctttagcggtcacccccacttttcac

SEQ ID NO: 468756 - DNA, 685 bp, Homo sapiens
acagcaaagggaagccttgtgaccttgtactggtcaataacatacagcaagtttgggccaggaggcatgaaggccagggcacgtgaaagcatgcctgccgccctggacactgttcagcaggtcccagaaggagcctatgtttacagagtaagaggagaggctgaccagcaaacagaagggtctgattcatccccaaatcacgagacgagcaaggacacagatgtcacattccaaagggacgatggaggggagtttagtgaaggcaccattgtcaagggtggaggcaacatgagactagtagcagtaaagcctgatgccaccccaacacctgcagggtcaggggagccttccctgcaggagccgagaggatccacagtgagatgcagccaacccatggaggccctgcaggggagaagccagtggaaggaatataacagcctctctactcctgccctccgtcttctgccagagtgtctcactggttggatcccaaatccaaccaaagacaatgaaacctatgaatgcatttataaaacatcccccaagacatagagcagtgaagagtctaaggggtaaatgggaagtgtctagtgcaacaagcttgtgctctaacccaaactgatgaatgctggggtcttctctgctggagagagcttttgccacatttcatgcaatttatacattt

SEQ ID NO: 468757 - DNA, 575 bp, Homo sapiens
tggttgcaaagaagacaagtaggtagtatggtatcacaaaaaccgacttggactaaggttatggaggattgggctctagaactactttttcccatttactatttctctgaccctaagaatttcaccaatcctccatttcttcttcaccttggaagcagaggatataaaaacttgcagccaccagcaaaaggttgggagctgaggttcatcatcatctccctcaccatcatcactatcatcaccaccatcatcatcattaacatcgtcactatcatcatcatcaccatcatcatcattaccattaccatcttcgtcaccattaccaccatcatcaccatcatcatcaccaccatcgtcatcactaccatcaccatcatcacgatcgttatcgccatcaccatcttcatcaccatgaccatcatcatcaccattaccatcatcatcataatcataaccatcactatctttaccatcatcaccatcatcactgaagcagagaagggggaaaaccttgaagcttaattttccccataaatatcattcccctcataaatatttttaagtccccaccatcc

SEQ ID NO: 468758 - DNA, 480 bp, Homo sapiens
agaggctaagctgctccaggctggactgtagtggtgcaattatggctcactgcagcctcaactttctgggctcaggagacaacagtaagccccaaaatgaagttggagttgtcttttcatcagaggttgaagtcatgatctttggagctgcagatattccgggaggccttttccacgcctgggagagacgagtagagactccgtgcaaccggctgccaatgaggacccagggccgtgccctccaaggggcatcttgcaccctcttccctagctttgaccagcccgatagcggcagcttccgggtgctgcccatgacagcccccacttgccaaaagaggaaaatccaatctgatcagattcagttccagatagaatttggttttcttttctagcatatgggaatgccccccattcacaagtcaacagacacggtatctttttcatcccaaccaagagcaaataattagaaacagtttaaga

SEQ ID NO: 468759 - DNA, 524 bp, Homo sapiens
gcatacaagggaacagagctcagaagttaaaaaggaatgaacgactgcttcactccaaaacacagctctccgaaatgacccctggcatgcaggcattcactcactcactagttcactcagtgcctactgagtgtctaccgtctactgtctactgtgtgtctactgcatgcctactgagtgcctcctgtgtgcctactgtctactacgtgtctagtgagtgtctactgcatgcctactgcgtgcctactgcctactgcatgcctactgggtgtctaccgagcatttactgcgtgcctactgatgcacgggatggctcccaccagagaaccacccagccccaaatgctgacggcatggaggccgagacacggtgagagcgatgcagggaagggggctggcagggagggccagggtagtcacagaggccgctctgaggagctgggctttgagctgagtccaaggcgtggagaggcagcatcctttccctgaggggccagagaaggagcattccaggaggaagggcaa

SEQ ID NO: 468760 - DNA, 714 bp, Homo sapiens
gtgaatggcgaggcccagagagaacagccaagtgggtgtcgctgcaatggaaccagtctgatggggtccaggaggagctgggcagcagaagcctgctccggagagctgcagcctcgatggaggagccacagcccgcagcagctgaagctgcagggaagggacggcccccaccctaggcctggccaggagggacagggcggaacccgtgccctggaagctcactctctccccgtcctccagtctcccttgctgccttctgggggcagagaggaagagaggggattggaagagacaacgggagaaagacctacactgaagcccctctcggacctactcagtgctgaggatgggccgccggtggatgcacgaacctcctcttcctctgtgcttcctccacctccttctacacccacaacaccgaacatggacagaggcatccagaaatatcctctcaagctgaaatccccacgtctctggttttacttctgtatacctcctaagtatcggagcttcaacttctttgtccatctgctgaagcagagaatctgctccatccatgatgaaatgtaaagcctgcagatgcataaatctcttgaaaacaggtgagagaaaggccaggcagccatcctcggatagaccactgaacttaacgagccctgtgcttcctgggcccttaatctaaataagaaacataccgaaagctataaaagctac

SEQ ID NO: 468761 - DNA, 786 bp, Homo sapiens
gaagaagctaggaagcctcctcccgcagcatccgcgcatccagagcctccagagcctgggagctcttgggtgccctggcgtccgctccagtccttgcccactgcccactccaatggatgtggtatttctgaccttccctgattcctgggccatcatcacgcagaaacagctccagctcagcatccctttggcagagccccaggcacactttccgccccaagataaaatcaaacatcaaaggaatgcttacgaggaagaaatcaattccagacagatcaaagccgagtgtggaaacctccccattaccagaagcagccagctcagctcccatgaaatagcgaggaggggagtgcattccttagggcctcttccagtggccatggccattttatcacctaagtttatggagggcgggagggaagtgattcgtttgcatgagcacgcagggcagcatcagagctatcttgggggccagcactctgggaaggctgccgcaatgaggatctccccatttcccagctctgctcccagcgctgatgctctcttgggctccaggaagactcaagttacccaaagctccggccctgacagcctgaagcctcccgcccagcagaaaagacaggaccctttccccagacatcgcagaaaaagcctcatggcagctgactggttctaatctagtcccacaaccatccctagatcaattgctgtgaccaggagaacactcatggagccatgtctagtccaacggccacatcctgagaaggggacaggcccctgacaaca

SEQ ID NO: 468762 - DNA, 537 bp, Homo sapiens
catctgatgataaggaaatgggggtggtgggtcagtatgtatacacatgtgtgcatctgtttgcatatgtatgagtttgtgggtgtgtgcatgagttttgtgtgtgcgtgtgtgtatgagtttgaacgtcagaagtacaatcatcccaactacgagcctattctttgctccttgaaatggattaaattaaaggacgagtctcattttgacaactcacctcaccattgtcaaacaaagtacccgaattttgtttctgaattccacatcacagcgctgtccttggccaagtacaacatgaagatgctacatgttggcccagcaggaaggggcacagaagacaggagctctgagagccggccaaggtccagacgcagagaaagcagatggtgtggaatgagcgggcagattagccagcctgtgggctcgaccccactgccagcattgcttgaagctcaagcacatcatcaaagcatttgggaaaatgtcagtacaataggagagtgacctgagagcacaccttgcaacacaggaccccac

SEQ ID NO: 468763 - DNA, 2447 bp, Homo sapiens
caggttgggtcctggctccatcgtcatccctgggccaccagagtagaggattttcagttgacaatggccttcaaggttcccagtgccctgatctcccactaccttcttgagggcgtctgcttcccttctctccatcacctgctcctccaggccactctgttcctccaccctccaggcaccgccatccagaggctctacaagcagctccctctgcctggcccctgctcctccagctacctgtgtgttctgtccctcactgccttccagtgtggggatgacgatcagaggcgacgtcacaaggcccctgccaggagtaacctgggtgctacatgcaaagcacctgggactcagcactcgccctgtgatttgcgttgcatgattttgcatagcaccgacattctcagattcatggagacaaagtgtcggggagagcctcatttaaattcagacgtggctgattctgaaggctgtgttgagatttttgaaatctgcaataaattgtgatttttgttcttcttcctgctccactcccttttcccctccttcccctcctccttcctctcctcctccccctcttcctcctcctccccttacccctcctcctcttttctcctcctccttcttcttgttcttcgtcttcctctccttctcctcctccttcttcttcgtcttcctctccttctccttcttcttcttccttctcctcctcctccccttctctttctcctcccccttccccttcccattccccttcctcctcctcctcctcctctcctctttcttctttcttttcttcttcctttcttctttcttccttctttcctccttctttcctcctcctcctcctcctccttcttcttctaaattaataggctttattttttagggcagttttgggttcccagcaaaattgagcagaaagtacagatgggtcccatgtaccctctgtatccacagaggcaccatcaacattctacaccagagcggtccatttgttacaatcatttcccctacactgacacatcagtatcacccacagtccatagttcacattagggttcactcttggtgttgcacatcctatgggttttcacaagtgtataatgatgtgtatctgccattctattatcatacagagtactttcactgccctaaaagctttctgtgttccgcccatccatctttccctcccctgcaacctctggcagccactgaatgttttactatctccataattttaccttctccagagtgtcacatagtcggaatcatacagcacgtagccttttcagattgacttcttttacttagtaatatgaatgtaagtttcttccacatattttcataacatgatagctcatttcttcttagcacaaaatcatgttccatcttttcaatgtagcacagtttatccattcacctactgaaggatgtcttggtggctttggctttcgagttttggcagttatgaataaagctgctataaacatctgtgtgcacctaagtctttagtttatttgggtaaataccaaggagcatgacggtcttcccaggtgaaaatacatgcaatgaatgagagctccatatccttgcaagcacgttgcgttgtgaatgttttggatttgcaccattttataataatacatgtgtactatctcgttgttgtagtttgcagttccctaatgacatatgatgtggagcatcttttcaggtgcttatttaccatctgcctatcttctttgttttgcattttatgtttataaatgtctgtgatctgtgttgaattaagggtgtaaggtttgtggctggcttcattttttacagtggatgacccattgtttcagcaccatctgttgaaaagatgatcttgttccattgcactgcttttgctccattgtcaaagatcagtcaactataattacgtgggctgatttctgcactctctattctattccattgatctgtttgtctgttctttcaccaatgctgcacagctttgattactgtagctttgtagtaagtcttcaggttgggtagcgtcagtcctctcactttgtttttctccttcagtattgattgggttgatcgttctgggtctttggcaactccatataaaatttagaatcagtctgttgatagccacaagataacttgctgggattttgactggtattgcattaaatatatagatcaagtctagaataactgacatctttacaacattgagccctcctgtccatgaacatccatttatttatttcttatttgatattttatgatacaatttccaacagtggagacaaatcgttctgtatctctgctacagaatggctgtagggttctgtggttagatgtgtacagtggtgccagaccgctggggtcaagttctccccatccttcttgggcaggttatgcctttctataaaatggggtgataatggtacctt

SEQ ID NO: 468764 - DNA, 1014 bp, Homo sapiens
tttaggtttcaggacctgtttctctgttcaaagagaaaggggcctcggcatctcaagcccccgagctccatgaccatctctcacacactgtcttcacctcctgtgttctcaggcagctccatcgactcagtgaccagctcctccgctgccagggctctgaggtcttggctgctcaccccctgggtttgccccactgtttctgatcggcctcctttgcataaggaccctggaccctttctgcatctccctttgcagatgtcagctgccattctagatggggggggggcggtgcagctgtgacatccccacagcacatacagctgtgaactcccagctcctcactgagcacacacccgcctccaccgtcctccggcaccgcccacgagtcctgcctccctggggtccaggatgtcgggctgtgggagagcctccttggcagctcatgaggaagaactggagaccttggtgccctgcaattcccaggccaaccctgacctgtcattcagccccagcgtctaccagcatgccagcatccaagagtcgcataaccgctgcaagagagggctcatgaaggcaatggacacgggtccaagccacctggattcccgcctggatgaggcagccgcctccccacgggcctccccactacggttcttgtccccacccctgctctccccaacactgcagccttccaaattctctcttccagagtcagagccacgatcgcctccaaggccacaaagcctgccaggtttccgttccccttctgatggctgcaccctctgccctggctccctccgccccagactgaacgcttcctcgcagtttctgaacaggccagatgctccagcctggacatctctaccgctgctgtttcccctgcctggacctcaccctcttccctctgggaaaaatgcggctgccctgagtcccccagcccctgctcagatgttacctcctcagtgaggccctcctcgagggtgccatccgaaatcacagcaccccttccctgga

SEQ ID NO: 468765 - DNA, 868 bp, Homo sapiens
tgacctgactctccagctgcatcttcagccatgcacagacctgttctcctggccccagtcgtacatgcctgtgttctgtttctcgatcatagcaaacttgctccagccttggggcctgtgcactgtgggcccctctgcctgaacaggcttcccttggatcttcacgttagctcattccttgacattcagctctcagcgcaaatgcccccttctcagagacttcccctcgctacccaacgaccgagtccctcaccctgccccgtctccacacttggcttgtgccttccactgcacgctccactatctgaagtcgcaggtgctagttatcatcatcaccatgaccatcaccaccatcacctcatcaccattacatcatcatcatcatcaccttcatcactactattacatcatcactatcatgaccattacatcaccatcaccatcacctcatcaccatcatcaccattaccaccattacatcatcactatcacaaccattacatcatcatcaccacgaccatcaccaccatcacctcatcaccgtttcatcatcatcattaccttcatcactaacattacatcatcactatcacaaccattatcgcatcaccatcaccaacacatcatcactatcacgactattacatcaccatcacctcatcaccaccaccgccatcacctcatcaccacgacccccatcacctcatcaccaccacccccatcacctcatcaccaccaccgccatcacctcatcaccaccaccgccatcacctcatcaccacgacccccatcacttcatcaccattaccaccattacaacatcattaccatgaccatcacacccatcacctcatcaccatgaatcatc

SEQ ID NO: 468766 - DNA, 1718 bp, Homo sapiens
cagtctggacgcgtctaccagccctagttaccaacggggacggaatgaagggacccgacttcctgggcgcccctgccgacatgcagacagataaaggcccaaatcagcgcagtcaagcgcctcagaagagtccaccatggggagagagccgcagtgaccgaagagtcctccctgcagtcctgagcacacttgcaggcgattccccttgtgtggctggccctctgatgattaactcgttctttgctgtggcacctgctgttctcattggctcctccaggacagcaggcaagaagaatccgcagcctgtgatacccacacaggacgcactggaggccccgatctgtgattggcatctgaagtgcggggccgtcttgtgggctgagtccctgacctgtggggtctggaccaattccagcatgtggatgaccacaccctcccttttcgcctgaagcctgcttttcccctttaaacactgaagccctcaaaatcatctttggagaaaggcagaggccacagatgattgcttcttatatacatactatacacaaatatagtatatacatatgataaatagcatgtatatactgtattatagtatatacatacaataaatagcatgtatacactgtattatagtatatacatacgataaatagcatgtatacactgtattatagtatatacatacgataaatagcatgtacatactgtattatagaatatacagtatatagtatatacagtatatatacatatatagtatatactgtatatatacatatacagtacatactgtgtgtatatatatacatatacagtatatactgtgtatatacatataaaatatatgctgtgtatacacatatatgtatatattgtgtatatacatatatgtatatattctgtatatacatatatagtatatattgtatatgtactatatacagtagtatatacacaacatataccatatatacagtagtatatacacaatatatactatatatacgtagcatatataagatatatacgtagcatatatacgatatatactatatatacatagtatatatatgatatatacgatatatactatatatacatagtatatatatgatatatacgacatatactatatatacgtagtatacatacaatatatactatatatacgtagtatacatacaatatatactatatatacgtagtatacatacaatatatactatatatacgtagtatatatacaatatatactatatatacatatatacatacatacatatgtgtatatatactacatgtatatactatatacatatgtgtgtatatactatatactatgtagcatatacatactatatagtatatactatatatgtgtatatgtagcacgtactatatgagtatatatagcatgtatatcctatatgtgtgtgtataccacttgtatgtactatatgggtgtatatagcttatatgtactatatgtgtgtatatagcatgtatatactatatgtgtgcatatagtatgtatatactatatatttacagtggatgtgtgtgtatatatatattatatatattatatatataatgtatatataatatataatatatatatataaattatatatattatatatataatgtatatataatatatataatatatatataaattatatatatatgtaatatatattatatatatattt

SEQ ID NO: 468767 - DNA, 3252 bp, Homo sapiens
cgttgtcaaatccattttgtatgtagagccaactgtcttctcttccggtgagcactccggagcagaaacgttcagggctcccagcaaccgagagagagttctgactcctccataccctcatcgacgtttggggtcctcggtctttatgttagccttgctcagagtgtgtgtgatgtgtccagtggaaaatcattgtgattttgttttcctaatgaccagtgacgttgagcaattgttcctgtgcttattggccatttggaattcttttccgtgaagtgtcattgtcccagaaacgggtcactatcctgagagcccagccctggtgaggcaggccccactccctggaggtctgactccaagcagagccaaccagaagctagagggcaagagttccttgtcgacggcgttgggcgagatcagcctcctggtgcacagagtgcaggggagggcgcggcgtcacgtgtgtgagtctgatcttggcttccatcagctgatgtgagccttcgagtctgggctcggggcaggagtgactcggggtgcgggaggcggggagattctcaccactgaagtggacgtaaacacacgtcagacgcgagcccagacgtgggtgtcaccaacccctttcaatgacaagccccacagtagacgaggacgtttttggttgcgcaagcggcttctgaagtggttcctgtgggcactgcgggaattctccggagcctcacagtccccgatgtgggatagaccagagagctggggaacgggagcccgcctgagatggaggatccaggcccctcggggcgtccccacgtcagatccctggggtcaagcctgtccccaggatgactccccaggttttgacctgatcgctgcacccatgaggctcccggtgttctgccgtctgaggccgcagcctgctcctccccggcctgcttctcatccagggcacgccggctgccccccactagctgcttatcccagagcccgggagtcagtcccactccccagattctgcgcctggtcttgtccactccatcatcgcatcttgtcagctctgtttccaaaaggatgccttgactttacccacatctctctgccccactcccacctccacttccctggtccaagccgccatcactcgtggctggatgtcctcaaaggcgtctcagctcgacttccagggttgctgccctccaccccgggaactgaggatctatagcgcagccacagcaatcttctggcagtgtccattggcgaatgcatccgggcttcccttcctttcctttcctttcctgtcctttccttctctccacctctctctctctttctctccttccttcctttctctctttctttccttccttccttccttcttttgttttgtaggttgattgctttttacaagttttaaaatttaaagggactaaattgataagcagacaggtgatgtgtaactctttgctgatctgttgttacccagtgatagctgaagcttctttagaacacagatgctattaaaacatgctttgtttcagggagggaggtggtgatggtgagaagaaaggctgacactgagaacaatctcatgatatcagatctctaaaattttgtgcaagttcagagaattttctccattggataagggtcagcctcacttgtcctcttaaagcacttaggacaccacctgaaggctttggtggccttccctccctcctccatcccacaaatatgtataaatccttaatttaattcaataaaaagttgatatggtctggtctttgtgctctggagactaagagtctattaagggagttgagataaggacgcaaagactgaaacttcaggcagagcttggtaagtgccatgataggtgtagacgtgatactttggaagttcagagaagggaagcagggccctgaagtgattagggcattaatgcaggaggaggcctgtccgggttcaattttctgtttctctttttactacttgtgtactctttgctaagttatttaatagttctgtgcctcggtttccttactttctaaagatatagaaactatcagtacccacctcttagaattatcagaaatattagataaaatgatgcgcataagatataaataaaacagcatcttactgctaaatattcaatttgtagcactaaggatagaggcattttatcttaaggttgaatagaatttaaatgtaagataaaggtgggcaaggaacttccaaatggaaccatgtaaacaaaagaagcatgaggagcaagaaagcatggttggcagtagctgaaatactcagtttacttgagaaaatgggaaggagaagatgataatattgggaagttatgtgggatcataatggggaagaacattagtaaccattctctttttggtgaatgattatatgttaccgaagatctctaagcaggaaagatgttgagatggcttagtttctctaacaattatcttccccagaaatcatttgcaacatataataatgtaataaaacttattttttcccttctgcttgatttaggtttattatgctctatcttccccagttgcgtaacatggcaacttactagattattgacttgaggctcttttttcttttctaatatattttgctctattttccccagtttcttaatgtggcaagttattagattattgatttgaggctttttttttctaatatatggatttggtgctataaatttccctctaagcactgccttagctataccccacaaattgtgatatgttgtattttcattttcacttagttccaaatagtttctaatttctgctgagagttcatacttgacctatggattagttgggagtatgtttgttaatcaaaaagtgatttgagatttgcctgctattttttctgttactgatttctagctcaatttcattatgtccagagagcatattttgtgtggttttacttcttttaaattgattaaggtctgttttatcttggtgaatgcttctcatgtgcacttgagaagaatgtgtattctgctgttgttgggtggagtgttccataaacgtcaattagatccagatggttgatcatgctgttcatttcttctaagtcctttgctgattttctgcctcatagtttggtctattagtctatagtcacagctctttggagaaacgaaaccaataggatatgtttctatctatctgtctacctatctacctacctctctgtaaataagagagattgatatggaaa

SEQ ID NO: 468768 - DNA, 615 bp, Homo sapiens
ctgaagccacatgagtttgcaacctctgactctcagacagccaataaggatacggagctgccttggcctccacccacctcactgcgcatacgccatccccacccaacaaccccagcccccacacctgggctccgcagagggcagccctgcctggccttttctgggccccaccaccaactcttcccacagacctgccagcctggccacaccctatcacactcagttcagggacctgctgggtggtgtgggccacaatgacacggctaactgctgccactgcagtgtcagacacccggaaacacagagggagcctgctaagtgtctgctgcacattcctgaggatgctgcagggtacccatggctagtcagacgggagggcgcccgtgcccagagtgggtgtttattgagcgccgactgtgtaccacggctagaggggagggtgccagtgccaagtgggcatgaagccccgactgcataccttagctacaggcagggcactagtgcccggagtgaccgctgagtcccgcagctccatgtagttccctttaaagcccctctcagactccatgacctgtcatcactccctcaaccctgagcctcttgaaagcagggagt

SEQ ID NO: 468769 - DNA, 1081 bp, Homo sapiens
agcagcaggcagagatagctctgggtgccggcacctcggaagcagccacccttcatggagaaggggacagagctgctggtgtccccatcccagagtggacctgggggcgatcagcccctcctcgtgaagcacagggaggacagcgccgtggtactgagtctcatcgacactattgacaccgtcatgggccatgtatcctccaacctgcacggcagcacgccccaggtcaccgtggagggctcctctgccatggcagagttttccgtggccaaaatcctgcccaagaccgtgaattcctcccattaccgcttcccggcccacgggcagagcttcatccagatcccccacgaggccttccacaggcacgcctggagcaccgtcgtgggtctgctgtaccacagcatgcactactacctgaacaacatctggcccgcccacaccaagatcgcggaggccatgcatcaccaggactgcctgctgttcgccaccagccacctgatttccctggaggtgtccccaccacccaccctgtctcagaacctgtcgggctctccactcattacggtccacctcaagcacagattggtgagtggcggtgccttcacccttgtcgccgcctttgatctggtttcacactgaggaatgctgggttgtctgtgtgcttgcataaagaatctccaacagccttgtgacttctcacctggaccagcagcctccgcgtgttctgtctgctccattctccccacagtttacagacttattgtcaaacacacagatcaggtggtgctacttacctattcaaagaccttctgggactcaaggttccctgcaggagaatttacactctgggcctgtcggcagatgtctagcaggtctttcccgcccggctttccatgcacctctggctctccttccaagcccagcagacagctgctgtcattgctggtgtcgttccctgtgcctggtgggcctgtctcacccatctgctgtctgagttcacccatctcaggaggagccttctctcctccaagccctctgcggcctgcacagaagggaacctccctccacgcggtctttgcgc

SEQ ID NO: 468770 - DNA, 2016 bp, Homo sapiens
gtgtggctggtccctgcggggccgctctgttaccgatgttcaggcttcgccctcttgttcctcgtgcgtggtgctcgggagcgccttctccgcaggccgtgtccccagggcagcccgcaggacctgtgggtctccaggtcgcggccgtcatgtgggctgagccctccgtccagcactgcttcatgtggacgcctgtcctccctggtgagtgtcctccctggtcagtgtcctccctggtcagcacttctcccaggtcagtgtccttcccggtcagcgtcctccctggtcaatgctccctcccaggtcagtgtcctccctggtcagtgctccctctctgctcggtgtcctccctggtcagtgtccttcctggtcaatgctccctccctggtcagtgctccctccctggtcagtgtcctccctggtcagtgctcctccctggtcagtgtcctcctggtcagtgctccctccctggtcaatgctccctccctggtcagtgctccctccctggtcagtgtcctccctggtcagtgctccctccctggtcagtgtcctccctggtcagtgctcctccctggtcagtgtcctccctggtcagggtcctccctggtcagcgctccctccctggtcagtgtcctctctccctggtcagtgtcctccctggtcagcgctccctccctggtcagtgtcctccctggtcagtgccccctccctggtcaatgctccctccctgatcagtgccccctccctggccagtgtcctccctggtgagtgctccctccctggtcagtgtcctccctggtcagtgccccctccctgggcagtgtcctccctggtcagtgctccctccctggtcagtgtcctccctggtcagtgccccctccctgggcagtgtcctccctggtgagtgctccctccctggtcagtgccccctccctgggcagtgtcctccctggtcagtgctccctccctggtcagtgtcctccctggtcagtgtcctccctgggcagtgtcctccctggtgagtgctccctccctggtcagtgtcctccctggtcagtgtcctccctggtcagtgctccctccctggtcaatgctccctccctggccagtgtcctccctggtgagtgctccctccctggtcagtgtcctccctggtcaatgctccctccctggtcagcgctccctccctggtcagtgtcctccctgccatccagggagccccctgtcgggaggagaggggcagatacagagtcaggtcagcagcctggtgagaggagccatagaggcagtgacataatgtgcaatgtgaggacagttgcaccgccctcatttcttggaagacgtgggtcagtgggaggaggcttggctcagcgtaaagacatcatcaccaacagccacccccaaagaatgacagccctgctgatggcctgcttctccctcaaggagagcagatgcttgtcggtcacagagctctctctggccctgccccagcactggggcttatgcacacagtgtgctgagtggaaggctgagggcgcagggtcagccggggccagcagtgcttctgacactgtgaatccagcagcggacggcacggtgggtgggcagccccgcaccatctttgaaatcaccatcgtcatcgtcatcatcatcatcatcatcaatgagattctcagtcaggacatccgcttctgggaaggcctccgggagctacagtcatggcagaaggtggagggaaccaggcacgtcttacatgggcagatcaagagagatacctcacaagcagagttcacggtcggtttgcattcctatgagaatcaaacgcccggctgatctgataggaggggagctcaggaacgattccttgtttcttttgattgacatcaacaatagccaatggcctgcttcattttccttcttttctgctgtttgatttgaaacagaacttgggtgtttgtattcaaatggtaattttccatcaaaattcctgtttaaacaaattgggaatctcaggaa

SEQ ID NO: 468771 - DNA, 1525 bp, Homo sapiens
ctgtaccaggctgtgagggagaggacagagccagacagaccgaatcctgccctgtgactctcacatcccagtgctggggacctggggaggtgacaagcaggcagacagacaggcagtgacaggtacatgcaagatcagatcccaaggagcagcacgtgggaggcctgctggcaggaggctgccctgaggagtggccacgtggatggggggatcgtggggcatcgggggagaggcatcacacacctggctggcggcgggggcacaccttcaagtctgaggagcggccaggaggccgaggggctggaggaggcaggtcaggggctacgggcagatctttccgggcccgggggcaactttaagggcctcggctttcccctgagtaaggtgggtgcccccggagggtctgagcagagggacgaagcgatggacttgggctttcacaaaccctgtacagggcagggtgagcaggtagacggggctgccgccaggctcaggataggagtggaggatgttagcttcaggtctgctatggggggcttgctgacagggtcaaggatttgggggctcaaaaagttgaaggacagagtggccactaactgacaagggcatgactctgggacagtccagggctgggagtgaggtcaggagggaggtttggacatgctccgtttgggaggcctgtggacgcccaggtggggaagctgcattggtggtggtagagctggagctagaatggaggacggagatgcagattttgcagttgtctagctgggcacgttgccaccccgagcaaaaaactgcttctgttagtgagaaagaactggagaaagaatactggtcaggcgtcatcagggtcagcccaggccctggaggaggtgtgcctggctctgtcaggcctctctgggcctcctccagacctggcttctgagcaggggctgccctctgcctcctatatgtctgatcgctgtgcccctgatccttcttctgagcaggggctgccctctgcctcctatatgtctgatcgctgtgcccctgatccttcttctgcctcctatatgtctgatcgctgtgcccctgatccttcttctgagcaggggctgccctctgcctcctatatgtctgatcgctgtgcccctgatccttcttctgagcaggggctgccctctgcctcctgtatttctgatcgctgtgcccctgatccttcttctgagcaggggctgccctctaccttctgtatgtctgatcgctgtgcccctgatccttcttctgagcaggggctgccctctgcctcctgtatgtctgatcgctgtgcccctgatccttcttctgagcaggggctgccctctgcctcctgtatgtctgatcgctgtgcccctgatccttcttctgagcaggggctgccctctgcctcctgtatgtctgatcgctgtgcccctgatccttcttctgagcaggggctgccctctgcctcctgtatgtctgatcgctgtgcccctgatccttctggagggagatttcagagaag

SEQ ID NO: 468772 - DNA, 590 bp, Homo sapiens
gttgggggacctgtcacacccgagtggggtgaccacgggctcgcgacctgtatgaggcgagactccagcattctaggggatgaccgcaaaaccaggccctcagcagaggccgcctccttccagagccttctgtggctgggcgggggtctccaggcagctccgcagcccccgcaaataccccctgggagaggcggtctgagacgcgctttagaagttgacctgctgctctgcggggactcggtgcgggagacgagtggaggctgctgcgtcatccagacacgtaagcagcacagtgaggccaccaacagcagcaaccgagtcttcgtgtactgcgccttcctggacttcaggtaccctctgcacaggggagagcagctcgcctccacggctcacctgcccaatgtctgggggatctcccaccatcgctgtgatcacaattctcctctagacgtgagcccaccgtgaatggctcccacagtcacagcggtgttgaaaactcagctccccgcagggccggggagtggagggaggggtggggcctccggatcctcagctgctgctcagctgtggcccctggggcttgttccatg

SEQ ID NO: 468773 - DNA, 2925 bp, Homo sapiens
cggctctgcttccctccgcagttgctggctgtcgttggcgagtggcgccatctgggcctttgtagcccctgccctgtttgtcatcgtgggctcctctgggccagtgactgagggtcttatttcccggaatgctcaggaaggcggtgctttccaggcgggtccactcgaggccccagggctcttccagtcgaggcggcagcaccggtggacaccaggagctgctggtcaacattggcatcctcatcgctgtgaccagagtcatctcacagatcagcgccgacaactacaagatccatggagaccccagtgccttcaagttgacggccaaggcagcggccgtgctgctgcccatcctgggtacctcgtgggtctttggcgtgcttgctgtcaacggttgtgctgtggttttccagtacatgtttgccacgctcaactccctgcagggactgttcatattcctctttcattgtctcctgaattcagaggtgagagccgccttcaagcacaaaaccaaggtctggtcgctcacgagcagctccgcccgcacctccaacgcgaagcccttccactcggacctcatgaatgggacccggccaggcatggcctccaccaagctcagccccttgggacaagagcagccactctgcccaccgcgtcgacctgtcagccgtgtgagccgggaggctgccaaccacggcaggctgcgctcagaacacacccccccaaacagaatgaaatgctccacctttgctcatggaccctctccttgctgatgtctggacatgggtgttgtggcccgagacagctgtctcccctgtgactctggctgtcggagcacactgctcagcccagcacgctgatgcccaggccagcgtgggccctcctgccttgcatcccacccgtgggctgagtgacttcctcgggggattccccaggacacagtggcctgactgtgatggtgcccttgagcctcccttcatcactcagcatcagacccagcgaggccaggacactcggggccggtcccgcagcaccaggaggggatgttcagcctctgtgccttggtggggcttggggactcagggccaaagaggtggttcaggtccccacgcaccctcagtcaggcgcaggcagctgggggtgtgtggggaagagcatgcggagtccccagtgtctgaatccactgagtggtgagttccccacagccggcgctagccgtggtgtgtgtctctgtaggtggtgccggcgtgggccaacctgtgctgtgtcatcagttgggggcccctgcccaagccgagctcgagccgtgggcgggagtcgttgactctccaggtgagggcgacccctctgccctgtccttgggggggtcccctctgctcacgtgaagagccgctctgggccttgaggctgcctgatggtgcctgtgcttgggggagcttctcggccatccgctgtgagttttgcctctttggaccccaattcggccttaagatgccctcctccctcgtgtgccagcctccttggttgttcttgggccacaggagctggccgtgtccccgcagtgcctggtgtccaggtggaaagtggagggcattttccagggcactgctttccccagaggcttcctcatggctcacaggcactctacgaagtttctaatgggcagaccacgcggcaggtagcacagtgcgctccgtctggtcaccatgagaccgacctgcgctgagtccccactgacctggagagggagggctggtgacagccgtgtcttctgtgttgagggaaatttatggactcagattcagccccagaggagatgggataattgttatggacccatgtgtgggcatgatcctgtggaacacaggtttgggatcatagatgtgaattaagacaccaccgagatacgggctgtgaggttcatactgtgctgatagcactcgtggtgtctgtgaaatgtgggtaagacattcaaacctggttttgatactggaaactcttcctttaaaactgtgaccatgatttcattcagcccctccacacccctatgtctgccttgtttcagagtgagttttctatggagcctgtggcccttttgcagcccacctggtggcttcttaatgtaactcttcccctggtcgcctggagtggaccactcatctgcaggcctctcctgcatggggagggtaggcagggagcagcatgtctgcaggggtgaacctttgctcttctgtcaggcgaggcccaggctgcaccagccacctgccacatggtgacagtgccacgggccctgcgtatggcccctgcaaccgtgctctggcgggcacacctggctgctgcaggccaaggccgctgttcagtgaagagtcccatgtttagtatggactaaagtcccatgtttagccactgccccaggctcccgtgaccccagaaaccaggtcacatggaccacagtgccagatcctcatcacgccggtgagcacctagaagtgagaacactgtattcctacaatgtacacttggatatttctccttatttagtttctagtgaaacaaatcaagtaaggaactatctttagtttagatggaattatttgtttttaattgttgccgtattcatctatatagctaatatttcaagataagtaatgaacaaaacctgtctaaaccttttgtttccaatgaatgaaagtcatgcactttatttataggctctatgttttggcttctgcagtacttttattatctatacataatttggccaaaaataagaaattggaaagaatgaaatgtttagtttatagtagaagaaagatgatgacactaagttgtgaaaatatgttgtgatttttatgaaataaactcatgtcctgaaaagaaagtgtgctccttaaaatctgttgctggtggaatgtgaacaggacc

SEQ ID NO: 468774 - DNA, 1376 bp, Homo sapiens
ttcccagactgcactggaacactgggctttatgcccccacattcagtgcatttgtatagagcaaatgctggccgccaacccaggcaagaccccgatcagccttctgcaggagtatgggaccagaatagggaagacgcctgtgtacgaccttctcaaagccgagggccaagcccaccagcctaatttcaccttccgggtcaccgttggcgacaccagctgcactggtcagggccccagcaagaaggcagccaagcacaaggcagctgaggtggccctcaaacacctcaaaggggggagcatgctggagccggccctggaggacagcagcagctgctaccccagttccatctgtagtcctaaccagtccttggacccaagctggtcaggcatgaggaagtctgagaataaacagaatggaatagttgggaaccagaacttgaagaaatcacagcagctggagctggtggtgcagaaaggctggcggttgccggagtacacagtgacccaggagtctgggccagcccaccgcaaagaattcaccatgacctgtcgagtggagcgtttcattgagattgggagtggcacttccaaaaaattggcaaagcggaatgcggcggccaaaatgctgcttcgagtgcacacggtgcctctggatgcccgggatggcaatgaggtggagcctgatgatgaccacttctccattggtgtgggctcccgcctggatggtcttcgaaaccggggcccaggttgcacctgggattctctacgaaattcagtaggagagaagatcctgtccctccgcagttgctccctgggctccctgggtgccctgggccctgcctgctgccgtgtcctcagtgagctctctgaggagcaggcctttcacgtcagctacctggatattgaggagctgagcctgagtggactctgccagtgcctggtggaactgtccacccagccggccactgtgtgtcatggctctgcaaccaccagggaggcagcccgtgcccctgccatgcttgtgtccctttcagactcacctctggggctgaaacaggaaggcttggctccggccaggtctctccattgcctggagcaggactttaccccaaagagagacaacacagctgatgcagacggtggtaatggtggccagcagccacctacgctcattcctgctaggtaaccaccttggtatggggtgggggaatttatgtctgtatgcacatttgtgtgtacaaacagacacagagaaatcagtcctgtactatgagagggatgactagagttatgggaggctgtagtggggtggagggagtcctttaatctgccttaggatccccacctttcctgttcttccagacacccccaccccc

SEQ ID NO: 468775 - DNA, 524 bp, Homo sapiens
gcttctttgagggtcttggttataaatgagaagaaaaggatacattaagagaagaatgacaaaaatcatttctggtgttcaggagattgatccatggatattggggactgctatctggtttgggagtatggaagaagtcatgcttcatttgccactgagaaagtataaaccattaattagtagttcactattaacctatagaaatattactagtttggaggacctgctcctgctgcactggacggagctgcagcggctgctttgccttccttcgccaccagtcctggccatcgctggggaggtctgcggaccttggctccaggacctgagcggggggccacacgaggcccatggccctgcccctggctccgtcttccttggccatcagggcctcaagcccctctgcggcccccacctcgaacggggtcttctgcaagggactctcccacaccctccttgccttctttgagctggcctggcactcatgaacttccaatacttggtacatgtgcacaacgtgcagg

SEQ ID NO: 468776 - DNA, 596 bp, Homo sapiens
ttgataaggcacagatcctgacgtaacctgtaagacttgtccagtttctggacaggtaaaatgggggaattaaggcttctgaggcaagtgggcagtgtcagtcttcagccactgagccaagaagatctgggaaggagtcagtcagagagccttgggccagagttccaggggctctgggagtggctgccagatttccagcacttgaaacaagatactgggggaggaggtcctgaagaaatgcctgactgctgtggcttaggcgttttgaagttcttgtgtgctggagatgtggctggagtttctctcacagcagcggcaagtaattgcaactcttctgtattattgtacaccttgaagacaaggttaattaagacctgtgtggggtttaagggccaaaatctaatttttggagctttatttaatgttgggaatgaattgcgtaataaaatgcatattgagaataagacagccttctgacctttcagggtctagggctgtgaagcgtctcagagttgctgccaaataagtcatgaactggggtgggtttttacatttgatgaaaaagagcctaaacactaactgatttgggagaggtc

SEQ ID NO: 468777 - DNA, 704 bp, Homo sapiens
cactccccagacctgtccccagtcagctgattccagcgtcttctcccgcttatgagaacctgcggtatttggttttctgttcctgtattaaactggaacaagacaaggatgtccactctcatcactcctattcatcatggtactggaagtgctacccaaagcagtcaggtgaaaaaagaaatgcaaggcatccgaaaagaaatagaagtcaaactatatctcttcatagatgatatgatcctatatctagaaaagcccagagaatctgccaaaagcctcctagaactgataaacaacttcagtaaagtttcagaatatagaatcagtgtacaaaaatcagtagcttttctatacaccaataatattcaagctgagagccaaatccagaatgcaatctcatttttagtagccacacacaaaactaaaatacctaggaatacatctaaccaaggaagtgaaagatctctgcaaagagaactaaaaaatactgcttaaagaaatcatagatgacacacacaaatagaaaaatatttcatgcttatgaacagaaagaatcaatattggtaaaatagccatactgcccaaagaaatctacagattcaacactattcctatcagactactcatctcatttttcacagaactagaaaaaaccattctaaaatttatatggaacaagaaaacagcctggatagccaaagcaa

SEQ ID NO: 468778 - DNA, 1405 bp, Homo sapiens
gcacagtctctggtgggcagtatgttgtgtgccgctcccaacttacagaaccagcaagttctgacaggactacctggagtgatgcctaatattcagtatcaagtaatcccacagttccagaccgttgatgggcaacagctgcagtttgctgccactggggcccaagtgcagcaggatggttctggtcaaatacagatcataccaggtgcaaaccaacagattatcacaaatcgaggaagtggaggcaacatcattgctgctatgccaaacctactccagcaggctgtccccctccaaggcctggctaataatgtactctcaggacagactcagtatgtgaccaatgtaccagtggccctgaatgggaacatcaccttgctacctgtcaacagcgtttctgcagctaccttgactcccagctctcaggcagtcacgatcagcagctctgggtcccaggagagtggctcacagcctgtcacctcagggactaccatcagttctgccagcttggtatcatcacaagccagttccagctcctttttcaccaatgccaatagctactcaactactactaccaccagcaacatgggaattatgaactttactaccagtggatcatcagggaccaactctcaaggccagacaccccagagggtcagtgggctacaggggtctgatgctctgaacatccagcaaaaccagacatctggaggctcattgcaagcaggccagcaaaaagaaggagagcaaaaccagcagacacagcagcaacaaattcttatccagcctcagctagttcaagggggacaggccctccaggccctccaagcagcaccattgtcagggcagacctttacaactcaagccatctcccaggaaaccctccagaacctccagcttcaggctgttccaaactctggtcccatcatcatccggacaccaacagtggggcccaatggacaggtcagttggcagactctacagctgcagaacctccaagttcagaacccacaagcccaaacaatcaccttagccccaatgcagggtgtttccttggggcagaccagcagcagcaacaccactctcacacccattgcctcagctgcttccattcctgctggcacagtcactgtgaatgctgctcaactctcctccatgccaggcctccagaccattaacctcagtgcattgggtacttcaggaatccaggtgcacccaattcaaggcctgccgttggctatagcaaatgccccaggcaaataaatttgagaaatagagattctgtttaagtaatttggaactgaagtaaaggaaacttctccagttagtttgaggaaggagcacttctgggcaatattctggagtctgtaatactcagtgtttttggtgctgcagaataatggtt

SEQ ID NO: 468779 - DNA, 889 bp, Homo sapiens
taagtgttctagcaagctgaaatggacactaaatcgccttttttgacccagccgtggaaatcacatggcctcgtggaagtcaaatggcatcacaataaccataatccatcagccgcactcttctccttgtttttttccagtctctgctccttctgggactcaaagtgcaagtgcctttgcattatcttacaggggacaagcaaataagaatgaatgctatgttggaggcattagaggagtcccattgtatgagaaactcttactcccccaaacaatattttactgccccttgctgcttcctcattacccacccccaaatattccaggttttctactttggtcttgtaatggcagagacctaagtactatttaccctataggcaataacttaggacatatgtgcctgatcttctcagagtcagggatcttctctgtcttggttacctctgtatcctgggcccaagtgcagggactgctacatatatgctctcaaaaaatacttgtcaagggaataaatcagtcggtgcaggctgaatataaacacctgtttgagaatggttgccatagattcatgatccgcctggaggggcatgaaggaacagccagttttactaagcccaaattcttcttctactactactactgctactactattactactactacctgtgattctgtgattccctacatacaactcacacttctgtgaagatactttctgtaaacaaaccctcctgaaaccatcccgatttgaaaagacatcatgggtggctttggaggatggacacgactggaaaggacacagatgggccctctgtgggcttctataagagcaaagattagcctcctgatattccgtgggaaatgaggagacacactacacagccc

SEQ ID NO: 468780 - DNA, 1045 bp, Homo sapiens
aagatcaggtagtatagcaatagcggatgcccctcccccccgccaaactcctgtgtcccaggtcgatctcagactgctatgctagcagcaaccaaggctctgtggccgtgggacccaccgagccaggcatgggaggggatctcctggtctgctggttgcaaagaccatgggaaaagcacttgggcaggagggtactgctcctctaggtacagtcattcacagcttcccttggctaggaaagggaaatcccccgaccccttgtgcttcccagatggagatgagaaatttattgggaactggagtaaaggtcactcttcctatgctttagcaaaaagactggcagcattttgcctcttccctagagaactgtggaacattgaacttgagaaagatgatttagggtatctggcagaagaaatttctaagcagaaaagcattgaagatgtaacgtggctgtttctaaaagtgtatacttacatgtgtgaagaaagagatggtctgaaattggaatttatatttaaaagggaagcagagtataaaagtttggaaaatttgcagcccaaccatgcagtagaaaagaagaacccactttctggggagaaattcaagctgggtgcagacatttgcataagtagtgaggaactaaatgttaatacccaagacaagggggaaaatatctccagggcatttcagagatcttcatggcagcccctgccatcacaggcccagaggcctaggaggaaaaaatggttttgtgggccaggctcagagccctgctgctctattcaggctcgggacatggcgccctgcatttcagctacttcagctctagccatggctacaaggggccaaggtacagtttgggccattgcttcagagggtgcaagccccaactcttggtggcttccatgtggtgttgggcctgtgggtgcacagaaggcaagagttgaggtttggggacctctgcctagatttcagaggatgtatggaaatgcctggatgtccaggcagacatctactgcaggggtggagccctcatagagaa

SEQ ID NO: 468781 - DNA, 3525 bp, Homo sapiens
accaaatcagactctctgggggtagagcctgagaatctgcactttcaagaagcttccaaagtgatctttgtgataaccaccaagcaagaaataagaagacttaaaaaaagtaccaattgtgggcgctgggggacctaagagactgagaaagagccaccagaatggttgactgggtgttgggtggacagaagtccgagggggtggccgtcagccagccttggagcagttcaaatggaaaaagtctgtgcacatgcctgacacctagtcaccagcagatcaatggtgggctcagcagggctcctttcagcaccaaaagcatagactacaccacaggcaacaaccagggtgtttcttgctctataaatatttgcaaggtgaatgcacagaaacttcttggaacttttgaaggagcatcattaacaccaatatctgatcaatttgttctaagaggctgtttgctaataagcatctttgaaaagataacccacaacaaaaagtcagtgctcctgctcataagatgtgcagaagtaagagcgatccgtggagaattgcctctcaagagcatgtggacatggactaaggaaaagttacaaagactaatggcaagtcaaggaatccgagttaacattcggtgactagactcccaaatgcgtttcacaaatgggtttccagaaaaactgctgtcagcaattgattgtgatatggggcaaatgagtttgcaatttcatgatgaataatctatcactccctatcttagaaactcaggcattccatcttttttgacaggcagcatgtatattctattgccaggaaggaaggcagttgtcaaattcctaatttttctctttgaaaaattaaacatttaactcaaacgtaagatctagaggaacacataagatcttaattacaaagtgcaatccaagatttgcactaattaatatgctgatgaaaaattcattgaaattcagagaagaaccaagagggaaaaaattggccagtgttaacactgagttctataaaatgtgtaagtctatccaaataggcagctgcctttctcggataattatcatttcatcattcatgattattttatttgtaagactttagttgcacatccaaaactatgcagacagaatatttccttaaactttctgatttctaacagttaaattatactagtatatgagggacttttaaagaccagcttagttacctgaaatatgggggttttttgtttttttgtttttgtttttgttttttttttaagtgagagaagccatgtgcttgattcctggttttggcattcactaactgtgacctcccgcaggttgcttaagccctttgagcctgttcctcctatccaaatggggacaataataatgcatgaggttgtggtaaggaatggctattgttgtgaatcagttgcatgccttccttttagtcttcatcacaccagacctggtactagatggggactgaaatatagtaactgatttgttattgatacagctgggttgatgaataagctaatgccagctgtctggattcaaatccagtacctgtgtgaccttaggcaagttacataagttcgctgctcagtttccttattggcaaaatagggatgacaattgtactgcatggtggttataaagattatacaaaaatacaaaaaacacttataaattgtacttggcccatactaagcactttataagcgttggctgttataatcattattactattatttaccaagttggtgatttttctacatcctaataccactaggtctattattatttcctttaaatcaactttatcagtctcctgagcagtgtctgtggaattacaggttggaagggatagttatgtttatataatacaattgaaaataaaatacataatgatttaaataaaacctgatcatctgaactccacgcccgccgttcctcaccattatttcctctccaagtacaccgggaataacactgttttatgatgttactcaatcattcattcatctgtctgcagagattataagttgcatgaaggcaggcaccgaagctggattcatgttttactctgcaaacagtttacaagtgccctagaccaggggtccccaacccccaagccacgaactggtaccagtttgtggcctattaggatctgggccaccagcaggcggtgagtgcaggtgagcaagcattactgcctgagctccgcctcctgtcagctcagctgcagcattagattctcacaaaagcccgaaccctattgtgaactgctgatgcgagggatctaggttatgcgctccttatgagaatctaatccctgatccccaaatcatccctcccgactccctcccatttgtggaaaaactgtcttccacaaaaccagtccctggtgccaaaaaaggttggggactgctgccctagactcgtcacacacgcttgataactgttagtgaaatggatgaatgaatgcagttgactgaaatgcatcaactgatgttcaggaacccagaacattctacatgaaggtcagaaaataataaattaagaatttcacaataaacaaattgtgaaataaaatagcaaattaagaacggacgtgagctgccacctccctcttcccacctgtaccccgggacaatgagaatggcctccactcttaattttcctctcttccctttcaacagactaacctcctggctttttgacagcaagttgaaggggtttttaagatggaatgaatcttgcagttgtaatgaatcagaaattgggggaaaacatcagattttagcagcagcagaattctctcactgtttaaaaagcacttgtcccttaggcttggagagattagaagttaataatttgtattgaaatccagcaaagctcttcacagagtcctattgcttgtccctgtcttttgaatgacaagtaggaaaatagagactgatttgaaaacctagggctatttaactaaagcagcaataattcttccattagaaactaagaaatgagaaggtaggaatggcccagacaccacaacaaaacagatgttgctggtggaaggccacacctttttccaaatgaaactcaccagcccttcaagttgagttagctttctaaccctctggacctcaaagtggcaaaaatatttttacatgctagttaaaatgccctcaagctacagtcattagatttgctggacagtggcatcattctgatgttatcggctctgtcttcccgttttcatgaataatgtataagaagcagctattagaaatggattcttccatggctgacagtatcaccaccagacaagcccctggattctcagtcatttcatctgtagctctaacagatctcccttcttttccctctcactgctttctgcctgcctttcatggatggagactcttccaaagactccttatccctgcttctccctcaatactaggaaactggcagggaggcaaaaggaggagcccattaccttcctgccttttaactgttgctcagtgt

SEQ ID NO: 468782 - DNA, 541 bp, Homo sapiens
acaaccatttttctctcctatgcctccaggcctctgtttgaaggggagaattgactcacacggttaccacatgataggccttttgcaagctacggagcagggaagccagtctgagtcccaaaacctcaaaagaaggaaagctgacattgcatatttcagtctatggctgaaggcccaagagcccttggcaaaacactggtgcccctctactgcatgtttgctagagtttgctggaggtctactccagatcctgtttgcctgggtatcaccagtggaggctgcagaacagccaagattgctgcctattccttccctggaagccttcttatttggggcttcctccaaccaagccatcaactcctccagaatagacagcaccttgggaaacctcctgaaggtggccaccttggtcttttataatagagaccaggaggagacccaagagattaaaaagaaaacacaagagagggacagaggctccagtagctgctttcaagcttgcaaattccagtatctccaggatgcatctgctagttgatac

SEQ ID NO: 468783 - DNA, 674 bp, Homo sapiens
tggagaacctttatgtctagcattgaaatctgcttgggtccccttccacgctgtggatgctttgttgtttcgctctttgcaatgaatcttgctgctgctcactctctgggttggcactgtctttatgagctgtatcactcaccgcaaaggtctgcagcttcactcttgagccaacgggaccacgaacccacggggaggaatgaacacatccaaacatcagaaggaacaaactccagacatgccgcctttaagaacagtaacactcaccgtgaggatcatccagaaggaaccaaccctgctaaaaccttgactttagctcagtacaaaggatttcagacttacagcctccataaggagttatttggctatgagcatgatttatccttcaaaaaaggcaagagtgaccctaaaggcaattcagagatcatcaaggataccactcccaaagcttgcagggctagttcctccttagtttcaaagagtggggttttcaaatctcttcagtttttagagggtcaaaatgcccccatccagtgcctcagggtggagatgtccttccagagagccctaggaaggcggtagatcctgagaatgtgcaaccaaagtggttgggttacagcttggttttacacattttagggagacataagacatcaactataacatgtaagatt

SEQ ID NO: 468784 - DNA, 3388 bp, Homo sapiens
gcggcttcattcttgaagtcaaggagtacccggctgtgaagtgtcagtctgcccctactggggggtgcctcccagttaggctgctcgggggtcaggggtcagggaccctcttgaggaggcagatttcagtaggtaaaggaaaattacagtcaaagggggttggttctctggcgggcaggagtgggggtcacaaggtgctcagtgggggtgtttttgagccaggatgagccacgaaaaggactttcacaagagttacccgaagctcagcatccgtgatggtttaggagcttcccaggtgattgggcagtgtcagtctttagccgctaagccaagaaggagtcagtcagacagccttgggccagaattccaggggctctgggagtggctgccagaggttcggcacagaaataatggattggagcacagagataagaggttggggcacagaaataagggattggagcgcagagataagaggttggggcatggaaataagggattggggtgcagagataagaggttggggcacggaaataagggattggagcacagagataagagattggggcacggaaataagggattggagcgcagagataagaggttggggcacggaaataagggattggagcgcagagataagaggaccaaggcaggcatccctgtgtggtctgacacctttgaaacgtgggtgaataatcagagaggcacccctgcaatgattaaacaccaagggaaggctgacttcccagtccatgaccggcgccagagttttgggtccacggataaaacatgtctcctttgtctctaccagaaaatgaaaggaattgaaattaagagaagggagagattgaagtgtggcaccaagattgaaaggagaaagaggctgagggatagtgtgggaggttggagaagagagtcaaaagaggccgcttactggatttgaaattggtgagatgtttcttgggctgtttcttcaccgacctaatgatccgtaaggagcatgtttcttaatttacttgtgtttgtaccatttctaaacttcctcttgttattaatttacacttttagttcattatgtcctgagaacgtacttgatgagattttgttttttaaaagtgtgttgaaacttgtttgatggcctaacatatagtctatcctggagaatgtttcatatgctaatgagaataatgtgtattcagcagctgttggaaataatgttctttaaatgtctgttaggttcatttgaaactgaaaaaaaatcttgaatgcatccagaagaaataaatatgaatgaacatatttaagaaactttgaatcattcaaaggaggatatgcgctgccagcaattaaaatgtatttttataatatacatatgtaattcttacatggtataataatggtcagaaataggcatattaatgagattcgtaagtctccaaacactcataatatagtagagttcttaaacatataaaacagggatttttcaataatcagaactggaacaagtggccaaccatcatccaaataatgtttccttatttcaaaatagaacgtcgaaataaatccatgtgtattaaacatcttaattttagaaattatatcataaagtgtagataaatgtaggtaattatccatcttaaggtaagaaaacaattttaagcacacatgcaagtataaaatctgttgagaaaggagatataaaattatataaacatttttaaaaactgtgagtcaaaattacataaaataaaattttaaattaagacttcaaattaaaaaacataattagaaaacatgggacctgtcaaaggctaatatcattgattagataaatacccagagaaaaatattttaagagactgtgaacttatttattaaaaaagtggatttgaccagtgcactaataaaagttcaaactcactattcacaaatcgtgtatttgtgaaaatacacaatttcatgtatttttatgcaaatacattaaaagtaaaacattgaaatgctatttttaacttataaatcaataacttggtgaaagtttaggagaagctaatattttaaatgctgtttgtgttacactctattacctttcctttcttgaatgctattggttaatatgtttgaaacattgtctccaggaatccattttaaagaaataaatgaagagaggaaaaaaaggtaaatgcataaaatattctttgtagatttgtttatacagccaatagaaaacatatgaagtagaattaatttattaataattttgttcttaaattcttgattatattagcaaaaaatcttggcatcgtgggtaaaaaaggagacgggaagtaaaaatatttaagacttttaatcttatacaaagggaatcaataaacagtatttattattcaattcttggtatttctaagtagagatggttattgttatgatagatttttataatttgtgggtcattaattacaaaacaattttcagtttgctaaaatacttccatatttctagcagaaatatagaaagtaaaaatatggtacatttagcatatgaaagaataaaagaaaaaccataaggaaacatttaaaaaagtaataaacaatgaaacagaagtaaaggcaaacatctggtatgacaattaaacttatttaataatagacaaaattttagataaagtaaaaataaaatccaatttcttgctgttaaaaaataactaaccataaacaaaacacagaaacatttaaaaagtaaagggaggaccaaagatacatcaatcaataaaatagcagaaatggcaatattaatattaaaatagaatttaaaaaaattaagaatagcagtttttaaaatcaaatctatacataatatgatagttataagacataacattaaattctacaaataaaaataactttttaatggaaacaattcacaaaaacttgattatattggaaaattttagcatattactactctcaagccttgagagagaaaacagaataagtaccaaatatgcaaatagcataattagatttgataaatatatttccattattttcctctatgataagagaatatactttttcttcaaaatccaaaacatttttacaaattgatgattttaaaagacaaatttaaattaaaatatccaaacagaagaaaatttttaaatagtctccttctagagtaaatagaaattttgagtcaaatagaaaatcaagaatgcatttgtaaacaatttgagaaacatcattgatgctacagcatgttcaaccttttgaatcataaagctgtacattgcagcaaataaatgtttgaattattacaccagagaatacagttacaagcctacaaatcaatcatttaggaaaatattttaaaaagtatgtct

SEQ ID NO: 468785 - DNA, 1486 bp, Homo sapiens
tgctgaccttctgctgtgctgccgggttgctaacaggccatgcatgaactggtactggtccacaacctggggcaagatggatggggagctggaagagggggatggaatggaaatgtggtcttcctcaggagttgggctgcccagctgccagactcttctctaaccgcccccggccgaactcctcttggcatccagatgtccctgctcttctttctttctctgccatgtcgttctgccgttgctggtctgccggtctgctggtgtctgctggtgtgttcttctgcttcgctcaaccttcagctgcttgcgtctgtgcctgctaaggccttaggtttatatgggaacaggatggggggcatggtaggccagagcagtcttggaaaatgcaacatttgggcacgaaaacaggagtgcctgttctcacttaggtctgtgggcacaggcctgagggtggagccatctccagggacactgtccttttttacccaatacttccctggcccccatcctgtgtgagtgagattcttggaggtaaaactataaaaagtgtggaggcccacctgactatgatctccaggacttcctgattgtgatccccaggagtttctccctttcactctagtccacacttagcctccagcaattccactatgccaattccaaatgaccactgaagcgttcctaccagtttatggcttcaacatcttctgctccagataaacatacctcaactctggctctggatttgtccatttctccattttggaggagaggggaattgccttgtaactttagttctttattgagcccaagtaaagttgttgattttcagctttcttgctttaaataaatctaatcccaacataatttccaatcttttgcatgcattttcttctttaaacttccattattttctgtttcttattttctaaaatttcagtgttatatacctttggtgtaggtttaaaaaattcattttattgagtccttaatgaactcttaaattttaggattctttttagtatgtctttgaaaatctgctttttgtttcttgttgtttggatatttattttttctttgagcctataatttattatcttgtttaccctcttttatatttttggcctactttctgggatatttctttaactttgtaattcaacttttctatgaattctgttatatattttgttaccatattttaagtttcaaaggactttatttttagtcatctgaacattccttttgttcttgcttcattggattgtgtctcagtccatgtgagaatattaattatggtttttattgaagatttcttatgtttcctgcattatcattttttcctagagttgatttctgtgtgtgatcatttgcttgttttgtctctactttcatgttggagactctcttcaaatgtctagggatccttgactctcccctcatatttaagaaggaggcctgaaaaagaggccacgaaactcggtgt

SEQ ID NO: 468786 - DNA, 777 bp, Homo sapiens
aggaggaaaaaatggttttgtgggccgagctgagggtcttgctgctttgtgcagtctcgggacttgatgccctgcatcccagctgtggctaaaatgggccagtgtacagctcaggccattgcttcagagggtgccaaacccaagccttggcagctcctacatggtgttgagcctgcaggtgcacggaagtcaagaattgaggtttgggaacctccgcctaggtttcagaggatgtatggaaatgcctggatttccaggcaggggtgtgcttcaggggtgatccctttatggagaaactctgctagggcaatgtggaagggaaatgtgggatgggagcctccaaatagagtccctactggggcactgcctagtggagctgtgggaagaggcccaccatcctccagacctcagaattgtagatccactgacagcttgcactgtagaggtagaaaaaccacagatactcaatgcaagcccatgaaagcagccaggaggggagctgtacattacaaagccacaggggcagagctgtccagggctgtgggatcccacctcttgcatcagcatgaccaggatgtgagacatggagtccaaggaaatcattttggaactggaatattctgggcccatgcttggaaagcagtgccaaagtggacggcagcaactgccttaggaaaaagttcccagaaagcaagacaagatgcagagtaggatgaagatgtgatctggcaccaggagcaaggcattggtagaggaagaactagaataattctggaa

SEQ ID NO: 468787 - DNA, 491 bp, Homo sapiens
gcgcacgtaaaattcacttctccttttgagtcacggctatacatggggcagactgatgggttagcaactattgatcactttcctgtccaacgattgatcattttcctgtccctagcatcggctggcctatttccacctatccttatctccatcccttcttctcctcatagaaaaccttccattttgcaactaaaggtgtcctccccatccccattcgttgaggtgaagaacaacaatgctcatacttcacacatattagattttgttagaactctggccacgtgtacacactcacaccagcagcagcagggcagcagggtccacaaccccacatacgtgcaagggtggggcagcagcagcaaggcaagatccatgcatgctggcaaagtggtcaggaaaggtgatgggaaggtgcacatcagtaggaacccatctgtagaagctctctgatgtttatgcagggtctgttggtgaaggagctatggcagtgg

SEQ ID NO: 468788 - DNA, 765 bp, Homo sapiens
cttggttcacagggcagagtaaagtttaaggaattatttgtgcataagaatgactcttaacttgctcggggagtgagactctgccggattcattctggataagatgaagtctagggctttcccaaacttctgtaagaaccacaaccaatccatctgggtttctctgcaagcccagagtccccaggatgaaagctcaggccccagtgacccctttcctcttccctctctgcaagtcttatttctctgtttggataacagccacagatagtaacactaaacatgatgatgatgatgatgatgatgatgatgataatgaggccaatatttatcgaccacacgtgtcaggttctgtgctaagtgcttcacatgtgctaactcatctgctctttgcaacaaccctagaaggcaggcaatacaattgccccattttacaaccaatgactgctgaagtcgtgaagtcagacatctcttacattccaatcagagatagcagatgtcccaggaacaaaacatgctcatccgctcttggcacgggagtgtcactcaacttgcaggagactttcaaagccttaaatgtttaaactatgagctctttccgttagctcagaagttcagttcttacagaaaacagaaaattaagattttggataaaaatccttctaagtgcaagtgaacttggagagttttcccaggtcattaaaaagggaaaatcagcctccctaagaaaacaaattctcctctcactgtaagtgtgggttatcaatc

SEQ ID NO: 468789 - DNA, 803 bp, Homo sapiens
ccagttggatccgtggccactgcccagatccccacaccatgctgtcagagaagaccttcaagcagtgctgcaccttcaaacaaagagtagatggtgagaaggagcttcctgtcctggataaaacaaagttccttgtacctgatcacgtcaacatgagtgaactcaccaagataattaaaaggtgcttacggctcaatgctaatcaagccttcttcctgttggtgaatggacccagcacggtgagtgtttctacaccaacctcagaggtgtatgagggtgagaaggatgaagatggattcctgtacacggtctatgcctcccaggagatatcagacttcagcgtgcagctggaaacttgtctaccagttgcttctatcctcacacttcacaacttcaccgttagagagacagcaagagtcactctctctggttccttgttgaaaaagattctagagcatggttttaataattagccaagcttggttgacgtgcccaattctggagagccaaaaaatgatagtatttttgaggctatgatgaatcaaaccactatgaatatttaagtataaatcttggtgtaaatgtgtttttctttctcttggattaaaacgagagatgggattgttggattgtatagtaagtgtatgcttaacctaataagaaactgcctgtttcctaaagtggacatacaatttgcattgcttccagcaacagatgagagttccagttgctctacatcctcttcattctaatggtgtatgctgtgcgttgtagttttaatttgcattgtcataatgacaatc

SEQ ID NO: 468790 - DNA, 1294 bp, Homo sapiens
gagttccttctggggctgcctcctcttgcatcccacaggcaaggtgccctgttcctcttgcacccactctgatcccactccccatcttctcaccgcctctctgtccaccccaacaacacacctgccccatcccctcgttctgctctttactcatggcctcttaccctcctggaggctcctggcacttaatacccaacctccgtcaggatattacgatgaggacctgccccaccagcgtggaccccgacaccctgtcttgccacagggtatttgtcaaggtcttcgtcttctccgctagaggataccgggcctccagccctcttggtctggcacctctcaatccagaagatgggctccagtctctcaatccagaagatgggctccagtcttttttgcatcgtaccttcggcatctgtaaaagcgacacttcagccatggaggagaggcaccctgtgaagccttctctggttcacaatggccagatgactgtctcctttcagagccagtttgctgtgacattgctttcagtcttcctcgtttcccaggagtctcatgtcttcggtttccacgtgggatttgtgccaactgaccctgccgttaatgaagtttgcttgcaccattgatcagcaacgtcctaagttttggttgttatggattttaaaaaccccatcaatttgtacgaataaaaacaaaacaaaataaaaccgctttcactgatactaatgctttaaaaaaatagtataagagttagaagtggcatctccaagtggaaatttgttcactagtgtccattttgtccccaggggacagttaccaatgcctggagacatttttggttgtctccaaaatgggggagggggaaggggctactgggacctcatggggagaggccagggatgttgctaaacaccctccagttcacaggacagcccctcaacaaaaagtatccggctccaaatgcgcaaaggttgagaaaccctcagctaccctttgcccacgtctcagtagagagtagaacatatttgctccatgaatagacacatgccagtcatttttctttcctttgctgagatcatccggtcacattctttgaccaggggtgtgagatttggtaaatccagctccaggcccagcttggtcattcacttgtttcgtgatccgggctgatgtttcacatcaagtcagtaaagccttttctccttgtcctgtacccacattgagctttagtgaagaccaaatggggtattgggcaggaaacgatttggaaaagtataaggtgccttacaaatcaaat

SEQ ID NO: 468791 - DNA, 3156 bp, Homo sapiens
acatcgtaatgacagatttcacgatctgggcactcgccttgtgccagatgtttttgcattcacgatcttttggatcttccagttaatcctgcagagcaggttcctccctccacatccattttccatataatgaaatggaggtccagagaagacccggaaatggagacgtgcacgcaggtggtttcccggggcgtgctcttacaacaaatgcctgcgaggaattaggacggcaggagggggccaagaaggaagttgggctgggatgcagctgcaatggggagctctggagctggggtgatctttcagagatgccccaaattgaggtgaagggggctgagtcttcacacccctgcatcaactgtacccatgcctatcactggatatgggcgcctctgcccaaggtcatttccaggggccctggtatcacaggagtctgcaaagtggagctggaaaaggccagcatggagctgagcgacctgcaggggctcggccagctggtcagctgccggctggggcttcatgccaggcccaaggatgccccggccagcctgctggtccaccttgtgccctgctgcctcaggcctcgggcaggggaaggaagggtcatcctatggcttgccatcatcttgtccctgttcccttccagcttccgaaagggtgcctgtccccaatttgggctggacagttggcatggatgggggaagcctggaagacggaggtgtgagaacctgggtgtgtgagtccagcctttctccccagagtctctcctctgtatctgccttctctgtgtctctctgcttctcagtctcttcccatcttcctttctcctttctctctgcctctctgttccctccctcccttagtctctttgcccatctctgacttccaggctctctagatctaactccatgtctctctgtctttatgtctttctctctttcccataaaacaaggatgtcacccccgcacaaggatagtgatccttcagcccctcccccccaccaacacactgtccttaaatgcacactaaaaccctaaatgtccatggtgtaccctcagctcatgggtccccactgcagccatctcatctaggaacccaccctgtcttcttgtgggtggaatgaagttcacccttgaccgtcttaaggacactccctctgagcccagggcacagcacacagtaggtctttgggaatggtttgaggagtgaccatgatgggtacagctgttcaggctggtcctgctgctgtgtggttttatctccgagaaactcaccctcccagagtggaaggaagagaagcaaacacacacacccccacccacctggctcccctcacccttccttgacagaggaaagacagttttcttgtctccggctgtcttccttcccatccatcatttcctcttttctgctccctcctccagtcccacacccaatcactcttactgactcctggtgccctcccccaatctccatctccattggccccaacgcaaacagtctctcctccttgcagggatcagaagtgagccagggtgatggggagggaggtgtcttgagaatcaagagtagagatgattccgggatatgcatagagctctgttggttaatagcccggaagcctccctctccccacacctccagtcacatggaaggcggggagcagaatttccatctgagatttctcagggcttcccatcttaagtgagaacccaataccatcctttaacaatgatattcaaagttataccgtgatgctatgttgtaagcatttatccatgcttagatctttaagaagtaatttataaaatttcaatacagaatgatccaaaccccaacaaaacaaagcaaaacacccaggcacagaaaacagcctggaaagaaataagctataatattaatgttggttttctttgagtggtgagatgctaagtaaaacatgtatacttttaaatctttttttctgtattttccaaatatttcttagtgagccttttaagattaattcattgttctcaagtggctatgtttatccatgcagctgtatatgtgcttaacattttgaacacctatttaacagtgctattttgaaagtactttattctcgtgtttacgttttatttatttttggagtaggtaataccttcgtgtggtttataactcaaaagctaccaaaaaagtatgaagtgaaactactacctctctccctccctggccacctggctctccttcctagagggaaacggtagcacctgttccttatatatgcttccagcgacaacatcatgttaggaattcagaaacatacatactcctttaagaatagagattactcaaggattctgtagcaccactgagttttcccttctgcttcaggagacctagtcctgggccaaagtattcctgattacaaaagcaatgcctgaatgaaaacattctggaaacaggcaatatagaaccttcactgtaattgtaccctcagacacaatcaacaggaacatcttttggttaatattttgctgtggtttgaatgtgtctcccaaaattcatgtgttggaaatttaatccctaatgcaacagagttgagagttgggacctttaagagatgattagttcttgagggtgctgtcctaatgaatagattaatgttgttaatgtgagagtgggtttgttatcaaagtgtgctggcccgagaatgaccacctcaggtgagcctcctggatctctggctttgggcattcccagcaggtgggaggcagcttaaggcaggctcttagcaggtgaaaatccagctccagcccccgctgagccccagcgagaaaggaattgcctgcaggctcttccctaatcctccaacggaacctccctcacttacctctctctgtggtaacaaaggatctttctgctctggtggtcacattcctgacagcttagttcagaatgggggaagggacagcaggattttggggggccgttgggcaatttctattggcctgagtttcctcctctgagaaactgacacagagtgggaagaagacaagcagcagaagggtcagtaggcaaaactgtattgctgatgtgttgtgtattaccaacctccacgcttccccatttcagacttagatgtgctcagcaagtgtttactgaaaacccgg

SEQ ID NO: 468792 - DNA, 807 bp, Homo sapiens
gtgagttcaccttgagtgcctactgtggatctagtgctattctaggctttgcagataaagagatgaacaaaacagtgtctgacttcttgaagtgagcaatggctatgatttattattattattttatgatcaaaaggttccagggtttttgagactcttggcggatgctgcagatgggtgcagggagacatgagggtgctgctggggagggcagcggaatggcttcatctgggacctttaatcagatccctgagaaaagtccgtgcaaggagaggatacaggggcctccagtctccgtcaaaatccccgacacctcctgggtgcattccagcgaagcatccccggggtaccagaggcgctgggtccggggccctcgctggggcttttcagcaaccagggaaagcacttcctatctggtggctatcatcatcatcatcatcatcagcagcagcagcagcagcagcagcagcagcatcaacattgttacctgtctcaggacactggccaagaatactttcattgaattgcaaagcatctcaatcaaaaacaaactgccaaatgccaaagctcaaagcttgctaaaggagaacgacaaatttgctgtataccgagagcccacagcaaagcggagcctgcattccagctttggatcctttctgctaccaacgaggttctaatctgggcttcaggggtgctggggtggatatgggaacctcctgaggctgcaaacaaaatgttctgaatgtagacaagtatttttctggggagagggtctggagcttacataaggcttaaagaggaacgtaa

SEQ ID NO: 468793 - DNA, 597 bp, Homo sapiens
ccgcctctggcttctctgttctcttcctgcgatcgtctctctccgataaagaatgctggcctcggtgggcacccacagtccctgcagttggactaccctgctcccagctcccataaatagtttggctgataccttgaggactaaagaagtgcatggtggggcactagtcccagtggggctcctcatctcctgtcatgaccccctcagggactgggactgtggcagaaatcagacccattgtacagatggggaagttgaggttcaaaagatacagccacccacccagggccacactgtgattagaggccctctgactcctgggcctttacacccatctataggaggatggccagacctggttggtgaaattgaagtacccccactcccactcaaggccagtcctctagcgccttatcttcccttgtcttcttgtggaagaagagataaaagtaattcttatggccgcttcaccactggcgacggccagccccgtccccctcctgctgcatttccctggtccggccagataaagggttaggcctaagcacatgtcattttctttgtgtgaaatcaatattcagcaaagtttatctgccc

SEQ ID NO: 468794 - DNA, 1717 bp, Homo sapiens
caaggccacctgagtaacgtgctcagagcggaacctggcaggcatgaggcagccgggctgcagcgggccggcccctctccctggttagggaggcgtggagaagcccctcaccggggcagcctgccctccctccacctgcggcagtggccggctgggcaggggagagcgagaggctctgcggataggacccggggtgggggcctgtcctgaccagcgagtggcagggagcagcatccaagacacttgcccttggaaccgagccgccttgttgtgaggaagcccagtccacgtggaacggcatatgtaggtgtgctggccgacaatccagttgaggtcccaggcagcagccggcattggccaccagacagaagttaattaagtgctctgcctctggagggtgaatcccattatcagctgcacccccccgaccccaacatcagctgtgtgtttacttgtttatggtgcagtgaatcgtgtttgagagatgaagccatgcagggaggcttgctttctggctgagacctttaaagccagcagcctctgagctcatccagggtacgttcttcagcgtttccgatgtccttggctcagtcgggccatcttggtggcagctgcccggagctggaggagaacaggcctcaatgtctcctattattactggaacgtcaagtacccctgaagtggagggcaaggctggccctgtctgccagcgacagggcgcgccccaacaacatctactacgaggatgaaatgagacgattcacagtgctggaaagcacccgaccaccccgagggcagcgccctcatgctaatgtccaggttacctcccggggtcgaggagcagagcagatggccctgtgccttcagagtcacgtgctcatgactggcattccagcccttaggatgatgtggggacaccctacatccctccacccatggccccacgggctgctctgtaatgatccccatgtcttggcatgtgtccttcattacagccccctggatggagcatggctccccacagccatcctggaccctgcagctctgggccaagacaactgtccaagatggggctgcctttattggataattattccagcgggaaatctgtgggaagtttccggtgacctggctgtgagttaggaggttaaggtaaatgtgatcctgtgggaaaataaaatccctggattccctcatctctttttttgggccttcctcaccccctcaggtgggactgcaggctggagggagctgtcctttgattagatctgcattgagggcagggaggctaacactgtcattggatcaacctggggttgaaaagtgcattttcccttcttgtcctcagaacagccctatgaggcagggaaacaggaaaaatgaagaccatctttgaggaataaactgacttgcctaaggtcacatggtcctctgcctgactctggagatgcaatgggaatgaaacaggcgtggaccttggccttgatctcgtgaagcggcagggaagatgggacttaagcaattgtataaataattaactcattgcagttggaggacagcctcaactgaagcaattgtatctatgaaatcagaggttcaaggagctggttatatatttctagcatgcattaaatatgtagctattatgtaaaataaaatgtcaaccaaacacatctccatgtgtgccccattcttaaggtgggctgctgttccaagc

SEQ ID NO: 468795 - DNA, 882 bp, Homo sapiens
ttgcttctggggaggggaccgaggaatgtagtcagaaaatggttcgcgagggcaatgccccttgtatcagcctggctctggcctcaattcaaattgaggaaattgaggagagtttgatgaaggggaaagtttaccaatatgtgtgcagggtgtgggagagcacggtgctcagggctactcacagcaaggagcaggaccccaacatgcttccctccctgcaatctcattttggggatcccctttggccaaaccaaactggaagccagagggcacagtggaacctgcaggatccattccaggccatctcccacagcactgagcagcatggagaaggaggtggtcttgggctgaccacgcagatccctgtttctctcaagttggcccgctctgcacatctccctttgcttacaggttgtgatagttcctccccttggtcccttctggtctaagattggcaataattttcctctgctacccagaatcctgtgtcctccctcctggtccccttccaccctgccatactcctgcaatgagtgctttgtagatcatcctaactgcactgtgtaatcctgttgggaccctaactagtaggttgtaaatggaaaatcagctctatttgctgtcacttgcagggaaccatcatcataaatgtaataaaaatgatgtttatttttgaccaaatgaaataaagtctttgggtgtctatttaaatggacatgttaaaatcataatagcactaagctgagactttcttctccagctcacctcaccccagccccctgcttctactcctggggatcacttccccaaataacctttgtgttgggctctaatttggggaaaacccaaggctaggcagctagtattaatactatgtctcta

SEQ ID NO: 468796 - DNA, 571 bp, Homo sapiens
gccgccacctctgccagaggtcccatcttgtctggccccatggtgtacttggctttcagagaagagatggagatgaagggcccgcgaggatgttcagctggtggtcccaagaagactcagaacaagatggttagaggcatggatccagcagccagaacaccagggctcaatagttctgcccctagttactatgactcatgtgcaagtgaacttactgaatcctcgaatcaactgtttgccttccgctctttggccctcaaaggtcctggctgggctgtgctgagaaggaaactgaagagcagttctctggaggagctgcttttagacagtgcagatgaagacccgagacccctgacacaagctcacaggcagagggggaaggctcttgctggcgaggtgctcattggggtcataccagacaccagacagaagcgcagtgggaacggtggtggctgcttctgagcagctgcccagatgcctccactttgaagttctcaaacatgctgagcccagagccagaaagcactgaagttggtgttcttgtctttaatcagaagtgtttcaagtgtcc

SEQ ID NO: 468797 - DNA, 1091 bp, Homo sapiens
gctgactttctagacagggaaaagccagtaagcgaacacatggcacatgtatgtgacataagagcaggctgtgatcagtgccacaaagacacagaaagagggggtggtgtctgggcggagacacaaataaagattccatctctgggtaaagtgggtcccagcacggaagccctgggtcttggcagtgtgcgggggcttggtggagatgaggccacgtggggcagagtcccagggagaggctcatccacagaagtattggtgagatattttgaagactctctcaatttcggtttttctggtgttttgctcactattagaatgggtctatgggtttttgggaggaatacaacagaggcgaagggcccttctcatcacaccttattggagggtatgatattaacatcacttatcactgatgaagttaacccgaactcactggtttaggcagcgtttgtcaagtgtctccaccataaagttactgtttttttcctttcattactatattcttggcatgtgagtaagtccagcccacactcaagggtggggggcaagaattaacctccacttcctaagatgaatttatctacttatattatttggaattcttccataaggatgatctgtttcttgtgcccatctatgcattgaatcattaatttacacctgtatggacttatgtatattccatactttgtgttgtaatccagtactacactacttattttgttcctcaacattatcccagcggtgaccactgggagctctttcaagttgcttcctgtgtctctggagatcctttcattttctgagcacttccttgctctccgacactacaagtcgctatatatttattatatatatttattatattttaatatatataatataataaatatttaaatatatatatattaaatatatatatttaaaatatataaatatttatataatataatatatatttaaatatataatatatttaaatatatattatattatataaatatttaaaatatatttaataaaatataataatttaatataatttattataaaatattttaattaaataatatatattttaatataac

SEQ ID NO: 468798 - DNA, 563 bp, Homo sapiens
aggccagagcagtgagagagttcagggagcagctgctgacatggaggctctggaagatgcccagtggatgggcatttgggtaatcccaacatcacagactcccaaggttaccacagaaggagatggcatcattgagtctcagggttgggaggaatctcagaggccctaccagatgcagaataacttctccattctagaaaagtggtcaatgtctgcttgtcactgcacacccaagtggaagaacccctgtgtccagagcaatagcagaggtgagaaaataaaacagtcgtttccatgttatcacagcgcaggtgctcacctctcaccacacaagatgctgaaactgttcaaagtagctgggggagcccaagcgccttctggggtgactccaggaactggacagtcaggcattcttggagccatctggctttcgcaccctttgatgaatccacaccaatctcctctccactgacagcccctcctctggctccttatttctgctcctgtaaaactttgacttgcagggctttgttttgccatggtgctttattttctgaattttt

SEQ ID NO: 468799 - DNA, 919 bp, Homo sapiens
gcgctcccagccgcagacacgggcgcctctgcactctcaacccctcacccacgcagaccctggcccgccggtgacctcccctgcggctcctccttctgccccggcccagcccctcccctgctgctcctcctcctgccccggcccagcccgtccaccgtcctctcatccccatggcctcgaaccccagcctgccgagccgctcctcacagggtgctgtggctccccgctgcaaaggggcgggtcctggtagggggcgtggcctggccgacttgcggggcggcggcgccctctgccggcagactcgggaacggccacactcgtcacctcgcccccggcccggctcctggacccccctggacctctctgccagctctcctctctcctggaaatgcgcctgcaggactcggaacgtgcagagccccacagtggaaggaaaacataagtcacctccagagattatcacatgcagtggattgctttcagccttttttctgaatataaaatatacatatacgtattttaatacaattgtggcccttctctacgtgctgttctgtgctgcctttttttctctctctccaagtgcttaacttatgttcttgctctgtgactttatatttccacccttgagcaaaccacacaacctctaccttcctcagcctcagtttcctcctttgcaaaatggtggtaatgccaggaatacccacttcacaggcagcggtgaggccccgcacacagcccagtgcatgctgactttccccatctcagcgccttcccaccggtcctgtgtttccatggcctttccccgggtaggggcctttcttttcctagcttcgctcagttccctgctacattgtcgcctcctcgcagaagccgtctctggccgttcccatatggtgatcatatgttaagaattatt

SEQ ID NO: 468800 - DNA, 2366 bp, Homo sapiens
ggcaggagcagtaacaggcctcccatgtgagaccgtgtcatccttcaatcctcagtccaggggactgtcccgcagaacagaggcatggcgagccaatcctgccacatcagctctggctgcggggtcaagaacttcagctcccgctctgccactgtgcccaagcctgggtatcacagctgtgtcagtgccatggcccatcatggggtcagccctggggggctaggctccaggcgcctcggaggctttggcagtcagagcctgtgtacggtggggtctccccggatcgcggtgagttgtagatggcccctacacagcaggggcaggtttggctactgggcagggggcctttgcaggcccagcccaccccgcatcacatctgttaccatcaacgagagcctcctcatgcccctcaacctagagatcgaccccaatgcccagtgtgtgaagcatgaggagaaggagcacatcaggtgtctcaacaagtttgctgccttcattgacaaggtgcgcttcctggagcagcagaacaaactgctggagaccaagctgcagttctaccagaaccgcgagtgctgcgagagcaacctggagcccctgttgcagggctacatggcgactctgcggcgggaggctgagtgcgtggaggccgacagtggcaggctggccttagagctcaactgcacgcaggaggcgctggagggctacaagaagaagtatgaagaagagctggccctcagggccacagctgagaatgagttcatgatgctgaagaaggatgtaggctacacctatctgcacgagacggacctggaggccaactgcgaggaggtgaaggccacagtgacccaacagggtgagaacctccgcagaaccaaggatgagctcaacgagctgaactgcatgatccagaggctgacggcagaggtggagaacgacaagcagcagcgctgcaagctggaggctgcggtggcccagtctgagcagcagggtgaggcagccctcagcaatgcccactgcaagctggctgagctggaggacgccctgcagaaggccaagcaggacatggcctgcatgctcaagcagtaccaggaggtgatgaactccaagctgggcttggacgtggagatcgccacttatcgcaaactgctggagggtgaggagatccggctgtgtgaaggcgtgggctcagtcaatatcttcctgactgtgtgccagatcctcttggaacggagccagctagagggtgtggagtatgtgggaacatctctgcgctttgccctcggatgacaggggctccagatgctgcctcagcatggaagggtggtgtgggtgtggagctgggctcctcacttgctctgagagattgtatattcccagagtcccccaactattcatatgtccagattgaaagactgacggaggctaatcagctgggtttatactgtttgttgcctggaagttcattgtatttgcatgattcctgtatggttccttctttcttttggtgtgcttgattaaatatcaatggcgaaaggctttttcttagtaaccaagttaatgcctgcctccttcattgtcttcccaacccacccaaagccctgactgtcttggtgcatctcacaatgtggtccaccgaccaccacctgcatcagaatccctgtggggtcacttgacttcttcagaattttttctttctaataaaatgttaatccttagttacccttggactgtaccctttgcattccgaggggaatagttctttgatcaggagagagctgcaggagccccagcatcctttgagccagaagagcttgctgtggtgggtttttgctgttggctgcaaggagggctggggcagaggcttacctccccataagcaaaaggcacctctggccagctgaatctgttgaatggtatttgcacacaaagcacggaaatgtattaaaaaattcattcctatctcccaggttctggctgtttgacttttcaatccatggtgccgttattttttgggtatcagatttggcatttttgttttgctcagcccagatccatggtaacatgaagctgttttccccaagcatagactctctgtagcatctcagaaccataggaggcagcagacctggtaaggactctacccactcatctcatagaccccagactgacatgcaaagcatgaaagccacttcctgcccaaggactcaccgagacctggcagtcttggcagaattggggctcaaatttccatttcctgatgtttcagcccctgggatttaacgtttcctgtgggtgaatgatgtcccctaaattgaaagttggcctattgtgattgtcaccatgccctcagggcccaaacagctggg

SEQ ID NO: 468801 - DNA, 2016 bp, Homo sapiens
cctgggtgaaactcagatttgtcaccgactagcaggcagggggccggggcctgttcctactgtattccagcacccattgcagggctgaccccagaagacactcaggaggtgtttgctgtgttgaatggaatgcagacatcccagccaccaccaggaggcacatctgtcccgcctgttttgaatgtctcctctcctggggaggaagggggaatggggacacagctgcacgatgctggggagtccctggtgggtgtcctggagggggtgccctggtctctgtgctcacatccagggctgagcctcagtcccaacaccaaggtgggccgtttcctgggcctcgagcagccatctgtgagatggggtggccagtctccttggaatctgtttgctgactacagggcggagggtcactctggctctaggcatgtggatgtgcatccccggaatcacactcacaggccccagccatgtgctgcgtgcccagctggcagctgtgatgccccagcctggagcctgctgctggcatcctgcccagacagtcccgtgggcctccaggactcaggcttgcctgcccctcctcctgggagcttccagagcctcaggactaagccctaagcagccacagctctgctttctctgtggattcccatattctggacattcatacaaatggaattgtaaaataggtggcctttcgtgactggcttctttcactttgcataatgtttccaaggttcatccatgctgtagcatgtatcagcacaggactcctttatatggcagagaatattccattgtgtaggtgtgccatattttggatagacactgtgacatgtctacacagtgttgtttccacattttagttattaggagtaatgtgataaactttcacgggcatgtttctgcatggacataggtttctatctctcttggatgtatgcctaagagtgatagtgctgactcaccttgtacctctgtggggaccacgctcaggaactgccaggctgtcttccacagtggctgccccatcttacattctctaccatcggccccacatacagtgtctactgcgctttatggggtaaactggccgtgaccagggctgtctcattccgcactgagtctccaggccctgggtagccagccccatagcaggtgcttgagagatgcagaatgagccaatgagaatgtgaaggaatgggttctgctgactatgcttgctctcagatctgactctagacttcccttcagcccctgtccatacagtcttccctgtgatcctgtctctgaccctcgccaggcagtcgtgagctgcttcttggggctcccatgctgtttggccctcattatttatgaatcttctctccgggaggctgagcgtccttccaaggttaagagggagtcttagtcaattctgcagcaccagcctctaatgcagggcttggcgcagcatgggtgctctttggggagagtggggagtcatcccaactctcaggagaggggagccataagggggaaagcaccccccaggaggggctgtttcagggggtcggtgaggcagaggaaaggggactgaggcctcacagagggtggaagcaccgccgccaaatctccaggtcttgggctctctaaatggggagaggagactggagtgtcctggtcctcctcactccatgggctgccaccatcttcactgctttcctggagctgggggtatccaggcactgagaatggttcgggatagggacagagcctagggcttgggggctgctaagtctagacacaatagaggaccccaaggattttctctaggatgtgtataggacaccatgtagtgaggaggcctgtgtgcaatgggcttgtggcttttaacatggcaagtgacttgcaaaccattggggtgtgacgtgcaggttttaagtgtgatttgtatagagccctatttcttccacaggcaatttgcaaattatttacatgtagtgtttctgtttgtataatagtcttcatttctgttcc

SEQ ID NO: 468802 - DNA, 3254 bp, Homo sapiens
ccatgccgtggtgatagatgcagagcaactgccttaagagatggcaggtgacttcttgagagtgcggagcacctggctcctctggggtgggcacaccctcagccttggcagctgcaaaaatgctgaccagctgtcctgccccccaatgaatggcaagccaaacccacgaattaagctcttgactgcccatccacaagccccagtgccaagcacatataaaggcacctgccagtcctcactacaaccagcagaaccttttgggattttgccttcctccctcctgcatctgagctttgtctccaccagcaacatgagccgccaattcacctgcaagtcgggagctgccgccaaggggggcttcagtggctgctcagctgtgctctcagggggcagctcatcctccttccgggcagggagcaaagggctcagtgggggctttggcagccggagcctctacagcctggggggtgtccggagcctcaatgtggccagtggcagcgggaagagtggaggctatggatttggccggggccgggccagtggctttgctggaagcatgtttggcagtgtggccctggggcctgtgtgcccaactgtatgcccacctggaggcatccaccaggttaccgtcaatgagagcctcctggcccccctcaacgtggagctggaccccgagatccagaaagtgcgtgcccaggagcgagagcagatcaaggctctgaacaacaagttcgcctccttcatcgacaaggtgcggttcctggagcagcagaaccaggtactggagaccaagtgggagctgctgcagcagctggacctgaacaactgcaagaacaacctggagcccatcctcgagggctacatcagcaacctgcggaagcagctggagacgctgtctggggacagggtgaggctggactcggagctgaggaatgtgcgggacgtagtggaggactacaagaagaggtatgaggaggaaatcaacaagcggacagcagcagagaacgagtttgtgctgctcaagaaggatgtggatgctgcttacgccaataaggtggaactgcaggccaaggtggaatccatggaccaggagatcaagttcttcaggtgtctctttgaagccgagatcactcagatccagtcccacatcagtgacatgtctgtcatcctgtccatggacaacaaccggaacctagacctggacagcatcattgacgaagtccgcacccagtatgaggagattgccttgaagagtaaggccgaggctgaggccctgtaccagaccaagttccaagagcttcagctggcagctggcaggcatggggacgacctcaaaaacaccaagaatgaaatctcggagctcactcggctcatccagagaatccgctcagagatcgagaacgtgaagaagcaggcttccaacctggagacagccatcgctgatgctgagcagcggggagacaacgccctgaaggatgcccgggccaagctggacgagctggagggcgccctgcaccaggccaaggaggagctggcgcggatgctgcgcgagtaccaggagctcatgagcctgaagctggccctggacatggagatcgccacctatcgcaagctactggagagcgaggagtgcaggatgtcaggagaatttccctcccctgtcagcatctccatcatcagcagcaccagtggcggcagtgtctatggcttccggcccagcatggtcagcggtggctatgtggccaacagcagcaactgcatctctggagtgtgcagcgtgagaggcggggagggcaggagccggggcagtgccaacgattacaaagacaccctagggaagggttccagcctgagtgcaccctccaagaaaaccagtcggtagagaagactgccccgggccccgcctcattccatgacccggctctggatcccacactgtacttcccacagcccactctcagctccatctccaccctgctggtcctgctcccatacacctggcactggccttggccacccacttctcccagcctgtgtcttcctgatcctgggaaggcctggatgaccaagcttggtgaaattcctccctgtacacaccctattaactccttggctgtggtcccccagctacaccaccagcccaggtcctggctgccagctttcctcctctgcccggcctctagcgcagtcgctaactactctgctgggctccctgggtctctgcccaaggccccgcacacactgggacctagcatagttcctgcctatgccaggagctggctctgtgtttaagaaaaggaggactgaaggacaaacaaccaagagtggcccagtccccacccccacatctagctcagtctcaaatctgagtgggaccaagtgcaattcagggcctttttctccactcacctgcacccagaagcagagaaaagcaggcactgttcacttttcctttattcttaatggccttcctctgttgcaacctcaataaacagcacaatctcatggcttggtctctgagtattcaaagtatgcacatgcacctcaattcactcacatgagcgcgcaccatgtacattcatgaatgcatgaagcacaaacacacacacacaagtacatcactgtgtattgcccatgcagcctatatgtctgtgttaattttcaggaggcaaatggggtgtggagcagggtctgggaggaggggcagggagggaggaaaggagaagcccagaaagcgtgtgcatgtactggctggaggcttcagcagatggacatgcacaaactgtgtccagtgacagagaaatggtcgtgttcctgacctgaccttgcctctttctgagactgcacctttcctcgttggaaggtgggcttagtgcacaggtatttgcatttgtccagcccttttctcaccgctcagaggcctggcctcctgcgggggtcagcaggtgggagtcccacactcttggcttctcagatggaaagataagtaacaagtcttggaagttggggctggtgtagggaggagtgagctggggtcccaccatggggtgggggtgggctatgaatttcagtgactggggggttggcactgccccagacatactcctatcccaccttccagaaccactatggtgatggccagtcctgccttgttaagatgaacgtgaaatgatgaagatgaatgttggaacttacttgctcctcaatgatgtgagtgactttttggctgaatcagataatgggttttaaatacc

SEQ ID NO: 468803 - DNA, 1654 bp, Homo sapiens
cctttttctcatgattggcataaaggcaccatatggccctgcaaccacttggttaaactgctctgatgtttctctctccagctctgtcaactcaacctttcccaccatgagtcggcaactgaacatcaagtccagtggtgacaagggcaacttcagtgtgcattcggcagtggtgccaaggaaggctgtgggtagcctggcttcttactgtgcagctggcagaggggctggcgctggctttggcagtcggagcctctatagccttggagggaatcggcgtatttctttcaatgtggctggtggcggcgttcgggctggaggttacggcttcaggcctggctctgggtatggagggggccgggccagtggctttgctggcagtatgtttggcagtgtggccctggggcctgcatgtttgtctgtgtgcccacctgggggcatccaccaggtcactgtcaacaagagcctcttggcccccctcaacgtggagctggaccctgagatccagaaggtgcgcgcccaggagcgggaacagatcaaggtgctgaacgacaagttcgcctccttcattgacaaggtacgcttcctagagcagcagaaccaggttctagaaaccaagtgggagctgctgcagcagctggacctgaacaactgcaagaagaacctggagcccatccttgagggctacatcagcaacctgcggaagcagctggagacactgtctggggacagggtgaggctggactcggagctgagaagcatgagggatctggtggaggactataagaagagatatgaagtggagattaaccggcgcacgacagcagagaatgagtttgtggtgcttaagaaggatgcagatgcagcctacgcagtcaaggtggagcttcaggccaaagtggactcactggacaaagaaatcaagttcctcaagtgtctgtatgatgcagagatcgctcagatccagactcacgccagtgagacctctgtcatcctgtccatggacaacaaccgggacctggaccttgacagcatcatcgctgaggtccgcatgcattatgaggagatcgccctgaagagcaaggccgaggccgaggccctgtaccagaccaaggtgtgcccttgtctcatcaccaacttcctatctctgggaaaccagatccaggagctgcagctggcagccagtcggcatggtgacgacctgaaacacaccaggagcgagatggtggagctgaaccggctcatccagaggatccggtgtgagatcgggaatgtgaagaagcagcgtgccagcctggagacggccatcgctgacgctgagcagcggggagacaatgccctgaaggatgcccaggccaagctggatgagctggagggcgccctgcaccaggccaaggaggagctggcgcggatgctgcgcgagtaccaggagctcatgagcctgaaactggccctggacatggagattgccacctaccgcaagctgctggagggcgaggagtgcaggccctgagttttaaaactgtctgtagtacactcaactgtctgcatcgtggtttagcttttactttcaagctctgattgacacagtcaccttccctgtttccttaggtcccatgtggactaacgacttctcattttcctcgctgccttt

SEQ ID NO: 468804 - DNA, 762 bp, Homo sapiens
tacttgcgagccatgagccgccaactgacccatttcccccgcggggagcgcctgggcttcagcggttgctccgcggtcctctctggcgggatcggcagcagctccgcctcattccgggcccgggtcaagggctcggcctcctttggcagcaagagcctctcctgccttgggggcagccgaagcctggcgctcagcgctgctgcacggcggggcggcggccgcctgggcggcttcgtgggcaccgccttcggcagcgccgggctggggcccaagtgtccctccgtgtgcccacccgggggcatccctcaggtcaccgtcaacaagagcctcctggccccgctcaacgtggagatggaccccgagatccagagggtgcgcgcccaggagcgggagcagatcaaggcgctaaacaacaagttcgcctccttcatcgacaaggtgcggttcctggagcagcagaatcaggtgctagagaccaagtggaacctcctacagcagctggacttgaacaactgcaggaagaacctggagcccatttatgagggctacatcagcaacctgcagaagcagctggagatgctgtctggggacggggtgaggctggattcggagctgaggaacatgcaggatttggtggaggactacaagaagagtgcttactgtttctaacatgctgcatgattgacacaacttatttgttgtgtttgttatttgtctctctctgcttcttaagggcagggatatttgttttgttttgtgcct

SEQ ID NO: 468805 - DNA, 1850 bp, Homo sapiens
ctgggcccactccgacccctccctcaccttctgagcccacccttcctttggaagaccttgctgtctgccatgagtcgccagataagctacagccagcagccctgcaggtcttctggtggggcctactgccagaccttcagcagccacttagcagtggtgtcaggccacagctggatcagctccatcatgtcctcctttgcctccagctcaggaagggctggtggtggccagagtctccatggccttggggggaagaagacgatccctatcagtgtggctggaggtggcacctgggctagtgggttcagcggggctggtgggttcggggggcctggtgggggatgttttggaggcagtggttttggaggtggtggaagagggatgggtggaagctttggtggaagagctgggggctttggcggaggaattggaggcttcagaggaggagccaggggtttctgcagaggagctggtggctttggtggttctggaagctttggtggtcctggtggctttggtggcctccgtgacctcagtgatctgggtggcttcctgggtggaatccaggaagtgactgtcaaccagagccttcttcagcccctccaggagactgaccttaagtttgggcaagtaaaggcccagaagcgggagcagatcaagaccctcaacaacgtttgcctccttcatcgacagtctgaggaaggagttgtgggttcacccaatatgtcaagccctctgtggtatctcagcagtagtgggcctgcttacagcagcaacaggtatgaagatgaggtcagcaagtgcacagctgcagagaatgactttgtggtcctgaagaaggatgtcgatgctgcccacatgaccaaagtggagctggaggccaacgtggagaggatgataggcgagatgaacttcctgaaagccctctacgatgctggaagtctctcctcattgccattcctcgggactcacctgccctgcctcctagaggagagggcatttagaagtccagcaggactgagggggcatgtttgcttggccctgtgggagctgtcccagatgcagtcagacaccagcgacacgtctgtggttctttccatggacaaaaaccgctgcctggacctggacagtatcttgggggagcagcagaccacggccagcaggcatggggatgacctgaggaacaccaagaatgagatcatggagctcaacaggatgacccagaggctgtgggtggagatcgagagcatcaagaagcaggaggtggccctcaaggacaccaatgccaagcttcaggacatcaagtctggactgcggcaggccaaagaggacctggccctgctgctttgtgcgtaccaggcgctgatgaatgccaagctggccctggacgtggagatcgccacctaccggaccctcctggagggcgaggaatgcagggtgtctgggaggtgccagagttccgtgatcctagagactggccacagcagcactggcggcggctgcgccctgggaggaggagtcggagcccgggcccgcggcggtagccggggccgcagcggctggggcttgggcgggagctccgcggtgctcggggggcttctctggctccgggactcctgcgccgtcagccggggtggcggcggcggcggcagcagcgccgccagagagaacaaagctcctcctagagctggcgtccccttcgccctccggcacgccccgctctgagctcccccgcacccccgcggggccccttccctccgctgcttctgacctgtgccccggagccccaccttcccagactgctggcatcgcagcagcccgaaagttgccgcgaaggatgagtaggcggt

SEQ ID NO: 468806 - DNA, 2685 bp, Homo sapiens
ggcgtctgtcttctaatcctactgcaggatgcatgcatctctttgtccaggaagcagcattattcaaggaacagacatcgaggaggcagccattcttgctttcgttctcgttccaaatctgcagaaaaagaacaacggcacgaagaacaagaatgagataaggagagggattggaataagaaggaccaatatcaagacaatgatgggcacagatgggacaaggaccagaaacgatccagtttctcctggccgaggaaaagactttaaatctcggaaggatggagactctaagaaggatgaagaggatgaacatggtgataagaagcctaaggcccagctgttatccctggaggaacttctggccaagaaaaaggctaaggaagaagctgaggttaagcccaagttcctctccaaagcagaacaagaggctgaagctctaaagcaacggcagcaggaggtggaagagcagcagaggatgcttgtagaggagaggaagaaaaggaaacagttccaagacttgggcaggaagattggaaatgaggatgagaaagggcagcagaagatacgggaagagaaggataagagcaaagaactgcatgccattaaggagcattacctgggtggcatcaaaaagcggcaccaaacaagacatctcaatgaccgaaagtttgtttttgagggggatgcatctgaggatacatccattgactacaaccccctgtacaaagaacggcaccagaaaaagttagatgagatgacggacagggactggtggctcttccgtgagggctacagcatcaccaccaaaggtggcaagatccccaatcccatccgatcctggaaagagtcttctctgctgccacacatcttggaggtcattgataaatatccaactgtggctgtcattggtggcatctccagagaagactggggcttcaggctgctcatgggttgtgagattgtgatcgccacccctgggcatttgattgatgtgctggagaatcgctacctggtgctgagctgctgtacctacgtggttctggatgaggcagataggatgattgacgtgggcttcgagccagatgtccagaagatcctggagcacatgcctgtcagcaatcagaagccagacacgatgatcatgttcatggccaccaagcccccagcagtggagtgtctggccaggagctatcttcggcgacctgctgtggtgtaccttgaccccgcaggcaagccccatgagcgtgtggaacaggtcttcctcatgtcagagtcagaaaagaggaaaaagctgctggaaatcttgaagcaaggctttgacccagccatcactatttttgtcaaccagaagaagggctgcgacgtgttggccaaatccctggagaagatggggtacaatgcctgtacactgcacggtggaaaaggccaggagcagcgagagtttgcattgtccaacctcaagcctggggccaaggatgtcttggtgactacagatgtggctggtcatggtattgacatccaagatgtgtctatggttgtcaactatgatatggccaaaaatattgacgattacatccaccgcattggccgcatgggacaagcaggcaagagtggggtggccatcaccttcctcacaaaagaggactctgcagttttctacgagctgaagcaagccatcctggaaagcccagtgtcttcctgtccccccaaactagccaatcacccagatgcccagcataagccaggcaccatcctcaccaagaagcgccggggagagaccatctttgcctgacacagcattcttcctgttcactgagggcatttccaaagctgcctcatgcctgttcttcagaaccctcacatccctttttccaggtcctcactcttgggttatggaggcttaggaaaacaatccgactccctagcccagaccctcaggtcgggaagcctgcatgtggggctgcaaaaggagaagacgatgctgtaggaggcagggagagcaaattaccacagctttttggcccagctctgcccttctttgctttgggattgcactgggccataagctcatgccaggctatgggggcagccagttggcattgctccccagactgaacagaaacctggctgtctgatgggacctcctttggcacagacttgactgtgtaagtgtataaactgcagcagcatcgttgccctagatgccccaggagacctggcaccatgaggattatggacagtggaatcttactgtcatctggacagccgttttcctgtttggatggtaaaggaagttgagaacctttagacctgtgcacagccctgcaccaaggagtgctgtgtgctctaggcatcccttccccaggggattttctaagtagatggggggacagggtgaactgactgtgtcctttgtcactgaatgaaatctctgttttctattctctgagaagatgtttgtatgttctgagaataaatatatgaatatttttaaaaagtgacttgaaaatgagatgcaggaattaaagagagttcttacgtatgacactaatgcctcatcgcagcaggaaagtggcattatattccaaagagctcaaagcaatttggcaactgatgagcccttataagctctggaagccctcagacacaggagccaataaaaaagatggcagaatttctgccttt

SEQ ID NO: 468807 - DNA, 1541 bp, Homo sapiens
tgtggtatccatgatgtcagggttgtgtacagagctagatttcatgggtttaggagctaatcagagacagacggccaaggctagtgccaatgacctgcagcccttcttggagtcctacattggctgcctccaagcctacctggacaagctactgatggaacagagcctgctggatggggagctgggcaccatgcaggcactcgtggaggagtacaagaggaggtatgaggatgaatttaacaagtactcagaggctgataatgacttcatggttctgaagaaggatcggatcaaggccaccgttgccagaaggcagatggatagggagaatatccagctcatccacttgtggagttgggtgcatgactaccagctggtcctggggaatgtctgccacagctgctgcaagaccacagccagaagacatgatgatgacttgaggagcaccaaaaatgagattgcggagctcagcaggatgatccacaggctgcaggcagagattgagaacatcaacaagcagggggcgatgctgaccctcaaggatgcccaggccaagttggcagagctcagagatgccctgcagcaggccagggaggaccaggctcatcttccgtgtgactaccaagagctgctgaacatcaagctgggctggatgtggagaccgccacctaccagaagatgttggagggcgaggaagaggaggccctggaaagggtggctcctttctgtcgggacgtcatctccacaagtctctgaagctctcagcagagagcgctgctcctctctgcagctcgtcgtcctggcatttctagctatcagcagagagggtagctcctctctgcagctggtcctccctcatctctccatcctctgtgtcctttcccctgctctggctgttccctgggcttttatggacctcagaggggaggaagtgtgtgctgattggtccatgggctgccccaaggagaacaggaggactgggtctgcagctgcaatttggatggctgcagcatcacctggggaggtcccgccccaactcagaagaggtggggctcccactggctccatggagtgtgcagccctagctgtgcctccctgctgcagccgctgccatcactatgaggtggacgccgtccaggaagcggtgctctgtccttggtgctgaaatctggcccagctctgacgatttgcatttgggcatacaaattttctgtctaagatcaggtaaatatttggtccagagcccgactttaaaatagtctcagactttgtctattttgttatattccccataaaaccaagaccaaaataatttgcctctaagtctttatgaataataaaacgtatgaatattggcatgttttcctttctgcctcctgctgctggaaagtatttgtcattggtgattagagtattatattttcttcctattttaacatggattgttattttaagttaactccctcattattgtgatgacagggatataaaaataaaaaagtctaagaagctagtcttctcttgattgaggctaggttcat

SEQ ID NO: 468808 - DNA, 786 bp, Homo sapiens
atctgagaggagttttcttgagtttggagaagtgctggattcaggggccatggtttgtgctctgctgacactcccaggggccgagtgtggagaaggtaattctgttgtggacactccaggggccgagtgtggagaaggtaattctgttgtggacactccaggggccgagtgtggagaaggtaattctgttgtggacactccaggggccgagtgtggagaagataattctgttgtggacactccagggaccgagtgtggagaaggtaattctgttgtggacactccagggaccgagtgtggagaaggtaattctgttgtggacactccaggggccgagtgtggagaaggtaattctgttgtggacactccaggggccgagtgtggagaaggtaattctgttgtggacactccagggaccgagtgtggagaaggtaattctgttgtggacactccaggggccgagtgtggagaaggtaattctgttgtggacactccaggggccgagtgtggagaaggtaattctgttgtggacactccaggggccgagtgtggagaaggtgcaggactttggacatctgcttgcaaatggccacactcacctgatccgctcctgtccactgccaactcaacagccacttcacatgggcccaaatttgatgggcagacgtagagcctgtgcagttacatgtgagagacatagctgacctgagccttcaaacaagctgcctttgctcagcatttattctttcaagaagtattggctggggacctatggcacgtgaagca

SEQ ID NO: 468809 - DNA, 628 bp, Homo sapiens
ctcttttccttctagatagcaatgtggctccaactactggctgatgtgagacggtaccggcagttcctggctgtgtattcttgccaacatttagagaagccaccagcagaggtccaccctaagcacgtaaaaacagcaagtcagcaccttgccttgtggctacagaaaccgaaagcatctaacctcatgttacagtctcataagggaactgcattcttggtccaatcaaagggtccacatgccccaacagcagttaggatgctggtagaccactgcgaacacaagttccactcccccagagatggattcactcaccaaggcatgatcagaagtggccttcctccccagcagcatttacaagctggagtacagtgcttggagggtgccctgggggccacgacggctgtctcctccctacaccatggtgaagacattcagaccaaacagaatataggagtttatcaccagcagacagaaggaacttctagaaaacaacttcagaaacaatgagaagatttgctatcagtattttattaatatcataaaatatgttaagagcgcttaccatctttttctctgatctggagtagtttaaatagcatttgaatgatctattatctaaaggtaa

SEQ ID NO: 468810 - DNA, 735 bp, Homo sapiens
ggtgttagtgtgacctcagatagatcagctacactagatagccatgagacagcagtgccttcagggttcgtggcccaccgctccttcgcagtccctgccgccaccgtccacgctctgcgttgtagagaagacagtgggtcggaagagcgccatcgccgccagtgtatgtggggccctttttatcaggtactgcatctacttttaccacaaaagacgaagtgaccccaatttcaagaacaggcttcgagaacgaagaaagaaacagaagcttcccaaggagagagctgggttttccaagttacctgaccttaaagatgctgacgctgttcagaaattcttccttgaagaaacacagcttggtgaagagttactagctcaaggtaaatatgagaagggtgtagaccatctgacaaatgcaattgctgtgtgtggacagccacagcagttactgcaggtcttacagcaaactcttccaccaccagtgttccagatgcctctgactaagctcccaacaattagagaattgaaagagcaacaccttagtaacactgacatctcaagctgctcctcactcacagccaagggaggaacatcagggaagggtcccatttgattggctctgctcaggtcattagtaaccacagaattctgtccctgaagagatcatcacttaagttctacctcaagtctctggttcacagtgaatctaagattctcaggaacttaatcagagct

SEQ ID NO: 468811 - DNA, 763 bp, Homo sapiens
gaaatgcaggggccggaaaagaatatgtctagaagaatccttaatattccagaacgtattattctaatccactccgaatgtctcattctgcctgtttttctcttgccctttcaagcccttacagtctgtttcttgcccagaaatgctttctctgccttctgctctgaccaaccacccacaacaatctactacagccagattaattttctggttttcctagcagctaggaatggctggaaacctaccactttcttctccttcaacccttccccacagaaaataagtcttatgagagaatcaggccttatgagaaaatcaggccctagcactaacactgcctggagagtggggcttggggtccagctgctggggtctaatgccttcctgagatcatcaggatggcatcagagtagagcctcaaagtctggaattgggagtgatggatcttgctcttgctctgttgcccaggctggagtgcaggttattgggagttacttgtcttctaattattgaattacaagttctttatatattctggacacaagtctcatataagatatatgatttgcaaataatttctttcattctgtgggttgtcttttcactttcttgatggtatcattttcagcaaaggagtttttaattttgatgaagtccaatttatctatttttccctttgtcgcttgtgtttttggtgttttatataagaaaccattgcctacccaaggttacaaatatttatttttatgtaaacttctaagaa

SEQ ID NO: 468812 - DNA, 1692 bp, Homo sapiens
cccagccttctttcagctcctcaaactcctgcttcagagcctttgcctgtgcctggaagaatatgtccttttgcccctccgtccgctcctcacggcggccaccgctggccagtgtcttccctcccatcagctctcagcccccccgaatcagagctgtcctcatgattcggcccctggtagcatccctggcccccgtgcccttcagaggcacagcctgggtactggccaagagccggcaggtgatcagaggccagtgtggatactggcttctgagggccatgaaggtgaggaagacagaggagggtgtcaggggtggtcccaggctgagcacggcagcggggctgggccccaacctgcaaccatccatcaatctgactgtgctgcccacttccgctgctgcccagacactccactttgggatcctggctgccatctgtaggattggcagcttctgccaggctcacatggctctgggcccagagaggccccccaggggttggaggaatctagtcagtgtggagcagattgagaaaatcacctccctggatttggagtttggcaggcaaaagccaagtttcctgtcggtcaaagtagacactctggaatggagtggggctcaaaccatgcagcaaggaccagtccgaggagtctgctgcttgccaggatcagggaatcccaacagaaagcctctgtgtggggctgaagggaagactgaagacatcaggacacaggacaccccaaagagagaaggctggcgtttgcacattgccaccctgagaggactcccctatcctggattcagcagttctggacacgaaccaagactcagagaggtgaagagactggaagaacaaggtagccctggggacgagaaagaggaggagaaagaaatgacccaggacaggctgttctggggaccacccccatcccgactacagggggaggcttttgtacccaagaaattgtatcccaaggactcgcaggaggccgtgggcagagagcagggcctgaatgcccggctgggtgtgagggcctgggttacaggcccagctgccctgggccggggctggggaccccgagatgagtcagacctggccttcgtccaggatgaagtcacagtctggtggggagacaggggagcaggcagggaagtgacccttcggggcactgtgggtggaaccctgctgggttctcaggccccagggaactctaagaaggccagggcccctgcccctccctgggctctgggcttccagtctcacccgttccaagccatccttgccagcagccaggagagccctgctgcaatgccaactaattgcatgtctctagcagcacccctgtgcctaagcctggctctatctggcctcttctacaatccagtgctcttctccagcccttctaccctgtgctgcctcctagtgaagggttagatgtgtcattctgcagcccttctggtggcttcattcagcctttggggcttcgtgtatgttttcctactgtgaggcaggaacccccactcccttgtccatctgatgaatcctactcatctttcaagattcagctcagtgccacctcctctgagaagccttccttggttagcccatttccccacagagttaggtccccttccctggataccccagcctcctatatgctcagatcactgtgtttcagagggtgtcaccttcc

SEQ ID NO: 468813 - DNA, 651 bp, Homo sapiens
gccgccctccactggctattctagccaccatccatcagcagagataagaggaccactgggcgaggaagttatatgaggaccccagcccggctccaagtcagacaggcgagggtttgcctgttggctccctcttccactaactggttgcctttagcagttgtctgttacctgagcctctgttttctcatccgtaacctaaggatgattacaccttctcccaagattgttagggggaccaaaagtggcagtgtctgttccattcccagccggaggcataacagtgggaacaaaaggagtatcgtggtagtgggatttgctgtgtcgctgtctcactatggtcactgtaacaaattcccacaaactcaaggacttaacacaaatgtattaccctacaattccataggacagaagtccaaaatgtactttattgggctagcatcagagtgtcagaactgcgctcctttacagaggctctggggagatcctgttctcttgcctttcccagcttctagaggctgcccgcactccttggctagtggcccccttccctcctcaaagtcagcgatggctgattgagtctttcctgcctcccatcactcagacacagactcttctgctgcctcctctttcactttcaaggacgctgtgctt

SEQ ID NO: 468814 - DNA, 952 bp, Homo sapiens
cagccagacagcagggctggggccagatcccaggcccctgtctcccagcccagggctctagatgaaggggcctgacttgccctctcaacctatcttaatagtggcaccaacatccaccaagttgcctaggccacaaacgggtctcactgcactcctccctcccagcaccctcctcctggcagcagcactcatagctgtctcctgcagtccatcacaggccactccctggctcaggccaccttgtcttctccaggaccccagtccaggaaatacctggccactgctcaggcctccctacctacatccaggcttctccctccagtccatcttctgttcagctgcctgggtgacttggctaaaacacagagcccacagtgtcagtccccagggcaacccttccagggctccttggctgggcatcccagactctccgtggtgcttgcgcctccttccagcagctgcccctgacacgcccctttgctccctcggtgcagaagctgcctgccctcttcagagtgtgcatcctctctgcatttgctgttcctgcgccgtttcctctttgggaactcctccctctgcaggcacgttcctgtttttgctcactcctgaggaaagctcacacggcccgatctcccttcccccaccccagccttggagggaacgtctaggtcttcctccccacctccttgacagcagcaaagacattttattgtggaaaatttcaaacacacaacaaaaatagtacaaaaactactgtgtattcctcacccagcttcgaccctccccgactcagggccactcttgtttcatttctatcccccaactcctccccactggattactcagagcaaatttaaacatcagataattttatccacaaatactacaaggagttgggcgcagtggctcatgcttataaatcccagcaacttggaaggctgagacaatgtac

SEQ ID NO: 468815 - DNA, 1164 bp, Homo sapiens
cgcgcccgcgttccaaacatcacatcatcatcatcgtcatcatgactgcgcagcctgggtcttggggttcctggatgtctagctttgtgggaggctaccgaatcctgggcggaacccaccgactctggttcaccgaatgggcctcccagcacgtggggcgcctggcacggtttcccgtgcttcgcctctgcgtccacggcctggagatcagaggaagatcagaaagtgacaccacagctcagaacaggaagctaggtgctccctcagtgcccatgagtgacagagatggtggtgtgggtccgagggcaccgcactactctgaccctctgctccccacggaaagacacagacctgtgtctactcgccctgtggtcttcctcagaccctgcgagtggtggacgtcgaagacctttggacaacagagcaaggccccagagtatgctgagggtgccagagagaactcagacctgtggcctgactgtagcaggaaggcctggtcatcgctgcctgcgtcctggcctctggacttgcctctctgcacggccagcagcgagggcctgccagcccggcggccgcagcagttacttgagccagatgatgggcctgcttggcagttcctggccatccgaccccgcggtcctgttcccaggcagaccctgctccccccatgccagtttcccccaccagtatcttgagctgctccctgaggacctgctccaggcctcagccgggccagggcctcacgctctttcaactcttgtttttcatttctgcctctcttgattgtcctctgtgtgactgtccctctgctgggcctccctgtatctcaccccactcctctttctcgctcttctctaggaaaacatagatgtaaatccttgtgaccttgaagtagacaatagttttttctatatggtgccaaaagcacaagcaaccaaatgaaaaaatagagaaaccgaacttcatcaaaattaaaaacgttgtgtttcaaaggatattatcaagaaagtgaaagaacaacccacagaatgggaggaaatacttgcacatgaagtgtctggtatgggtctagtattctagtaaccggaatacataaagaactctttgcaactcagcaagaaaaggacaaataatttaattttttaagtgggcaaaatatttgaa

SEQ ID NO: 468816 - DNA, 2011 bp, Homo sapiens
gcagtcagcctggagaccttcttcctccctgtgttttttattttcctcctcttctaccttctcatcctgatgggtaatgccctgatcctggtggccgtggtggcagagcccagcctccacaagcccatgtacttctttctgatcaatctctccaccttggacatccttttcaccacaaccactgtccccaagatgctgtccttattcttgcttggggaccgcttcctcagcttttcttcctgcttactgcagatgtacctcttccaaagttttacatgttcagaagccttcatcctggtggtcatggcctatgaccgctatgtggctatctgccacccactgcactaccctgtcctcatgaacccacagaccaatgctaccttggcagccagtgcctggctaactgccctcctcctgcccatcccagcagtagtaaggacctcccagatggcatataacagcattgcctacatctaccactgcttctgtgatcatctggctgtggtccaggcctcctgctctgacaccaccccccagaccctcatgggcttctgcatcgccatggtggtgtccttcctcccccttctcctggtgcttctctcctatgtccacatcctggcctcagtgcttcgcatcagttccctagaaggacgggcaaaagccttctccacctgcagctcccaccttctggtcgtgggcacctactactcatctattgccatagcctacgtggcctacagggctgacctgccccttgacttccatatcatgggcaatgtggtatatgccattctcacaccaattctcaaccccctcatttacacgctgagaaacagggatgtaaaggcagccatcaccaaaatcatgtctcaagacccaggctgtgacaggagcatttgacctttaaatgcagctaactctgcttccaggacaccaaataacagtgcttagcacagagaaaggactcaatacatgataatgaaataatgttaatttttattggaatcttaagttgttgtataaaattttactacttagtaattcaagaaacctttactaaaataaaaaaaaaatcttcatggcaaaaaattcttaaaagcaaagtcaaaaaacaaataaaaaacgtatcacagggaaaggcaaatattcatattatacaaagaatgtagaagattgaaataaacatttcaataaaaacatgggcaaaatatatgtgtagacaaataaaaaaaaatgcagtggcctttaaataatgagtatttactatataaaaagaatacgaatttaaattgtgctgaaatgttatttttcacttaatcagattagcagattagcaaaaatccaatattttgacaatatgcatgtagaaaaacagaacttttataacttgcttgtgaggatgcaaactggtataacactaccgcaatacctaccaaaattacatatgcatttaccctttgactcagcagtatcacttctagggatctatcccgaggagtcaccatcaatcattcattaggttacgtattcatcactatacagggaactgattgaataaaccataaaaatgcatgatgcagtaataaaaaggaaataaggaagctctctactgatatgatatcatctctaggatatgtgttaagtgaaaaaaagcaagctgcagaaaagtgtttttgtaagaaaggagatagtttgcttaaaatttcaggaaaaaactagagggaaaatgtgaactcataaagatggttatctataaggagaggcaaggaacaggaaggagaggaccagaatggaagcaagtctagacatatgtaattatttttacatagttcaaagaaatcagaaagaaaaaccccacaattccctcaatttaaaataaacagaagcacttgaccctggctgtctctcaagttagtggcatgaccacaaagaaaattactctagagtagttttaaaaacatgaatattatagttttacttctttaatatatattagataaattatatgttc

SEQ ID NO: 468817 - DNA, 1545 bp, Homo sapiens
gaacggaccgaccgggactgccagccgctccgggcgctcccaactcactggtgagcgcggcggcccgggcgctggatgcgggggcggccgcgatggccccgcgcgcgggacagccggggctccaggggctgctgctcgtggcggcggcgctgagccagcccgcggcaccctgccccttccagtgctactgcttcggcggccccaagctgctgctgcgctgcgcgtcgggagccgagctccgccagcctccgcgggacgtgccgcccgacgcgcgcaacctcaccatcgtaggcgccaacctgacggtgctgcgcgcggccgccttcgccggcggggacggggacggcgaccaggcggcgggcgtgcgcctgccgctcctgagcgcgctgcgcctcacgcacaaccacatcgaggtggtggaggacggcgccttcgacgggctgcccagcctggcggcgctcgacctcagccacaacccgctgcgcgccctgggcggcggcgccttccgcgggctgcccgcgctgcgctcgctgcagctcaaccacgcgctggtgcgcggcggccccgcgctgctggccgcgctggacgctgcgctggcaccgctggccgagcttcgcctgctgggcctagcgggcaacgcgctgagccgtctgccgccagccgccctgcgcctggcgcgcctggagcagctggacgtgcgcctcaacgcgctggccggcctggaccccgacgagctgcgcgcgctggagcgcgatggcggcctccccgggccgcgcctgctgctcgccgacaaccccctgcgctgcggctgtgccgcacgccccctgctggcctggctgcgcaacgccacggagcgcgtgcccgactcgcggcgcctgcgctgcgccgccccgcgggcgctgctagaccggccgctactggacctggacggggcgcggcttcgctgcgcggacagcggcgccgacgctcgcggagaggaggcggaggccgccggcccggagctggaagcctcctacgtgttcttcgggctggtgctggcactcatcggcctcatcttcctcatggtgctctacctaaaccgccgcggcatccagcgctggatgcgcaacctgcgcgaggcgtgccgggaccagatggagggctaccactaccgctacgagcaggacgccgacccgcgccgcgcgcccgcgcccgccgcgcccgcgggctcccgcgccacctccccgggctcggggctctgagcggcgcccccgggctcggggcttcccttgcctggcccgaagccgtggagatgagacacccgcgagccccgagctctgagaccttcccctgactcggaggcgctaagccgtaccctctcgttcccgcctccgagagctcccaccgtcaaagacccagagatagccggtccgaatccagaaaccccgcctgcccaccctagtttccgaaacctccctcctgaaccactgaaagacgtctagtataatgtcaaataggagtggtgagagtagtcatccttgccttgttcccaattttagaggaaac

SEQ ID NO: 468818 - DNA, 790 bp, Homo sapiens
tgttctgcttctcagagatggcgccacggttcgcttggcctgtggaaacgtgtgtgtcatgggacctgcttcttgggggctctgggctttgaaagggaggctgtaatatggccttgcggcccctgccagtggcatcccggccggacccatctttgactgaggctgagccccaggcccgctggcagctcccagccgtcctccccacagcctggctgtggctgttcctcggcctgccagccccacaatcacagcccacaggacgcacccccactccctccctgatttcctggaattcagaaaatggatcacccctgcctcgtcctagttttccaccccagagacctgccatacccttggtcaagtcctcatgcaaaccagattcctttcattcaaggactttcagagggagcgttacccggtcctcagccacacccatgccgccctgtctgccctgtctggactgcctagactccatcagaactccacagccactttctctggaaagccttcctggctgctcttgccaggtgttctctcttcactggcctctcaaagccaggtcttgacttgtcctagggcctcatcccataccatgttttattgtcataatattctttcccatagtgaccccagtgctcagcactgagcctggcacaaagtgcatgctaaggacaagcttgctgcacggagaaatgaatggggacttcagatatacatacacacacacacatatatatatatacacgtatatatatatatatatatatatatacgtgtatatatatatata

SEQ ID NO: 468819 - DNA, 3890 bp, Homo sapiens
gtggaggttgggagtaggtaggacctgtgccctaggaaacggcagtgcctggcctgcaggggccttctggcacgttctcactcctcgccgttgctcttcttctatcttcaaagcagaagagattttgaactttataatatgccttgaagtcaaataccatcagtcctcttgtcatgggatcctttgggagtgcttcgccagctggaaacctctgcggccggaggcgccttctgcctaagtattacttgcgccgctggactcattccgcccacttggccgtctcagctcgagctaccgcctggatcccacacctgccaagggcgagccaggcgtggaacagcaaggggagtgtgggcaagtgagtgtggggtctggtcactgtgcacatctgactgtggctggaccagatgtatggcatgcagcttctacagtgggcagctgcatctggacagggggagcatggtggcacctggaagcttggaactgcagagccccaaagagggtgtcacagccctggcttgggaagcccctatgtctgggttccctgaaggctgcagctcttctctccttcttgtcacccgcaacgtgtcccgccatctggtgggtcccaagttcttgtcctgcgtccggaagaatgaggcatgtggacaactggagggcagatcttcccgacaagtgtccagctctcagcagagaagagaccaacagtgggtagctcgtttccacaggcaggtcatcctgacgaatggaggagacctgaagtgggtctgcagcagtttgctgggggtccactccggaccctgtttgcattggtatccccagtggaggctgcagaacagcaaagattgctgcctgctccctcctccagaagcttcatgcaagagagtcccactgagaacatccgtgtccctcagttgacagaaatcactcgccttttgcgtttgtcttggtgggagaaacagaccagagctgtttctacttgaccatcttggcccctcccccccattttaaattttgatgcccaaattgttccagattttccagtgagagacccttggtgacagctccgtagctcacttaaataaaatgacacagatacattttaggttccatactgagcatactccgtcttccttccttccttaccaccatatggaagatgacatggatgcatgtttttgtttttgtttttttacacatatgtgtacctataataaatctgtattctttgtgtatttaacattatttttttcccgaatggttatcatgctttgtgaaactcttacaatgtgcctctttcacttatcaataggaatgtgagatttatccatgctgatacatctaaatctggttaggccattttaactgctctccagtagtctgttgtatgataaaccacttaaatacacccccccaacacacacacacccacatacacacatatacatctgctgaggaacagttaggttgttcctactttttagctattacaaataatgcagcgcgtttttccttatatatgtctccattgcctatgtgaaaacaattctctagggttgataatccagaagtagagtttctgagtcatagggtatatgctgctttgaatatacgaggaacaaattctctccaaaatggttgtaccagtttatactcccacctgcagtatgtgggagtttctgtttctcaatctcctcaccaatatctgttataaccagactttaaaacttttgccgttcggaagggtgtgaaatgttgtatcatggtgtttaaatttgaatactagtaaggctgaacatctttttatgtgcttattgcctattggagtttctgttttgctgctcatgttttgttctgttttgccttgacccacttttctatcaggttgtttgactttgaaaaattattttataaaagtttctaatacagcctgcatattaatcacccatggtttatgtgcattgcaaatatcatctcccaggctgtggcttatctttcaatcatgtttatagtatcttttgacatacagagccttcaaattttaatgtagtcaaacttatcaatctattgctttgtgagctgcactttctgcatgtttaagaaaacttccctgctctgatgtcatgaagatattaccttacattatattttttaagttttttgtctttatatttttagtctatcttttgtgtgtaatgtgaagtagtatagcagactatccttcttccttacttagagcaccccaggttattcctgttcaggtcagcagtgtacttctctttctggacttccttgtagccagaaaaggtcatgtgacatggttctgcccattgaggcatgagagaaggggatttctgtgaaatgttatgatttctttctttcttgatatgagtgtatttccatctaccttccttcttccttcttccttctacttcttcttttctgaaaaaatggacataggctagagatgaatcacccttttgtcaccatgaggtcacaagctttgacacaggaataatacagggtggtcacaggagaatagaaaattccaggcagcagttttacatgactagcaaaagaaaacttgaaatagctacagaagctagggattgacaagactctgaaaaccaaagttttggaccaagctggctaagaccaaccggacacaacatggtgctggatttgacctaggtttcacttaggacctcattatgcattcattaacatacacatcacactcgcaccagccccatgacagtttcaggaacacccatatttggtgtaaaaatgggtggcactacaattctgagaaatcttcacctttttccaggaattttcatgaatattccaccccctggttaaagaaacccataaaggtggaaaccccaaactccactgtgtgactcgcttgagtacacccacactcccctttcttgagtatgtactatttgctttgcaataaatctctgtactttcactattttcttgcttgtccttgaattcattctctcgacggtgtcaagaacattttataacctaggaatttaattcattcattcttaatctttcatttttatttatatatgcatttcctcaaaatgagttccattcagcgaattccaatattccaagaaaaatgtttttgaaatttaagatgactatataatgtatatataatgtaataatgtaatgtgtgtataatgtatatagaatttatatgtattcatggaacatatatgtattatatgtatatatatatatataatgtatatgtaatgtatatcaatgtagcctggacacttacactaaacctccactccagtaacacccatagattgcctctcctaagacacatgtgacacctaaaacataaggacactttatgttggatgactacagtcttaacaccctggtcccatccgtcacggcctccttaatattatgtaagttgctgattctattcaaccaacaagtggtaaatactttgctcttatatatttggctaaccttgtctgtttagtgcctattccaacagcctctcagcttctgtttgcctccactgctgaggggacacaatacacctttccagggtacccatgggggaccttcacagctttgtcaccacacacaatctttgcagacaagatcttaatgacaactgccttccccaggggcacagatatgacattgcattgaggacgtcctactccaaagaaatgcatttgatacacacattgaagacatttaaccccaatatttcttaatacttttgggctctggtggcaacatatttctcattgacaaattttattgctaaattaaaatcaacaggcactcctgtgtgtgatctcaaaaggctccttcactgtaaacctttggcaagctcccgt

SEQ ID NO: 468820 - DNA, 689 bp, Homo sapiens
cttgggcaaaagatatatccaaaatgcgaaagagtctaatagggctcctcctcaggcccctgcccctgcccatcccctccctgttggttttcatccgtgctgaatcaggcagcctcctctgttcagaaagcacttggtacacatttccatgcagacagctctgggactgggggctcctcgatgatgagggcaggttctcatctgattgtcccatccctggatacccaatgtttgcccagatccaaaggcatcagaagaggcaaagggccttcggtgccacaggctccaaaggaagaggctgtgcttgtcactgggagaagtgggcagggttctcagaggcatcagcttacagggagctgcaggagggcagagcgtccctgccaacgcctcacacaggacctgcatatatggacgcagtggaaggatttgttggaagtagatctccaggggtgtggagcctcatacaattcagtggccctgtttaagaaaaactgcaaaatactaatataaatgtagacgtgaaagtgaatgtctatctgccataagaatgggaggagctgcgtttaacagccctggggcccgaagctgaagctgctgcctccggctccagagaccagtcccaacttcctgggcccaacttgcctactcccaacccctgggcctgaagaagacagggcaccctcaagtcc

SEQ ID NO: 468821 - DNA, 1906 bp, Homo sapiens
cactttgggttggtggcagtagaacagcaggctgggagtcagcacaccccaagtgaggtcctggcctctacacagccatgctccgctactgccagagtgcccgcgcctaccatctggctgaggcctgcatggctgggagcagcttggaggggagagggcgtgagcagcagtgtgattctggcgggacagcttggcctctggcagccctgccttctggaagtggcagacagtggagtgggggctgtgccggccagcggagaagctccaaggaaggcaggaagggaagtgagattgcccagggccagcagcagcagtgtggtgctggggctgctggcgccactcccctctggcccctcacccacggcagattctctaggaggaagtggggagagattggggagcaggaagctgggggcggttgtggagggaagtcccttggcatcctggccccaggctcctctttcttaaccctcacccctgtgcagagccccgagcctggctttctgccaagggagccagcaggccactgtttcacacactcagaaaacaacagctttcctggttcccaaccccaagtaggaggtgcctgcttggagctcaggcacttggaaagcagcgcctgctacagggtctgccaggtctggaggaggcagcaaaagagaagaaagacccccagcccccacagcctctcctcaggggccttggaggaggtgctgcattgctcagaattcctgcacccagaaggtcgtggggagcatccccctgccttggatagtggctccaaccacaagactcgttcgtagttctctgaatgcatgccaacccacctcacccaccaagccattgtacatgcttttccctccacccaaagccctctctcaaccagggcagcctgatgaactcccacaaatccatccttcctttaaggctcagggagtgcaagcactgcctcctctgggaagcctgttgaaactggccttgggaggcctccctcccttgtgctgtctccatgcctgcccatgcagaactctgtttgtcacttggcacggagtgtttcccagagtccctctctaaaggcctggggtctggaatccacccccactactcaaggaccaagtccaaacctcaatccccagttattttctaacacatgaactttgggggacaccatagcaatgcacaagctatggatggcatcatctcttcagaggtacagagtggagcacagaccccagggaagtgtgaacagctcagggcaggatagaatcatcactctttttggtcttgttattagatttccattgatacagcctgaaatcacctgagatctttgggggtgttaacacactttgactcagcttaagcacagagtcaactaaaccccatagtaatttttctggcaccagcaatggaaagtttctatgaaaaagatattaggaacatctccatgtccccccactaaataattcttctctccacctactctgacatttatctttccatacaatgatgcaattattcatctacttgtttgcccacccatatgcaactacccaaccatatataatgcagatttgttacacagacaaatatgtgccatggtggtttgttgcaacctatcaacccatcacctaggtattatacaccatatgcattagctatttatcttgatgttctctgttcccccaccccctgacaggtcccagtgtgtgttgctcccctccctgtgtccctgtgttctcattgtgcagctcccacttataagtgagaacatgcattaaccactatatattaacccatacattttacagcccagctaaccacccacattccttttcattcatctgtccatagagcactcattcacctgtgcaactacctactggtgacaaacccacttacattt

SEQ ID NO: 468822 - DNA, 811 bp, Homo sapiens
gtgctgtggtgactttaatgaatactaaaggacatcattggctaacgaatgccagactcaccaagtaccagactttgctctgtgaaaatcccccctgattgtgtagaagtgttggactcaattcactctagcagacctgacctccgggaccagccttggccatcaggagactgggaactatatgtggatgggagcagcttcttcaacccccaaggagagagaggtgcagggtatgcagtgataaccctggacactgttgttgaagccacatcgttgccccaggccacttcaggccagaaagctgaactcattgctttcattggggccttagaactcagtgagggtgagactgtcaacatttacactgattctcggtggcagttatgcattgcaggggacaccagcgagcttccatcttgctgggtttggggaattcccgcgctgactcagaggctccaaaagcagcatctgcccccttctgggcatcagtgctccctcaagcacctgatcttggacctacttcttctaaagaagaaaaggactttctgcaggtagagggaaggacaattgatggaggaaggatggattcggttagcagatgggagagtaactgtgccacagctgctaggaactgcagttgtactggctgtgcaagaaaccacccatcgaggtcaggagtcactggaaaagttgttaggctggtatttctacatctcacctttgtcagcccttgccaaaacggtgaggcagcggtgtgttacctgccgccagcatgatgcgaggcaaggtccagccgttccgcccggcatac

SEQ ID NO: 468823 - DNA, 877 bp, Homo sapiens
agcagcagaatctttaaataaaaagaaagaattcgactgaagggcatacagcggaaaaagagactgagcagtaagtttcagagcaggagtggaagtttatttaaaaaggctttagaacaggaaggagaggaaaattctcttggaagagacccgagcagatgcctgaaggtccaagaaagaaaagagaagagcctttaaccttgatcctgcgacggaagaaagtgacttttgaagatgtagctattgacttcacccaggaagagtgggccatgatggacacatccaagagaaagctgtacagagatgtgatgctggaaaatatcagtcacctggtgtccctcgggtaccagataagcaaatcctatataattttgcagctggagcaaggaaaagagctgtggcaggaaggaagagaatttcttcaagaccagaatccagaagacatgagaaaactcacacaggagagagaccatataagtgtcatcaatgtgggaaagcctttattcaatcctttaaccttcgaagacatgagagaactcaccttggagaaaagtggtatgaatgtgataacagtgggaaagcctttagtcaaagctctggctttagaggaaacaaaataattcacactggagagaaaccacatgcttgtcttctatgtgggaaggccttcagtctgtcttccgaccttagatgacatgagagaacacacactggagaaaagccatatgaatgccatttatgtgggaaagccttcagtcaatgtactaatcttaaataacatcagaaaattcacgctggagagaaaattataaacatcttcagaacatattctgactttagatgacacggtgttaggaatgacgaaggtaaggaatgt

SEQ ID NO: 468824 - DNA, 565 bp, Homo sapiens
gagagtgagctccagggctgccagaacgctgtcacctctcaatagcacatgagggttcttgcctttgcccaggaaagaattcaagggcaagctggaggtatagaagaagacagctttattgaagaggcagcgttacagccctgtgacttctcctacgtggaggtgagggtgcgcattcttcagtgcctggtaaagggcttccgcttgccccaatttggtggctcccaccagatacccgatggtcctgtcgagttgctgaatcatcaacttcctgttctctgcctctggcctgaatcgatgtctcacgttatctggctctctgtagcacagagtcacaatgtcaaagtcttccttggtgaaccagttcatgacggtatcgatgttctccctccgctctgtctcgttgctgtttggcttcagtccatgcctggttcaagatgtattggctcaactcgaggatccagaggtgggatgtggctctggcctggccagaggactgaggatgctgcatgccatggctacagcaaccggttcagctttgggctcatgtcctagtcagagccaa

SEQ ID NO: 468825 - DNA, 1207 bp, Homo sapiens
cacccccagtgatattgcgaataatgtcatcctcttcttccctggatattaggaacaatatcacaaggggtgatatctccctaggatattacaaatactatcacaggttgtacacccactgtgataacacagtgatacatcccaaggatactaccaagaatatcacagggctgtacaaccactatgacatcaggaaggatccagaactgcagcccgtcctcactttgctgtccctgtccttgtccatgtatctggtcacggtgctgaggaacctgctcagcatcctggctgtcagatctgactccccccaccacacccccatgtacttcttcctctccaacctgtgctgggctgacatgggtttcacctcagccacggttcccaagatgattgtggacatgcagtcgcatagcagagtcatctctcacgcaggctgcctgacacagatgtatttcttggtcctttttgcatgtatagaaggcatgctcctgactgtgatggcctatgacggctttgtagccatctgtcgccctctgcactacccagtcatcgtgaatcctcacctctgtgtcttcttcgttttggtgtcctttttccttagcctgttggattcccagctgcacagttggattgtgttacaattcaccatcatcaagaatgtggaattctctcattttgtctgtgacccctctcaacttctcaaacttgcctgttctgacagcgtcatcaatagcatattcatatatttcgatagtacatttggttttcttcccatttcagggatcttgttgtcttactataaagtcgtcccctccattctaaggatgtcatcgtcagatgggaagtataaagctttctccacctgtggctctcacctagcagttgtttgctgatttgatggaacaggcattggcatgtacctggcttcagctgtgtcaccaccccccaggaatggtgtggtggcgtcagtgatgtacgctgtgatcacccccatgctgaaccttttcatctgcagcctgagaaacagggacatacaacgtgccctgcggaggctgcgcagcagaacagtggaatctcatgatctgttccatcctttttcttgtgtggaaataacttcccacctatatgttcaaatgatttttcacatgagtgctaagaaagctcattggtggaaaagcagccttttcaagaaatggtgttggagaaa

SEQ ID NO: 468826 - DNA, 671 bp, Homo sapiens
gccatcaactgggaatagtctttgatcctatgctaattattagagaagcccaaaaattatcttgggaaaaaaggtaccacccctttacaaattggagggcttagatctatggttaggacaataccagttctttccttcttcagacttggtggggaaagtgacagtgctgataaacactttatgttccattcactgaatgtagaggacatcttttcactaatcccacctatcttttcaatttttccaggaagattccagaaagccagtgtacacgcagacttcggaggcagtaaacaggaaaccatcgatcccgtgcaggaaatgaccttgtttgaaggcaacgaaggtgtccccaggaatctggaagagtggagatgcggtcttggctgtggttcagttgtctcatttgtaaatgggaataacatttccccacctcgtaggtttagtgtcaatcctaaaagacctagtgtaaatgaaaacattgtaatctgaaaggtgtaaacagacattaggcatttcatgtctaaatactttagtattcataaatattcataaaatggtaattccattagcacctaaagtatacaataattgtttgatatcgccctcagtattggaattttaccagttgtctcataatattttttccagttgctttgttttaatcagga

SEQ ID NO: 468827 - DNA, 703 bp, Homo sapiens
aacatttaaagtgaacatttaagagatgttaattgctgctactgacgattcttccacttttctcctgtgggcatttattgctgtaaatttccccttaaacactgctttagctgtgtcccagagattctgttttccttctaacagtcaggcccctctgctgcaggtctgctggagtttactagaggtctactccaaaccctgtttgcctggttatcaccagtggaggctgcagaacagcaaagatttctgtctgtttctttgtctggaagctgctgcctctctttcagagatgccctgcccagagaggaggaatctagagaggcaatctggctacagaagctttgctgagctatggtgggctccacccagttcaaactccctggcagctttgtttacactgactgagaatcacctgacatacagcaaccaggtgtaccctaccttaacctttgctgttctggacagaaaggaacactagatattccaaactggcttcaactttgcagatttgaaagtgtgggagaaatcagataaggcaagacacacagaactattgattttattggattaactcagtcttttggggaaatagtctgataattcaaaattcaaatttcctatcaaggatgcttctatcctttcaaagagtcacactccccctcctccttcccatcatgaggcctagttcaaagggatgcctctg

SEQ ID NO: 468828 - DNA, 1788 bp, Homo sapiens
gagttaataggtgcagcacaccaacatggcacatgtatacatatccaaagagttcaaagtggttctagaaactttggtggtggtcatggaggtggttttggtgggaatgacaactttggtcatggaggaaacttcagtagtcatggtgggtttggtggcagctgtggtggttgtggtggatatggtggcagtggagatggctataatggatttggtaatgatggaaacaattttggaggtggtggaagctacagtgattttggcagaaacttcagaagcagaagttctggtccctatggtgatggaggccaatactttgccaaaccatgaaaccaagatggttattgtggttctagtagcagcggtagctatggcagtggcagaaaattttaattactgccaggaaacaaagcttagcagtagagtagagccagagacatgacaaggaaattacagattacaacagcaatgtgctaatcttcttggcctcatgctaatattagccaagttataattcaataaatggagagaagataaatttgagaggtcaactatcctatttgtcaagacaaatttgatttgcttaagatcagaagaaaggcaaattaaaggaataaaactattaatattttaataaaagcacattaattgtatcaattactttaggaagaattgaaatctttacaattttgaatatttctatccaagaagttaatgtcctaaaaatcttgtgtttttgtgcatgtgtatgtgtgttcttcaggaatgttttaatgtacttctcataaaattgtattcatttattgttaaatgtgttcctaagtgttttatcatcttgttgccattgtaggtggtatattctttttttggatttttcagttatttatcgcttgggtttctgaaggacattactttatgcatattaattttacaccacaatttgttattgaagactcatcacttgtagtacttttttgttgaatctcaagattgtcagttttgtaatccaaatatctagaaatagtaataactttatcatttcaaatttcgtgactaattaattctattgtctaaatagcattgaataatactccctgtataaaatattaatatgttaagaaattgtccgttttattaagtgttctcatcaagaatgaatattggactttgtttaaaggcattttttaatctataaaaagaatgcatattttttcttcttgtatatcatatttctgcttgtgataaatatatttcttaatattgaactacatttatatatttctgaaataagtcacattaaaaaaatgatgtactatcattttttaaaaggtaatgttgaattctatttggtaatattttatttaagattttgtcttacatttataaataaattgcaatttaatgttttaaagtccagccaagttttagagtaatttgacccagaccacacttggtttcctgccccttctgctgagtcttatatcttggtttaccaatcactgaacctagctcttcttttttttttggtcaaaacatgaacttgaataaagtaactgcaagaaagtagagagtcagaaaaacatgattcttaaaaaatgacaaagataaaatcttccattgagacttatcaacattttcactctgtagaggtattatactttgtagcatttaaaatatttgtaacatttccaagttttcaattaaaaaataaggtaggaaaaaaatgagaaaattaaaaataaataaataaaattaattcactgtttaattgaaaaaaaaatcatgaac

SEQ ID NO: 468829 - DNA, 899 bp, Homo sapiens
ttgctctcccctgaagtcaagttgtctctctctgaggtacagccagcatctctgaagtcaagttgcttctcctctctactggctaagtctggggtctttataggcacatgatgaggggcagggcaggccataggctgtcagggagtggcagtattatccttggtgccctgagtctgaatgctgctcctgtgctctcagtatctgcaggagccaatttgaaggctcctgttgtgcctgctagtgacagcagtcaagggagtcaaccaagaagtccagctggacagtttctactccactatcctggctgttccagagaagtgaagaaagaggagagaagtctgggtcctggagacctcaggaacctggatatcatcctgaacacacaagaaataagttatggcagcaagatgaattctgaaccccactatgtaacagattggattctgttattaagacattgttatggtaaaccagaactccagctcaagactgcacttacagagaggaacttcagtgatgggcctggggagtcagggagctaacaataatatcaagtcagaatgtatttttttttttaattttctaagccatttctgtgtctggaagttaggcgtctattatattttactttcagtcaacggaggtaacctgcctagcagcctttgaggcagtccttattttgtgaatttttcattgtacttcacaagaataagaagggggaaaccagataataccagtatccaaaaaggtacttttagcaaccaaacttcacataccttttcctctttctttctcttcttcctggaaggcaaaagaagaaatctttttgccttccaggaagaagttctagttaaaaagccatctaaaagcaaccttaagttattattttttaactgcca

SEQ ID NO: 468830 - DNA, 596 bp, Homo sapiens
agacatcacagtgccaagctgtgtaaaatatccacccctagaatgtattcagaaccataaggcagggatgtttaagtctgctataagctccctggcttcagcacccctttccaggggagtgaaaggttctgtctcactggcattccaggtgctactggggtatgggaaaaaaaaaaaagagctcctgcagctggtttggtatctgcccaattggctgcccagttctgtgcttgaaacccagggtcctggtggggtagacaccagaaggaatctcctggtttgtgggttgcaaagaccgcaggacaagtgcaatatctgtgccagagctcctcaggctcagaccctcacagcttcccttggtattccatttacaaggctagcggtgttcatttttaccttaacaaagtctattcagagtcaatattttaccacttcacatttcatacctgatctacttcctacttactcttaatcatctgaatcttctcagttcctatttcatacttctcacatttccacttctcacttcacaaatttgataacttacaatagtataattgcattaccctccctatcattcattgtgatagcattgc

SEQ ID NO: 468831 - DNA, 620 bp, Homo sapiens
tagtcctgcctcccatccgccgtgatgatccgtaatgagttatcttctagatgtttaaagagcttaaacacacaagctctccgcagaagtgacttcctcattagtcattcagatccccaggcttttggggtctgctgcccctctagtacatgggaaaaaatgaagtggagcattgaagaccagcaattaaatacttccacagagaatgacatatgtcactttgttcaagttcattggccaaacaagttagccatggtggcaggaagggacacggatgaaggtggaaaccatcatcctcaacaaactaacacaggaacagaaaaccaaacaccacatgttctcactcataagtgggagttgaacactgagaacacatggacccagggaggggaacatcacacaccagggcctgttggggggtcgggggtgagggtaggaaacttagagcacaggtcagtaggtgcagcaaaccaccatggaacaggcatacctatgtaacaaacctgtacgttctgcacatgtatcccagaacttagagtaaaattttaaaaaatgcaaagttactggcttcttcatggagacaactgtttttgtggtttgctgttttgttagagtttttt

SEQ ID NO: 468832 - DNA, 698 bp, Homo sapiens
cgggcacaaaatcttccatctcagtcatttcagagcctctttaaattcatattggatgcaggtcttcgtcaaggagaaagtggaaagacaccaacttgccgtgaagcatacagcaagtttagatgtaaatgcatctcggcagcaaccacaaggcagatttactgaaaatgagaatttgtccagatgcattttaacatccacaaggtcttccaaaactgaagtgaaaatgaagggatctctggcaccaacagcagagaaatccttctggaatagaacaaccatccttctgttgcagctaagagtcatacaaatggcatcatcacagcagaggaatggcgtagtccttgaatggcagcatagggcccctgctgaaaatagtgatggtatcgcggcatgtggaatgaagggaatgtggggccactcccttgcatggagctggcaatggccgatggggtcaaaggcattcccagtcggctatatggcggcagagaaccctggatggggtgaggaatgggtgttgctatggatgctgtgctggtgccaagagcagtcagggactgtgggtgctgaaacccaggaaaactggaagaagatgatacccaggagctgagagacaaattatcagatgttgtaaaggctgaccctgtaaggaaaaacactcattagactggaaacactgtgtcaatgtacagatcaag

SEQ ID NO: 468833 - DNA, 624 bp, Homo sapiens
accggtaccgcaattgatcaaaccgacaggaaaggacaatactgatttaattacgcgggcagcagttacccttcagtacgtggctcaaggggcaccaaagccagattatgttgtacgaagatgtgcaaagctgttgaatggtgttgacactgaacgtgaacatggagctctacaaagcgccactcagcaggttcaaacagttcacagaaagagggtctccaattgagagttcagctgactatgggagttacatagagcccacatacaaaaccaaaaccaaaaaggggaaaagggacaaagaaaaagaagttgtggttgtcacaacctttctgactcagctgggctacattaaacctgaagctctgtacaatgtggagagcggtgttgccttcattacaagtggtgcagcattggattttcaaggtatccagcaccacatcaggggcatgctttgctgtgctctgtctctccagttctcggagttcattcaaagctgtgttcatcgtttcttcaatatcctattgaagaataatcggaaagagagaaagcacagactgataatgaatactaatgtatagaaacccagacacttaatttcaaaggtacatgtgcacattgtgcagg

SEQ ID NO: 468834 - DNA, 712 bp, Homo sapiens
ctaataggaagagagttaatctctggcctgccgcacttagaatgaggtggtattgcattgtggttttgatttgcatttccctgatgattagtgatgttgagcatgtttccatatgctttggaagctacaaactagtcttgcttcctatctgccattttcactcaatcacgccaagatgtctttataacataaagatgcaaggagaaacagcaagtgctaatgaagaagctgcagcaggttatccagaagatttaattaagatcattgatgaaggtggctacactaaacaagattttcaatgggttaatgctgctggtgacttaatgttgaagccagcgctcacttaccattctgaaaattctagggcccttaagtatttgggtaaatcgactctgcctgtgctctataaatggaacagcaaagcctggatgacagcacatctgattgtagcacgatttattaaatatttgaaacccactgttgagacctactgctcagaaaaaaagattcctttaaaatgttactgctcgttgacaattcatctggtcacccaagagctctgatggtgatataaaagctgatgaatgctgttttcatgcctgtttatgcctgctaacataacattcattccacagtcatggatcaaagactaatttcaactttcaaggtcttattacttaaggaatacatttcgtaaggctactgctgtcat

SEQ ID NO: 468835 - DNA, 4311 bp, Homo sapiens
tcaatcttttttttttttttttttttttttttttgagacggagcccggatgcccaggaggaaaaagtggtttcatggactgggcccagggtccccctgctgtgtgcagcctagagacttggtgcctgtgtcccagctgctccacccgtggctgaaaggggccaaggtacagctcaggccgtggctttagatggtgcaagctccaagccttggcagctttccacatgctgttgagtctgtgggtgtacagaagtcaagaataaaggtttgggaatctccacctggatttcagaggctctatggagacacctggatgtccaagcagaagtttgctgcaggggagggaccttcctggagaacctctgctagggcagtgtggaagggaaatgtgggattgaagcccccacacagagtctccactggggcactacctagtggagctgtgagaaaagggccaccgtcctccaaacctcagaatggtagatccaccaatggcttgcatggtgtgcctggaaaagctgcagacactcagtgccagcctgtgaaagcaggagggaggctataccctgcaaagccacaggggtggagctacccaagaccatggaaacccacctcttgcatcagtgtgacctggatggataactttaggtttctaaaaaacttgcagagatagtgtagaaggttcccatagatccttgagtgagtttcactttcccctaatgttattgtcttacattaccataagatgatacatcttacatttgtcaaaactaggcatcctatactggtatgttactgttaactgtgctgaaaacgtcattcagctttcacccatttttcccatgaatgtctgtcttctgttctagaatcatatccaggcctccacattgtatttggtcattacatctccttcatctccaaattatgaccatcttattttttattaaacacctcaagtaatgatagactcagtatctatacttctggaaaaccaaaaattttttaaagttttttttgcattattgcttccatcaaaatgacattaaaaattggtcactagaaaacataagagagtcattttggtattttctgtataaaacataactcaaccattatttcatatattcaaactcatccattatttcatataaaccataactgaccattatttcataactgtcagtttaaaacaggaaatacaattaaagatatgtaaaaatgcaaaatatgagaaaaacaatccctatttttattatataatgttttgtttttggtgacaggtttactgaactaaagattctccctttgccttagaagctaagctacagtcacctaacttttaccaatttaaaaattttaaagataggtgaaaataacagtatataggaaatacacaatattaaaaataaaaaataaaaacctattacctcttggatttttgtttttgtttttgaaaaatcatttcaaaattttatgcatgctgcctgctatattataaagttcacattaattcagctatatcctgatatcattctgctgtgttctattcatgttatcatgagcctctatctctctctcttattttatgtgcttattcacttatttcatcttggggttgtatcttgatttctattaactttattcttttattaaatgtcatttcagtttttaaaaaatttaatactggctagacttggtgaacataaatataatttcagtggacattaaaagataaacacaagttgaggtagaaaagaagtataggaaacaattgaagaaacattaaaaatacattgatatttttgggtacaaaagtgtgtgggtgttttaaggagagaggaaagctttgggaaaatggtctttataatcaaccaattaataataacctcatcctttattcaaaatagttacaaagttaaaatccttaaaagaaaatagatatgatatacctatactctgacaataatattttatagatattgttgataaaatatctaagcctatatagtttgctagattttcaagaacctcttatatttattttatttaataaaccttgaagtttagtattaaaatgccaaaaactaaaattgttaataattacctgtctttggtggtttgccccatacttttagggacaggtgtatatcagttgctctattaatattaaatgatgataaatgtaagcctatacaactcttaaaaagagtggaagcaacacattcctataaatatgttatggactaatttttagaatccatttgacacttgttatggttcataacatatacaaatgctattaaatgcattctggttaaatgatacatttggaactggggaatttgaggtaaaaacatacatagagatgtacagcagccaagcagagtaactaatggctgcgaacctggaatatcatagttcatgggcgtgcttaaaaactgtttacctttaaaagaaagttcaattgtctggagaatttccaggatgcattgtctgtcataactttatttagttagaaacctactccctgaaagcaatcagttgattcctagtagagaaacagaataagccgaaggcaaacctacaagagaagcaactagagaatctagttttgttaccactatttagaaggggataagatagttttgctttagggtaatgagagatgcattctcaaaccatgaagaagtgcctttgtaaagaattcaaatggtgtagctgaaatagagatgaatttcagttgttattactgcacatttctaagaaggatttttaagcactagagcattgggtgtgcagattaatgtggttgaccctttaggtgtgcacattaatgaggttgatatgaaaaaaaaaacaacaccaaagcctgcttttgttactactacctacttctagagttaaataggacatagggctgctcattgaattaaataatttttaaaaatgctttgacagctgtggctacaactactggaagagattattttgactttgatgctttaaaagggcttcattcaaatctattcaacagtttaaggctttctatttctgcttctgtcttaatttttattatttagagaaacagtctctttcttcagataatttaaggagaagacaagaagtggaaaaacactatttcagatcagtcaacccatactgtatatagttacatttattataattcatcaagacatcgcaatatatttaggatgttcattaaaaatacagaccaaaatttatgcacattttaacagctatctatttttattatatgtataacaattgtggattttcctccattttataaaaagtgtataaatcacacaaggcagaatatggatatttatttttctatttttatagatttaaaatctttttgttaaccattttctagtctcatgagttgctgagatggccatatagatataaaacaggaaagcatatttgtaaatatatatatatggattagaaaatggttaaccagttgccataaagtttatggcagttgctgtaaccagtttagcagttgccataaattttatgaacatttaatgaatcgagagagagagagagagagagagaagaagctttatggcaactgctgaagctcagaatcattggtacaaattacactaccaccaatgttgtaaaattaaagtgaaatatgtacataatgtcaattattactgttattaattattataaaatttgtgaaatgtgataattaggaaatattttgtaatttgaataatttatggttctttctattagtgagaaggtacaattttgtgcgtgattgtaatttgtcttctttatttcttcttctgtaagttttctgttcattcatttcacctaattttctcctgtgatatatttcctttttcatttttattttcaaagaacatcaaacagtttgagtacatatttataacactaattaaaatgcgatataatgcatgtgtgtaaaacaagatacccactaagtagtataataataaacataggaagaaatgttttgaaatattaaaagtcattattcttgtgttatagaattacgagggatctacaatatttttttaaaatttcagatatgcatatcataattgtaaaattggaaaaattcaatggtattctataaataattgctgattgtttttgttaaatatctttttttggttgccgtttaacatgatactatccattactgactttaaaatttccttctattggaaaggtttgatatctttgtatcttctgtaatgtttgctatccattaacattttattttatttttttattttaacagtat

SEQ ID NO: 468836 - DNA, 2732 bp, Homo sapiens
agctgagctcccacttataagtgtaagcataagtcaggaagtatggggatcagggactcacttgaggaggcagtctgttgcttaacagatcttcagctttgtgctgggagatctactgctctctttagagccgacaggcaggaacatctgctgaagctgcacctacagccgcctcttcccccaggtgctgtatcccagggaggtgagagttttatctatatgcccctgactggggctgctgcctttctttcagagatgccctgcccagagaggaggaatctaaagaagcagtgtggctacagtggctttgctgcatgctgggacatccatctcctcagacatcagagctgcagactatcaggctttcggagtctgggacttaaacttcccctctcacagttctcagacctttggccttggactgagagttacacaattggcttccctgcttctcaggcctttggactcagactgaattacaacactagttcctagttcttcagctttcagatgacatattatattgtttatgttgtgtgtctttttttttgttatagaagtaccatatatttgtttcatcagagttggaaagtaacaatataatttatagaatgtttttcaactacaaagttgaagaataggattaaaattattgttaaaaagtgaaattggtcgggggaggggggagggatagcattgggagatatacctaatgctagatgacacattagtgggtgcagcgcaccagcatggcacatgtatacatatgtaactaacctgcacaatatgcacatgtaccctaaaacttagagtataataaaaaaaaaaaaaaaaaaaaaaaaaaaaaagtgaaattgaagagttaaaacttggaaagcaaattaagtttgacattagaataattattcttagaaaatatacaaaacactattgggaaaagattattagtcaagtgaacatatgtacaaatacatttcctaaagattgttataaagacatatatttggtaaagttcatggaaaagtgtctagcttcttaaaagagattccaacatacctgtaataaagtagaccaaaacagggaattctgtttaccacactatcactcttttgttaacaagaacattaagtataatgggataattgtgttcatgtatgaatatcaccaggacttcaggttaagtgacagatgactgcatgacactgagagaaatgttttaaagatactatatctatttttaaacaattgtctttactgtttgtctttgtgctccccaaatgtagcactgtctctttgctgctaatctgcatttataactgtattagtgaatacctgatttatattttggagtagatccaatgcaaatatccacattaatgcaacacatgcaaaggtcaagaggtccaaaggttggttcccacagcaactgacctttgtttctctggagtttggcagtattaactttcactttgtattagcaaaacttttatatttaatgatgtgggaattgaacaatgagatcacatggacacaggaaggggaacatcacactctggggactgttgtggggtggggggaggggggagggatagcaatgggagatatacctaatgctagatgacgagttagtgggtgcagcacaccagcatggcacatgtatacgtatgtaactaacctgcacaatgtgcacatgtaccctaaaacttaaagtataataaaaaaaaaaagcaattagctcacacttgtgttttctctatattgccagtgtttaaagtaacagtagatgtttaataacgtttgttaaatgatcagttaggttgtagtttccttggaggatgaacctttggctttgtagataatatatttttaagattaaaacttgagagacacttttttaatccttgcaacaaccttgtgaggtagttaaggcaagtcatattacctttattgtacaaaatgatcaactgaggctcagaggaattaaaggattccagaaatcatctacctaaacaggtgaccaagtcttgaatccaagtattcttactccaaatcctgcattctttctgtgttatgtagtaggtagaatatataaatatagcatagagtattcacaaggaaataaagtgaggcggttttttaaggtgctttctggaaagttatatgtaataaattggagtgaatttgacatttgaaagacgataccaagaaagaagcaatggtactgatcttggtgaaagagtctgaatttgagccagttctgaattgtcttttaagccttacagtaacagaaaaactaagcacagccattttattctccttttacctccatttctcagcttatgtgaaccataagctatttaagtcttcagaattttaccaaagtattctaaatatccttttgtactctattttccccccaatcaactgagaaaaccagctgacttctttggtatttttataccttgtgctttattgttttcctccagtgtttttctcccgacgccaaagtgcagatgctgtgattgctacttctagctcaagacatctgtttttcagtaggtccttttctttctttcattcccaattataatctttatgtgccactgctaaagtgtagagtagaaacatcagatcctgtcctttcaagaataaatactctgtttttagcctgtgttttagcctctggattctcccatggaaggcagtttttaagttggattagtacattaaac

SEQ ID NO: 468837 - DNA, 742 bp, Homo sapiens
agcaccaatcagcaccctgtcaaaacagaccactcggctctctgtaaaatggaccaatcagcaggatgtgggtggggccagataagagaataaaagcaggctgccggagccagcagtggcaactcgctgtaacactcattgcgaaggtctgcaggttcactcctgaagccagcgagaccacgaacccaccaggaggaacaaacaactccagaccagccgccttaagagctgtaacactcactgtgaaggtctgtagcttcactcttaagccagcgagaccacgaacccaccagaaggaaaaaactttaaacacttccgaatatcagaaggaacaaactccggacacgccacctttaagaactgtaacactcaccgcgagggtccgcggcttcatccttgaagtcaccgtggatagcacagtgggcagccctggaaacaaaatcccctttgacatccaaaatgaagcttgcctagagcagtgtccggtccatggaaatacaagtaatattgttggaaggcagcaggcaccagacatccatttgtgtgggggaaaatgtatcacaaaagcgtttcctggtccagaaagtaaaccattgaacttgatccgactggtaacagacaagagagaatgagagccccaagggaaaagggaaaccccttatacaataatcagatctcatgagacttattcactaccatgagaacagaatgggggaaaccacccccatgattcaattatctc

SEQ ID NO: 468838 - DNA, 626 bp, Homo sapiens
ctagcaagaagccagtctggctgaagcagagtgagcaagatgggagtagtaggagatgagagtggagaggaactgtcagcgcagcagacatcacctggcatcacaggatctcagctgctcccccagcaacgagggccagtccttctccctgaaacagagtatcattggcaagtagcttctggagtgtttacagtcatcctcatcaatttctggaagcatggggtagaaactgattctgaaggcaaagtctccaagaatagcaacacccttcttcagcatttgttcctgaaaatcctttaccaatgtgtgctctttgggagacagtttaaggtcacggagagcaggacagacattctaggtgctggaaagtccaagatccagacaccgtcagatcccatgaatgggcacactcatctgacaaatacaagattccaggctggaacctgacgggtttttggcatcaacatcccttgctgtgaatttgttgttttgctgtttgaactgtgtgacataaatgtctgttgtttataaggcgctattttgttgtagcagcccaaagagacaagcagccatggacaagatgaaaaataatttgtatggctatatatcaataaaagtttatttat

SEQ ID NO: 468839 - DNA, 1164 bp, Homo sapiens
acagctcctcgggggtgtgcatggagcagcatatccttcttctcacagcttcagcttcctgcaaggctgcggagtcacctctgttggcttggacctctctgacctcagatgacatgggaaacggaggccagaagttggcacaagatacaggtcacaaagaccctgctgataaaacaggatgcagtaaagaagtcgaccaaaacccaccaaaaccaacatggcgaaaaacgttacctatgatcatcttcactgctcattacacgctaactgtaatggattcacatactaaaagacactccgaccagcaccatgacggtttacaaatgccgtggcaacatctggaagttaccttatacagtctaaaaaggggaggaaccctcagttctgggaaatcaatgcccctttcccagaaaactcatgaataactcatcccttgtttagcatataatcaagaaataactataaatgtactcagttgagcaggccatgccgctgctctgtctatggagcagccatcgttttatttctttactttcttaataaacttgctttgctttactttatggacttgccccaaattctttcttgtgtgaggtctaagaaccctctcttggggtctggatcgggcctactttctggtaacaaggtgacttttgaaccagtgtatggtggcaccttatctgtcacccttagtacaagcagattcagtcaaatgggaagggtggaaaccaaatggtaacaacctgagaaagtatttatttcctgaggcctccccagccaagtggaactgtgagtcaattaaacctcctttctttataaattacccaatctcaggcagtatctttatagcagtgtgagaacagactaatacagacttggcccaaatcttatattgaattgtaatctccaatgttggagatggggcctggtggaaggtgattggatcatgggggcagatttccccttttggtgctgttcccgtgacagagttctcttgagatttggttgtttaaatgtatgtggtacctctcccattctctcttcctcctgctctggccatgtaaagtgccagctttcccttcatcttctgccatgattgtaagtttcctgaggcctccccaaccatgtttcctgtacaacctgtggaaacactagccaattaaa

SEQ ID NO: 468840 - DNA, 2047 bp, Homo sapiens
acgtcccttcctagtttacagaagagaaaatgagagttatttggctaagtgaattgtccaaggtctcacaagtattgggaaagctcggccttgaacggaagaagagcccagacctaggggagtatgatccacttacccaggctgacagtgatgagagcgaagacgatctggtgcttaacctgcagaagaatggaggggtcaaaaatgggaagagtcctttgggagaagcgccagaacccgactcagatgctgaggttgcagaggctgcaaagccacatctttcagaagtcaccacggagggctacccctcagaaccccttgggggcctggaacagaaggcggcctcctccctggtgtcatatgtgcgcacgtctgtcttcctgctgactttggggatctcgatgatcctggtgctcctgtgtgctttcctgatcccctgtcctcccagagatctgcacagcacctggagccgccacttgggctcccagggaggtgtctcaagaccagctgctaatcttgtatgcctttcggggatgaatggcagcacactgtggtctagtcttctccctgaggaggctcgagatatcacatgtttggagctgatgccaggaagcttggctgaaaccatctgccttgtgacagggacacacaagatgctcagcgcattcaatgcaacgtcagggaaagccatttggactttaaacccaaactacttgtccaacggtaccttggctgccccagttgtggtactgccagacttggatgaagacggtgttcgagaccttgtggttctggccattggggaattgcaggtatgatctctattaaatgttttttgtttcttatagggactgcttctattttagttgtctcagctcctagtgttacattataaatgctgcttgaaatgttctttttacaagggtttaggtttaagtaaattctctttgtgaggttaagtgaatacttgaccattatgaacccattttctctggcagcctcatggctccatggactggggtgtagtggagctttagagttagttaggtctgtatgcgaattccacctctaccactttatatctttgaggccttgggcaagccgtggagcctgtccaagctctggtttcttcatatgtaaaaaaggcatgttatatctacttacatcattgttatgaaaattacagctaacatatttaaagtgcctagagtagtgcctaatttttgctgtgtatatgtatttttagttttactgtattatatatatgtacattttatgtcaattataaaacaacagaacaggctgatacaaagttcataaaagatacataggaaaaaatctaagtcaagcaataataacaacaatgaccaaagaaaggagtgtcataatctaggctgtgacaaggcagactttgattcaggacagtggcccttgaattatggtcctaaattatgatttgcaggaacttcagtgtactggttactctgcacacagataaaataagagtagtctttcccccaaatcacaggaaggaataaattaatgaacagaataatctcaattttaagtttttattctggaagcgtttttcagagcttttgtcaaagtttctctaagactttttctcagacttcctagtgtgtctgccaaggaaatgcttgtgcacaaaagagtcaaacaatcggcaaagaatgtttgtggaaaaatgtggatatggctaattttgtctcatttgataacctattttaattttaatagaccttgtgtttgctgttgtgatctttgtattgcatatatggagtagagttgtaaattctggaggtgaaattatgtagaatggaatgaaatctgttaagattttgtggctttctgccaagagtcccccaaacttaagagtgccccatcagtcatgagttttgaggagcactgctctagcacactaaactctccctcacatttgcaagataaaggcaagatccagaatgagctaaatttctgaagcctacttagttttaagggttttaagctttaagggtactttatgttc

SEQ ID NO: 468841 - DNA, 481 bp, Homo sapiens
ttcctgctgcattggacaaggtcctttcgcctctgggccatgttgtcagcgaagtacttaagcacaggggctccgaagaagaagaccactcagcacagtgccggagaccctgccctgattcccctttctcctcccaaccacaaaggccatgcagcaaatccagaagctgatcaaacatgggctgatcatccgcaagcctgtgcctgtccattcccaggctccttgatgccagaaaaccttggaccatcggaagggcaggcacctgggcatagggattgtgttcaaaaacaagcgtattctcatggaattgtccgcaagctgaaggtagacaagtcccgcaagaagctcctggtggaccaggctgaggcccactggcctaagactaaggaagtgtgcaaacttcatgacgagtgcctccaggccaagaaggaggagatcatcaagatgttgtccaaggaggaagagaccgagagataaagct

SEQ ID NO: 468842 - DNA, 673 bp, Homo sapiens
cggtcttgtggagaagggagggggatgaaaggagtgagtaaatacggcaccttcaaccaaaacatccagagagaggggaaggctgccacctttggtgttttgcagctttcgctggtgatacttcgagttactggaaaattcaaggtgactagggactggagtggacccccagcataccacagcagccctatggcaaagtggccagactgttacgtgggtgcttgttctcacatctcctctccaggcaggtcttccaggtttaggcctttagccagcccccaccagagttatgaagccagtagcaacttgccaccccctggacagagcctgcaggggcaactgaaagcttttctgccactgcctctgcagtggaactgtccttgctacccttggactaacaaaggaacaaagaccttaagtgtcttatccatatcttcaacaagctgcagtcgacccaaggagaggaggccagtttatctcctatgggtcccacacactgtccactgcttgtcaccagaaaggaaactcctggctttggcccacagcacagacacttcgtcctgggctaattgcactgagcaattgttaacccacatctctctggggagaagaccccaggagacaagcaaagtggtggagcagtaagccagctgatgtggagcccagaaagttc

SEQ ID NO: 468843 - DNA, 637 bp, Homo sapiens
ctcgctataccgccgcttatgggcctagacatgagtcaacgagtaaaaaaagttgcacaacatggctgaacataatttgggatggacaaaggaatacagagcaaaatttttgctgttggtacagaggctacagatcaaattgacactacctgctggggtcccaggaggatactcaaaatggagagacttgacatggtccccaactgtgaaatgccctgtccagagaggaagaatccagagaggcagtctggctacagcggctttgccaagctgtagcaggctctgcccagttcaaacttcccaggagctttgtttacactatgcctacatttggcattcagtttacctagggaactacggcagcaatatgcacaagggtagaaggcagctatcatggtgtggattggatgtaaaccatctcagcctggtttccaacccttgttggagaggttacgcggtcatttggaggaaagaagatattctggctttttgagtttttagcattcttgcactgattctttttctcatctttctgggcttatctaccttcattctttgaggttgttgacttttaagtagggattttttttttaatcctttgtgatgaccttgaggatttgattatggtataacgtgg

SEQ ID NO: 468844 - DNA, 728 bp, Homo sapiens
gtgggtgtataatcagagaggcgtccctgcaatgattaaacaccaagggaagcctgccttcccagtccatgaccggcgccggagttttggcgaagaacacgagtacaggggattgatctcccaagggaggtcccctgatcagagtcacggcaccaaatttcatgtgcgtccgtgtgaagagaccaccaaacaggctttgtgtgagcaacatggctgtttatttcacctgggtgcaggcgggctgagtccaaaagagagtcagcaaagggagataagggtggggccattttataggatttgggtagttacttcaggccatctgggcatatacgtgcaagtcacaggggatgtgatggcttggcttgggctcagaggcctgacaatgttcatggcatgtgcagataggagtggacaatctcatcagggccttgcagttgcccttgcctcttcatcaaagatcgattgactatatttatgtggctctatttttggtctctctattctatttcattgttatatttgtctgttcttttgccaataccacactgtcttgatttgtagatttgtaagttgtgctaaaacaacttgaatcaatttggcagctcagtttacacccatgggaggctttgtgacaagtaaaattacatttcctttttagctagatttgtccctattttctgttaacttgaactggctaaagaaaccaggagagattcaatatgagggtc

SEQ ID NO: 468845 - DNA, 1518 bp, Homo sapiens
aggttactaggtgtttgcattgttgaaactatgcaaatgatgttaacaaaaagcaaacgagtgattttcttattcaacttcaaaatgggtcataaagcagtgaagacaactcacaacatcaacgcatttggcccaggaactactaataaacatacagtgcagtggtggttcaagaagttttgcaaaggagatgagaggcttgaagatgagaagcatagtggctggccatcagaagttgacaacggccaattgagagcaattatcgaagctgatcctcttacaactacgatatccgacaatgcccagctcagcggttggatggagaagaagctccaaagcaagcacttcacaaagccaaacttgcaccaaaaaatggtcatggtcactgtttggtggtctgctgccactctgatccactacggctttctgaatcccagcaaaaccgttacatctgaaaagtatgctcagcaaatcaatgagatgcaccaaaaacttcaatactggcagccagcattgaaacaaagccggttgactgaacccaactcatacaaaaaccaaaccctcacagccatcaaagagtataaaagcaaaaagccctatccaaaggaagcaacttcaaagattgaaggaacatcagccagacagatgagaaacaaccagtgcaataactctgtcaattcaaaaaaccagagggtcttcttgcctccaaatccccaccaagggaaccctatcaggctaacatcagaacttttagcagaaactgtacaagccagaacagattagaggcctacattcagcatccttaatgaaaataaattccaaccaaaaattttatatccagccaaaccgagctccataaacaaaagtgaaataaaatctttttcagacaagcaaatgctaagggaaattgttaccaccagaccttccttagaaaagaaaacagttttcttggtatagttttctttgttggcaggttcctctccctccaacagaactgtgaatatacgcaaactactcttttctgtcctgcaagttttctactgagaaatctactgatagtcttatgaagactccagtatatgtaaaaattcacttttctcctgttgattttaaaattacctttgtctttgacatttgaaaacttataatgttttctcagtgtagatctctttaggtttaatctattcaaggtcctttgtgtttcatgaatttggatgtttattttcttcctcatatttgggaagtttatggccattatttctttgaataaactttctgccattttcttttctcttctctttctgagaattccataatatgtacattggtttactcgatggtgtcacataactcccacaggctttcttcattcattttcattcatttttctctttttgttcctctgactgaataatttcaaatgaactgtctttgagctcttttattctttcttctctttgactgaatctgctattgaagccctatatggcatttttcagtttagttattgcattcttt

SEQ ID NO: 468846 - DNA, 525 bp, Homo sapiens
cagacttctgagttgagggataggagagtttccagaaagcatctcgtaaatgttttccccactcagtatgatactagctgtgggtggtggcaagcttcccagtctccagacaggtccagaggtgctgtccagaagcaagggactacggtcaaaaaccttagaagtctacctggtgttctattgtactgcagctgagctgacactcaaaccacaagatgcagtccttcccactctcccctacactttccaaaggcagagaagcctcccccgtggccactgccaccacaagcccacaggcagtgagctcccctctggcccaaagcaggttcagaaataccatccaagagccaaatgctgggattggggaccccaaaagcccacttggtgctccaccccactgtggccagagctggtacctaaggtgcaagacaaagtcacctgtacatttctctccacttttctcaagcagaaagatccttgccccacagccaccacagctgagaatgtgctgagtctcacctgaag

SEQ ID NO: 468847 - DNA, 584 bp, Homo sapiens
agacaccacatatgaaggaactagttgtggagccaacttatctaatttttcatttcttgctcatgcttttggtgtcatatccatttcaaaatccaaggcatgaagatatttcctttatattttcttctgagagttttatagttttagctgttacgtgtatattcttaatccatcttggattaattattacctatggtgtgagtactatgtgcaataggaatgctgagattggatatgcttgtcttgttccagttcttaaaggagtgctgagtaaacacgcaaggtacctgcaggacccacttgtgtccattgatctctcagagcagctgggcatcgtggtttctttgggcaaatttctgatccaaactgggtttggagttgtgacagaaactggactgggtccaggaacagatttgatccgggaattaactggcttggatccagttagaggcctcttacatctgactgggtcagaaaggaactggtagtaagcagtaatatttcaggggttatagagtttggcttttgaaaattcacaaggatttttgtgctctacccttttgttcatttttcttgcctgcatc

SEQ ID NO: 468848 - DNA, 2241 bp, Homo sapiens
catagacgcaattgaagcaattgagttaccagagcctgaggccatggaattagagcgtgtggatgaggaagagaaggaatatacatgcaagagtttgtcagacaacggacaaccgggaacccctgatccagctgactctggaggaacatcagctaaagaatccgagtgtatcacaaagcctgtctctttccttcctcaaaacaaggaagaaatagagagaacaattaaaaatatccaaggaaccataaccggggatattctccccaggctacataaatgccttgcatctacggtaataaatttattcggggtccagcagactaaaagggaagaagaacacaagcttgtcaagtcaaaggttgtgaatgatgaggaagtcgttcgagttccattagcttttgccatggttaaactaatgcagtcccttccacaagaagttatggaagctaatctgccaagtattttgctgaaagtgtgtgccctactcaagaacagagcccaagaaatcagagacattgcacgcagcactcttgcgaaaataatagaggatcttggtgtgcacttcctcctatatgttttaaaagaattacagactactcttgtccgtggataccaggtccatgtgctgactttcaccgttcacatgctgctgcaaggcctcaccaataagctgcagatttttaaccatgagttgtttggtgctgttgctgaagagaaggaagtaaagcagatcctctccaaagtcatggaagcacgaagaagcaaaagttacgactcttatgaaatcctcggcaagtttgtaggaaaagatcaggttacaaaactcatccttccattaaaagagatcttacaaaataccacgagtttgaaactggcccggaaagttcatgaaactttacgccgaatcacagtgggattaattgtaaatcaggaaatgacagctgaatccattctattactcagttatggtttgatcagtgaaaatcttcccctgttaacagagaaagaaaaaaatccagtagccccagcaccagatccacgtctaccaccccagagctgccttctgcttcccccaactccagttcgaggtggacagaaagctgttgtgagcaggaaaaccaacatgcacatatttattgagtccgggcttcggctgctgcatctgagtctgaagacttccaagatcaagtcttcaggtgaatgtgtcctggaaatgctggatccttttgtgtctctcctcatagactgcctgggctccatggatgtgaagccaaggtctttccgactcccaagctcgctcttctgtgtcttaatccagcccactgaagagttctcagcagccagagcagcacgggtgttattagatggagctgaactagctgatcccggtgctttcaaagaaacaaaagcagagcagctgacaaaacacctcttccttctgctgaaggactatgcaaagctcggggccgccaggggccagaacttccaccttgtggtcaattgtttcaagtgtgtgaccatacttgtcaagaaagtcaagtcttaccagataactgaaaaacagctccaagttctactggcctatgctgaggaggacatttatgatacttcaagacaagccactgcctttggtcttctgaaggcaattttatcaagaaagctgttggtcccagaaatcgatgaggtcatgcggaaagtatccaagttggcagtctctgcacaaagcgaacctgccagggtccagtgtagacaggggctgctccatgagaactgcggaatgttctttatccctctttgtctaatgacgatcaatgatgactctgccacgtgcaaaaagatggcatccatgacaatcaagtccctacttggtaaaatcagcctcgagaaaaaagattggctgtttgatatggttaccacttggtttggagcaaaaaagcgcttaaatagacaacttgctgccctgatctgtggcttgtttgtggaaagtgaaggagttgattttgagaaaagacttggaactgtccttcctgtgattgaaaaggaaattgatcctgaaaactttaaagatggcccaggactggctctgcctgttatagcttagcatgtcacacagcctttctggaacacttgtttcttcatctgtaagatggaaattataattccaacgtcacagaattgttatgaggtctaaatgagataatacatgtaacacaattagccctgtccctggcatatagaaaa

SEQ ID NO: 468849 - DNA, 558 bp, Homo sapiens
caccattttgttctgtactaagaaaaagtcttctgccttgggatgctgttaatctataaccttacccccaaacccctgctctctgaaacacgtgctgtgtcaactcagggatttccttggcatctccatttgttagtctttgcagttcactgctctcttctttccagctgggatgaaaacactttattcttccggtatccaaaacttgggggcgggggatgttggagaggatcccacagcaaagggctatgtcacatagtggaacagttttgtgacttaaccatagtcctctcttttccggataatatgtatgctggcattgggaaggacttcagactgcttctgcccatactgccagaatcattctttcccaacatttattttatctcagggtctcagctgcctctgtctgcaatctggttttcacatacatctcacatcccactagatatagtgtatacatttgaactccaggtttagacagggattagttttcttcccataggttttataggtgctcaacaaaccagagagtattaccaagtgcccacttagtgc

SEQ ID NO: 468850 - DNA, 723 bp, Homo sapiens
aggcctgtggatgttgaggtctgtcttttgtgctgactagaggatgcccccggagaacctggaccatgaacacagttgcaaggtttttctgttctaaaagagccaccttgcctgacaagtcatatggcagaacaacagtggaggaggaggacgataggactgttctccaagaatctggacatgagggaaatggagtgaccttcagaaagtacaccatttcccacagaccctctctggaaaaagcacagatcacagatttttcctgtgggttactgacttcctacccacatctgaaggcagggtgttgctccgagttgtttggctgtagtgcggccgcgagctgctgcgctcctggaagctggcctgtcgccccagctgactgcgaggtgttggagcctcatgattcaaactcatctaaaggaaagagatgcgtggacaagttaagcaacttgcccaagagcctgggcatggagctctagtactctgactccagaactctttttcttgactgcttggtgcttctcagtcaaatgttaggttgaatcatataaaacttcctttttaaagaaatatctgataagagaggttaaaaacttgtccaaagactcattcaaatttctctcctttgttaaaactatacatttttcggtgctaaagttgaacctaaattattgctagcaataggggaaatgattagtaaattaattttcatttccatttcaa

SEQ ID NO: 468851 - DNA, 581 bp, Homo sapiens
ttgtcagtggctctttcagtgatatgaagttaaaaccagaggaattcaagggctccacagtcgtcgagctgatgaagaaggaaggcactaccctgggtctgacggtatcgggaggaattgataaggatggcaagccaagagtatctaatctgcggcaaggaggaattgctgctagaagtgaccagctggatgtgggtgactacatcaaagcagtgaatggaatcaacctggccaaattccgccatgacgagatcatcagcttgctgaagaatgtgggagaaagagtggttcttgaagtagagtacgagcttccaccggtctctgtgcaaggatcaagtgttattttccgaacagtggaggtcacattacataaagaaggcaatacctttggttttgtaattcgagaaaaatcttctcttctttaaataaacgcaacattgaatgataataaaactggaaaccatatgtagctctatttttggttcattaatacagagcaaaaagccaatgtttataaaccttgtcaattcagtcatcctatacttttcaacatgtcttttgtctttccttttatatttttc

SEQ ID NO: 468852 - DNA, 558 bp, Homo sapiens
aactttcttgaccctatactctccttcttcttgcggtggcatgtactttccctcccaccacagctgatatcacgatggccctcatggtggatggtaaggcccgcatagagcaaaaaggcagaaaaagagcaacttctcactctgctggagctgggatatccgtcttctcctgcccttggacagcagtgttctgggttcttgagcctttggactcagatcagaacttgcacatcgttccccctgattctcagcctgcagacatgggaccaaattacaccactggcttcatggttcttcagtttgcacgtggcatatcttgggacctcttgtcctccatcatcatgggtgccctgggaatggcattttacttaggaaatttcaatctgaagtccctgttgtgtactggaaagagcgtctctaaggaaagaagtgaccttgggcaagtcgtcaatgctccttggatcccaccttcctcatctgtaaaatgaaagaactggatgagatgatttcaaaggactcttttagctttaacaggtttcagtatataaaagccaaaat

SEQ ID NO: 468853 - DNA, 1938 bp, Homo sapiens
tgggaagaatttagagacaagggaaaagcccagaaatcaaatgatggagaagtggtacagagaggagtataatttactttatggcaagtggaagggtcagacaagccttcagaggtgtgggattcaagtacactatcagttttatacaaggaaagctgacttagagaatggtggcctggcctcttatatcccagctgaaacttgcctgtactgggatacagaggctccatctttcttggtgatttcatttcagaaggatggctcccaggtctttgagaaagatgttccattcctgggttacagaatgcttatatctcaaggaaaattgattttctgtccaaaacacctaaatataaaaccccatctttctgctatgccatggtactgcaccatcatgagagaacgagaaaggagtgaggacaatactatgaccataggcagagaaaaaagccattctcagggaaataaagaaaggacatagttgccattttcaatattaatagaataatctctttttacaagtgccatcgacaaagactgcatttatcgtacacattgagcaagtgtgtaaggaggaactgacatttttctgttattggtaacgtaggctctgaaatactatttaataagaagcaagtatttctgaccagaacaatgtgggacatattgaaaagcgtcagcagaaactgaggagagagaataactaaaaggaaaactgtatttgcagcgtctttgttagaagacgctacatatataatataaaaacttatattttccaccatttccattgtagggtgctagaaattaatttaacactacagtaaactatccattgtgttcggttataattgtttaactggaaggtaaactgtttctaaagttttcattgcgtgttaataagtcattcccttattcacttatttcttatttttattgctcattccttcacttgttcatccatccattcattcatttaataggtaaaaattatagtgtgcatctagtcattatttattatttcactgttttcatagaaacacaagtatttttctttttcttatttatccatacttggcagacctttcctgattgttctagcaaagactctgattgtcaaaagttagaaaacatggaaggcaacaccccttacagaattctgggttaacaaatgggtactacaggggacactggcaaggctgcaagtaaacgaacacttcaagtacttttatttattcatttccaatgatcatatctactgctaatcagaaacatgacaataatggctggatctgaaaaggagtaaacagacactataatttttaaaactatcagccaccataaacataaggcaaagaaagcttgtgttgtaaggaattaaattcaatgtgctattatttcttcaattcaaacaagataacgagaaatttacaacaggcataggcctgaaaagtgtttgcctgaatgtaataacagtgtcactcttatctatggagagaggatgctctcattcactcagacagatgtgaacacactagtcaacttggtaattgtttcagtcactctatttaaacaattttaacacaaagttccttagtgaaccttattaggcagaactctaataaattaagttttcttgatataatatggtatattagatgcagatttttattttacacttttattttgacatcatggctctttcatttaaagaaatatttttgaaaaatgtattacattttatgatactgttatctattgttatttagctttctagtttatatttcagctttctagtttatatttatattatatttatatttatattagtgctgatcaattgtttataactgcataggatcacgaaatgaccagagatcagttattcctgctcccttatttttagataataaaggactgacatactctcagatctattta

SEQ ID NO: 468854 - DNA, 494 bp, Homo sapiens
ttcaggaggggaggccagagagcacagctcacttctctgaatagagatgacacctgtggctctgatcccaggggatactacattaattgagctgatctatttagcatgggcacaacagctgaatcaaagggaaagtgttattaaattcaccaaacatttactaagcacggactgctctatgttcctagcttttgactcagccagtagagaggagaagcggctggacgttgggaagaggcaacttgacttcaggggaaagcgaactgcccttcctgtccccttccagctcccctctctgctgagaaatgcatttaccacccttcagttcatccacacgacctcattctcgttgagctccaggcaagaattcgggatctaccaagtgcaggtacccaaaaaggctgtcacactggccctttgccctcactggcagagggcagccgccccatgtgacaatggaaagggcccactgagctgataacacactgctgtcc

SEQ ID NO: 468855 - DNA, 648 bp, Homo sapiens
agcagtcttagtatctgaagcagttaaaatgatacagggaagagatcttactgtgtggacgtctcatgatgtgaacagcatactcactgctaaaggagacttgtggctgtcagataaccatttacttaaatatcaggttctattacttgaagggccagtgctgcaactgcgcacttgtgcaactcttaacccagccacatttcttccagacaatgaagaaaagatagaacataactgtcaacaagtaattgctcaaacctacgccactcgaggggaccttttagaggttcccttgactgatcccgacctcaacttgtatactgatggaagttcctttgtacaaaaaggacttcaaaaagcgggatatgcagtgaataatcctcctctaaataccatatggctcaccctcttcactccaatgatttaacagtgttcaagatcacttatgaaatcatccatcccctttccactggtatgaaatgcctcttttatcatatactaaatttttatgtctactcggattcatttctagatttttaaccttccataattgtgacaatgcaaattttgaagtgccattttatgaggtttttagtgttgtattttggaaagaacatgggttttggacttactagatatgtcattctc

SEQ ID NO: 468856 - DNA, 1226 bp, Homo sapiens
atggtttaaaaaggggagaaaacctaacaaaagcgaatagagaaactggcaaaaggcatgaataaacatttcacagaagaggaaatcggaaaagtccataagcatatgaaaagatgataaacatcattagctatttactatctcccaatgataaaggatgcagtaatacccaagactggcagaaaaacacaggagttgtttgccataccctagacctggagtctgctacccctgggccatggacaggtagcagtccgaggcctgttggcagctgggccacacagcaggaggtttgttataagctgaacatccaccagacaactggtaattttatactgatgtttggaacagaagttcatcttcttattactgtggacgatctgtttgaaagttttgctaccttcaggtttgtgagtggcagaaacggcgttgaagtgtccaaccctcatttttatgatgcttctcaacaaaacgttgatttaattaccaaaaaagaatgtgaagaaataaacccggaaattgaaacacaaatacaggaaattccagggcatgaagtcacatacgatgaaaatagaactgtccccagaagtttggtaggggtcgtctagaagttcaaatacttctaagcagagtgaaagcatatcgggtagctctggcaatacatttcaggagggaatatgcacgtgcaggtccatatttggaagtaaaggacgcaggatggccttgtcaaggccttactaaaccaaggtcctggagggacttgtgttcattgctaggcaggagactttgccttctgtttgctgcttggcctcacaacttcccattctctgagcagatgtacaagccatttgccagtcatagaaatttccctttctaaaatcaatacaactttcaaaatgaagctgtgggtttattaagataattgcaaatggtaacatatctgagagaaaatcttaatagaaagttatttagaatacaagtcagaaaaaatcaatgtgtttattgagttttttgaggagcctcaatactgttctccagagactatactaatttgcattcccaccaatggtgtatgaggcttccccttttcacagtgatttctaaggactttacctttacatatgggaccagagtatgaacattttgaacaccatatgaggtgatatggagattcaaggctccagtccctgagtagcactcagttgtccctcaaagccaccaacacc

SEQ ID NO: 468857 - DNA, 546 bp, Homo sapiens
cggcagtggctgctccagatgggctgctgctgccatcaatattttatggtagatttccagaaagttccaccagtatggcacctgggcgacttctctctatccactcggagaagtttgttattaccgaccttctgaagcctacttctgtcaactcatcaaactcattctccatccagttttgttttcttgctggcgaggagttgtgttcctttcgaggagaagagacacaagcctctcagttgcaggtctgttggagtttgctggaggtccactccagatcctgtttgcctgggtatcaccagcagagtctgcaggaccgcaaatattgctgcctcatccttcctctggaagcttcgtcccagaggggcatccacgtgtatgaggtgtctgttggatcctactgggaggtgtctcctggtcaggctacacaggggtcagggacccacttgaggaggcagtctgtccattatcagagcttgaatgccatgctgggagaaccactcctctcttcagagctgtgaggcagggacgtttaagttggagaag

SEQ ID NO: 468858 - DNA, 698 bp, Homo sapiens
agccaaacaaaaggcagcagaaacctctgcagacttaaacgtccctgtctgacagctttgcagagagtagtagttctcccagcatggagtttgagatctgagaatggtcagactgcctcctcaagtgggtccttgacccccaagtagcctaactgggagaaactccccagtaggggcagactgacacctcacatggctgggtacccctttgagatgaagcttccagaggaacgatcaggcagcaacatttgctgttcagcaatattcactgttctgcagcctccactgctgatacccaggcaaacagggtctggagtagacctccagcaaactccaacagacctgcagctgagggtcctgactgttagaaggaaaactaataaacagaaaggacatccacatcaaaaccccatctgtatgtcatcatcatcaaagaccaaagcaatggaacaaagctggacagaggatgactttgatgagttgacagaagaaggcttcagacaatcaaacttctctgagctaaaggaggaggttcgaacccatcacaaagaagctaaaaaccttgaaaaaagattagatgaatggctaattagaataaccagtgtagagaagtccttaaatgacctgatggagctgaaaaccatggcaagagaactatgtgatgaatgcacaagcttcagtagctgattcgatcaacc

SEQ ID NO: 468859 - DNA, 791 bp, Homo sapiens
gctggtactctgtgatagtggtgtaagctgaccaagacagcagaggaagtagaccgacctcctgtgaaggggcaggcacaggacacgtaggggtcaggcaggaagtccagaccagcacgtacaatatgcctctgattccttctcattttgcaggtctcattttaaaactcaccaacccgggctttcatgagaccctgacagaaggttcattcctgtcctatgttctcacagcattcactccatctacccctctgatatgtacacaggaagaaaggggcaattgctttgctcattttctgggtcccaactgtcaagtaagctccctgaagccaaaatctgccccagagggtagcacacattgcgaccccttggagcagctgtttgctgttgatgacataaagcaaggagagctgctgtcttctgggacccagcatgtgctttttgaccatttcttccattgtaagctcttccatagtagagcctgggctttcttcagtgccacattcccaccagtctggggcaaagcagtgcctgtacctgttagcgtgctgaatatactgcagcctgagcatgtggagctcagtttcatgtgtttatttcaagacaacagggctgactgggcttccggtcatttccggtgatttctggaagtatcttttgataatatctagcccacttgcttgtgttctttataacttcaaataatgtttatataatgacagaaaaagtttggagattgtggcagtgggataaagcacagattagatgtctaattacttttaaaaagttga

SEQ ID NO: 468860 - DNA, 710 bp, Homo sapiens
ccttaagactgccactgattctctacagacagtgcagcctagtatctcccagacttgtacttcctatggccctgcacttggggccccactgcctggtagaaatgaagctttcgacagattggatgatgcctgcccttattgcccatgaggaagatccaaagagaactttggccttaactaagcttcctacattctcctggagtcggtggtttatgaatgtggtgccatctggggaactgacaacccctgatgtgttcactctgctcgtcttccagtgtcagcccttgggaccaaagatccaagaatccaaacctctcatgtctgagggtaggaaaggatggctgtcccagcttaagacgagaaagggaattcacccttcttttgccttttttgtctatccaggcactcaacagattaaacaatgtgcacccacattggtgaggaccatctgctttactcagtctactgactcaagtgttgatctcttccaaaaacaccctcactgacgcacccagaaatagtgctttacaagctatctgggtgtcccatagatcgtaacaagccacttcctccatctcatgttcccagaccattccagcccacagtaatttctccttttcctgactcctcatgttacctaatgtctttgccaaagactttagctcatggattttctagctcataatgttgttgaattgtattttgtgtat

SEQ ID NO: 468861 - DNA, 854 bp, Homo sapiens
gctgaggagtgtgggcgcaaggcgcctgcagccccgctaatctggtggggatgtggagaacctttgtgactaactcagggattgtaaaggtaccaatcgcgccctgtcaaaacagaccacttggctctaccaatcagcaggatgtggctgtaacactcaccgcgaaggtctgcagcttcactcttgaagccagcgagaccacgaacccactgggaggaacgaacaactccagacgcgctgccttaagagctgtaacactcaccgcgaaggtccccagcttcactcctgagctggcgagaccacgaacccaccagaaggaagatactccgaacacatcggaacaccagaaggaacaaactccggacacgctgcctttaagaactgtaacactcaccgtgagggtccgcagcttcattcttgaagtcagtgagaccaagaacccacccattccggacacactaggatcacattagctttttcactcaccacttcacccagttactatatatcaatcttactttctacaaaaagttttaaaattttatataaatgtaattgttaagccaaatttcttgcattgctataaggttttatattcccaagagaaggttgttatacttatgcctatacacttttagtatattctatttgatcttgtattttcaatctaaatggaagttactgcattctcaaagccctcctactacttaaccgtggctaatacagtttcctagaacacaaggagagtgatcaagactcatttgttagtgtaaatgtcttttccctggcattataaatgactagtgtcagggaaaattactaagctgatatttaggaaatttttttctattttt

SEQ ID NO: 468862 - DNA, 871 bp, Homo sapiens
gtcttttctgagacaaggaaatggccaactcgggcctgcaactgctgggcttttcaatggccatgcttggctgggtgggcctgatagcgagcactgccatccctcagtggcagatgagctcctatgcgggcgacaacatcatcacagcccaggccatgtacaaggggctctggatggagtgcgtcacgcagagcaccggcatgatgagctgcaaaatgtacgactcggtgctcgccctgccgggagccctgcaggccactcgagccttaatggtggtgtccctggtgttgggcttcttagccatgtttgtcgccacgatgggcatgaagtgcacacgctgtgggggagatgacaaagcgaagaaggcccgaatagctatgactggaggcattgttttcattgtggcaggtcttgctgccttggtagcatgttcctggattggtcatcagattgtcacagacttttataaccccttgacgcccatgaacgttaagtacgagtttggacctgccatctttatcggctgggcagggtctgctctggtccttctgggagatttgccagaggactttgaagagaagagtctggtcataaactcagagacatcaggcaattcatggttggaattcaacatgttcattgactgctccatctcccgtctcatgtcaggatcacttgtgttcaccactttaggcagaagcacaaatatcaataacgggagaaccatcatcataaccattgggttcatcagaaagtctgtccagccccacgattccctcttaataaagtaagaaggtggacctgaagatttcatttggagaggatagggtaatctgaccggacgcgtgggtcgacgatatcccggggaatc

SEQ ID NO: 468863 - DNA, 759 bp, Homo sapiens
gtctttgttccaatggatccagagaacctgcctgtcatcaacaactatctggatgccaatgagcctgtgtccttggaggcccgtcttagccgcatgcacttccatgacagtcagaggaaggtcgactatgtacttgcctaccactaccggaaacgcggggtgcacctggcccaaggcttccctggccactcgctggctatcgtctccaatggggagacaggcaaggagcctcatgctgggggcccaggtgacattgagctgggaccgctcgatgccctggaggaggagaggaaggagcagcgggaggaatttgagcacaatctgatggaggctggactggagcttgagaaggacttggagaagttggctttaaaattcagcgtggcctggcatcgccagcaggtctacgggctgttcttggaagggacagcgtaccatcagggaagtctcggggcccacagctgctttcgggaggtggagccctactctgtctcggtatcaggaagaggtcggggtgactttcagaaattctgtctttagagtgagatttaatctatggttttaaggaagaaaacggacttttctgagtgccttttgtgagcctcatcacgtgtggttttgctttcacttgtgctcatttagtcttcatgaataccctgcaaggggctgttattcccatcttggaggagacaggccaagtggcttggccaagaattcacagagattctctgcagaggtcagcagttacgtattcaaagc

SEQ ID NO: 468864 - DNA, 483 bp, Homo sapiens
actgatcatagagcttcgctcaatgaagcaccccgtccaagaccctttaccacctcctggtggcctggaggactcattattgagcccttggctgcatggaaaattcttccaggggcctggggaagatgacaaggcctcccatggccagagtccatttctctactatggcagctgcttggaggtgcttgcagcctcattgccaacccactggcacattcaggtcaatgcagaatgtgcctccaacttatcacactggagcacattagacaatggaacagacccctgtcttaagccctttgggaccctgtcagaagagattccaagatttctggctgaaggatggcaaagagggtctcaggggacaggaaggttctgcaaagatcacggagaggcaagagctcagcaaaatgcccccataagctgttcatgaaccctttggcttaccctaaagctgcatgtgcatggatctgatcctaaatagca

SEQ ID NO: 468865 - DNA, 2268 bp, Homo sapiens
aaaatctgggtcacagctgaggaagacctcagacatggagtccaggatgtggcctgcgctgctgctgtcccacctcctccctctctggccactgctgttgctgcccctcccaccgcctgctcagggctcttcatcctcccctcgaaccccaccagccccagcccgccccccgtgtgccaggggaggcccctcggccccacgtcatgtgtgcgtgtgggagcgagcacctccaccaagccgatctcctcgggtcccaagatcacgtcggcaagtcctgcctggcactgcacccccagccaccccatcaggctttgaggaggggccgccctcatcccaatacccctgggctatcgtgtggggtcccaccgtgtctcgagaggatggaggggaccccaactctgccaatcccggatttctggactatggttttgcagcccctcatgggctcgcaaccccacaccccaactcagactccatgcgaggtgatggagatgggcttatccttggagaggcacctgccaccctgcggccattcctgttcgggggccgtggggaaggtgtggacccccagctctatgtcacaattaccatctccatcatcattgttctcgtggccactggcatcatcttcaagttctgctgggaccgcagccagaagcgacgcagaccctcagggcagcaaggtgccctgaggcaggaggagagccagcagccactgacagacctgtccccggctggagtcactgtgctgggggccttcggggactcacctacccccacccctgaccatgaggagccccgagggggaccccggcctgggatgccccaccccaagggggctccagccttccagttgaaccggattcccctggtgaatctgtgatgcccccaatgttggggtgcagccaagcaggaggccaaggggccggcacagcccccatcccactgagggtggggcagctgtggggagctggggccacaggggctcctggctcctgccccttgcacaccacccggaacactccccagccccacgggcaatcctatctgctcgccctcctgcaggtgggggcctcacatatctgtgacttcgggtccctgtccccacccttgtgcactcacatgaaagccttgcacactcacctccaccttcacaggccatttgcacacgctcctgcaccctctccccgtccataccgctccgctcagctgactctcatgttctctcgtctcacatttgcactctctccttcccacattctgtgctcagctcactcagtggtcagcgtttcctgcacactttacctctcatgtgcgtttcccggcctgatgttgtggtggtgtgcggcgtgctcactctctccctcatgaacacccacccacctcgtttccgcagcccctgcatgctgctccagaggtgggtgggaggtgagctgggggctccttgggccctcatcggtcatggtctcgtcccattccacaccatttgtttctctgtctccccatcctactccaaggatgccggcatcaccctgagggctcccccttgggaatggggtagtgaggccccagacttcacccccagcccactgctaaaatctgttttctgacagatgggttttggggagtcgcctgctgcactacatgagaaagggactcccatttgcccttccctttctcctacagtcccttttgtcttgtctgtcctggctgtctgtgtgtgtgccattctctggacttcagagccccctgagccagtcctcccttcccagcctccctttgggcctccctaactccacctaggctgccagggaccggagtcagctggttcaaggccatcgggagctctgcctccaagtctacccttcccttcccggactccctcctgtcccctcctttcctccctccttccttccactctccttccttttgcttccctgccctttccccctcctcaggttcttccctccttctcactggtttttccaccttcctccttcccttcttccctggctcctaggctgtgatatatatttttgtattatctctttcttcttcttgtggtgatcatcttgaattactgtgggatgtaagtttcaaaattttcaaataaagcctttgcaagatactcgagtcccctggttctgccttctgacccccgtagagaggaggagaggggtgggcagctaggaggaggcacaggatgaggtggggaccccctctagacctaagtcacctgccctcctctgacctggagctgggggccaa

SEQ ID NO: 468866 - DNA, 660 bp, Homo sapiens
tctatagcattattattttttattacagatttggtaatcccattatgactcctttaatgaccagcagcccagcgactttcctctggcatggcctcaagcactgcttcagctccaccaggagcaccaaggcactagaggccaggcaggagcagcccaggtggaaggccccagggcgaggaggagccccagcagcctgcctctttccctttcgagggagaatttgtcatttggtgaacaccttgcaagtaccagatactctgctagctgcttgtgaacactgtgttacttcatcctcctctgattactcccacaggatgaaatcctacatgtggagcactgggtcagccaccgtccacattttcagtgaggcctttgacaataaggccaaatggcccccctgaaaaattgcaatggtttataatggttgcaatggtttaattacccatttgctgagtaggattttgccaggtgaaaatgagggcaaaggcacatcagctgcaaggaaggaagtaaaagcttagaagcaggcaagctctgagatgctaaatcatgtaggggtttatgttcatcctgtgacaccagatgaggccctctggcagcagtggcatgtattgtgagaggtcagatggagaaagggagatccattagtggttggtggaa

SEQ ID NO: 468867 - DNA, 2387 bp, Homo sapiens
cagtctcgccatgttgaagtcagaatggcctgtattcactgtcttcgagagaacagagagaaatttgaagcgattataggaggatcatttgaaggatatttaaagcgcttggaaaatccacaggaatgggtaggacaaatggaaataagtgccctttctcttatgtacaggaaagattttataactaatctggaacctaatgtttctccttcacaagtaactgaaaataattttcctgaaaaggtgttactgtgtttttcaaatggaaatcattatgatattgtgtatcccgtaaagtataaagaaagctctgctatgtgtcagtctctcctttatgaattgctgtatgagaaggtatttaaaactgatgttagtaaaattgtgatggaactagacacgttggaagtagctgatgaagacaacagtgaaatatcagattcagaggatgacagctgcaagagtaaaactgctgttgctgctgctgatgtgaatggatttaaacctttgtcaggcaacgagcagctgaagaacaatgggaactctactagcctgcctttggctagaaaggttcttaagtcactcaatcctgcagtctatagaaatgtggaatatgaaatttggctggagtctaaacaagctcagcaaaaacgtgattattccattgctgctggcttacaatatgaagttggagacaaatgtcaagttaggttggatcacaatggaaaatttttgaatgcagacgttcaaggagttcattctgagaatggaccagttttggttgaagaactgggaaagtacacatcaaagaacctcaaggcacctcccccagaaagctggaacacagtgtcagggaagaagatgaaaaaaccttccacttctggacaaaatttccattctgatatggattacagagggccaaagaatccaagcaagccaataaaagccccattagcactacctcctcgactgcagcatccttcaggagtaagacaacaacaaaagccagcagaacatgtgtctttgtcaaatccagctccccttctagtttctccagaggtacatctaactcctgcagtgccttctttaccagccactgtgccagcctggccaagtgaacctacaacttttggaccaacaggtgtccctgctccaattcctggtcggtcagtgacacagactttgacccctggacctgattctgctgtatcccaaactcatttaacaccctctccagttcctgtgtcaatacaggcagttaaccagcccttgatgcctttgcctcagacattgagcctttatcaagacccactctatcctgggtttccttgtaatgaaaagggagatcgagccattgtaccaccttcttcactgtgtcagactggggaggacctacctaaagataagaatattcttcgattcttcttcaatcttggtgtgaaggcatacagttgtcctgtgtgggccccacattcttacctgtaccctctgcaccaggcctacctggcagcctgcaggatgtacccaaaggtccctactgaggctagtgttaatggtcaaatgctacagccagtgattggaccgccgacattttcttcacctctggttatccctccatctcaggtgtctgaaagtcacggacaattgtcttaccaggctgatcttgaatctgagacccctgggcagcttctgcatgctgattatgaagagtcactgagtggcaagaatatgttcccccagccatcttttggacccaatccattcttaggcccagttcctattgcacctcctttctttcctcatgtttggcatgggtacccttttcagggattcatagaaaatccagtaatgaggcagaatattgtcctgccctctgatgagaaaggagaattggatctgtctctggaaaatctggatctgtctaaagattgtggttcagtttccacagtagatgagtttccagcagccaggagtgaacatgtacattctctccctgaagcaagtgtgagcaattctaaacagagagagagagaaattgtgcctgttgaacttgaacctaaaaggaccattcaaagtctgaaagaaaaaacagaaaaagtaaaagatcctaagactgctgctgatgtggtcagccctggggccaactctgtggatagcagagtgcaaagaccaaaagaagagagttcagaaaatgaaaatgaagtgtcatattttgagaagtggggcggatatcaacatgtgagaagtgaggagtcctggaaaggacagccaagcagaagtcgggatgaaggttatcagtaccatcgaaatgtcagagggcgaccatttaggggagataggaggagatcagggatgggagatggccataggggacagcacgcttgacggtt

SEQ ID NO: 468868 - DNA, 1669 bp, Homo sapiens
agtgacctagtgcctggccttctggcatctctcagctcccctcctcccattccttttaagccaccatgttgatcagagccaccctgggctgtcactgtggcccagaggctgccagaggaaacttctggctctgtgtcattcacatcgttgtaatggccttgagcaagtcacttaaccaggatccacattcatctatagactggaattttcgatgtgtacctcacagggtcattttagtattagatgaggggctgatgctgccctcagtgctgagttgccaaaccaagaacctcatcacaacgcagtgccccagttgctttgctccttcagtcactgctccaacggagcttaaaccaacttcagctaaatggaattgcaacacaattggtggcttccagggacatatttatactttaacgaagaactgtaggggaggcaaacctttaactccaaggaatgagtccctagttattggatattaaccactataatagctctctttttattgctgtttgcattgtatatctttatcttttacatccttttaatttcaatctagttgtacttttaaatctaaagtgagtctcttggagacagcgtatagttggatcatgttttttaaatctattcttccaatctcttaattggaaagtttaatttatgtgcatttaatataattgaaaaagtaagatttgtctgccactttgctatttattttctatacatcatatgtctttttaaatctcatgttctttcattactgccttcttttatgttaaatagatattttctttcattctcttgtttcatttactatatatttttgaattattctcttggtagttgccctggggattaccattaatatctgaatttataaccatctgttcatgttaataccagcttaatttcaagtatacaaaaatgttgctctaaagtggtcctgttttcccctcccatatgctattattgtcacaaatttcatcttaatacattttgtgcccatcaacatacatttataattattgccatacacattttatttaaatcagaaaaaaagagttaccaacaaaaaataaatttgtattgttttatatctgacttcataatttcttttcctagcactctttatttcttcatgttgatccacattactatcttgtgcctttgcatttcagcctgaaggattgcttttactattttttgtagggcaggcttgttagagacaaactctcttgttagagataaagtttctcagtttatctggaaatgtcttaatttatccttcatttttgaaggatagttttgccagatatagaatttttgattgacagcttttttttttttttaaagaactttgactgtgtcatcccactgtttccagccttcatggtttctgatgtaaaattagctgttggtatcattgaggaacccttctatttgatgaattgtttctctctttgtgctttcaaaattctttgtctttgtttttcaatggtttcattttgacatgtgcagctatggatctttttaagtttatcccacttggagattgttgagcttcttgaatgtgcagattaatagttttcatgaaattgggggagattttggtccttatttcttcaaatattctttctacttctttctctcctttccttctggggttccc

SEQ ID NO: 468869 - DNA, 1382 bp, Homo sapiens
aaatgcaggcacctgctgtgtgtggtgcacgttgttcccagtgggtcaggctgcctgtacagggaggtcctgtgttccctgggcacagagccatcctccagatgaaccagtgggcttatgcccaccatcttgcttttacctttatgccaaatgaagcagtaaggaacaccctcctgtttgcagccggagagataggagatgaagaagcgttcccagccaaggtcacagatctagggtgtcaactgcaggcctctgtcttttgcggagctttggacggggagagcaagccccatggccctggatccctcacaccagcagcttggggttcatctaagttacatgccggcttccagccccatgcgaggagcattactggccatgcccgcaacagacaagagggcatcattgttttgtttggttggtttaggagggctattaagggagattgtggagacaaatggagagaatatgggagcaaagaactgggccctctgttcactccttttgacactcctttgcttcttgtacatgtccccactctggctgactttggtgtgtttctggactcacacaccacagcacagatagagttgcagagggggcaacaaatatacactgtgcacaaatattcaccaagtgtctgctataagcttgaacctccaggccctaagaaatgcatcaggacccagcccctgaatgctgagtgctagttgttgaagagattaaacttacacccaagaataggtgagaaaacagcccagtgcagattgagtggcacccacctggccacacctggagctcccaaaaaggaaaggtgggcagagcctgcaggcgaaggcagcaggcagcaagggtggcaggagagctcagctgtgggggtagatggtccaggcgtggatcctggctatgccccttcctctccgtgagaacttccctgtgttatgtgacctcactaagcttcagtttcctcatctgtaaatggagaaaatgacctgtaactcctagtgaggtgcatggatgcctgcctgagctgaactcagtagagggtatggagcacccaagtgtctgatgaccacagtgaagtggtttggaaaagggcccatggtgaggagggggctctcagatggtgaccgctatgggattgtctgatgctggtctcctctgtcagtagtccagaggtctgtgacctcctgctggttaggccccaggccaaccaggcaccccctttcttccctttccaactgttacttccatgctactccccacagacaactatgggaaggaaagtgtctgcaccccaacagcctcctctcccttcctcaccgctcatgtgcaagcgcatggccctgcttagagctgaagtgtccttattgtgaaatgcc

SEQ ID NO: 468870 - DNA, 650 bp, Homo sapiens
gggacttctgtttccctgccctgggcctggagaatgttaaccatgaaaggcaaatgggcttcggttggaaacaagccattattagccactatttcaggcagtcacatttcccacaaggcacttgtgcaacaagttagcagggaagaaagaagccgagcctttgtacggcggggccagaacacaaagctcattgtgatgtttgtgcttctattcagacgccacgtgaatatctttttgaaaataatccaaacgaggcacaaatgggaacaagacagtttccttgatgggaaacacctgaaggcacaatcagacacttccgtagagcagtcagacctcagaagaaacccacagcaggaggggacagctctgagaggaactgggcagcacaatgtgtctcggatgagcagcaatctgatgactcaaaaccctgctgagctgcaggctccctcccatggctgcaggtccctcccattcagcacgcccaaaacgcagtcaacaacatctccctgcgacccattcatcccctattcctaatctcagtaagtgacgctccatcgcctgtgaaatgctcacccctttttctcagtgtcaccacttccctccccaacatgcaatgctttaccaagacacccccttctgcagctctcctc

SEQ ID NO: 468871 - DNA, 869 bp, Homo sapiens
agtaggtacaggatttctctctcttgagcatctgctacatgccagatacttgtactagtatggcgatgaagggtgatgagcagccacaccactgccccattcacctgctcaggaagacactccccacaactcactgggacatgagattggctcctgggagctgggagccaggacttcagaattcaacaaccattctgaaaaacacaggaaatgagaaagatcaatttacatgtggaagatgtgcatattcatactcttcctataatcctatagacttccagtttggggcgctggagaggccacagatgaatgcagaagcaaagtggaaaagtcctgtgggtttttttctgctctggtacgaggaaacacatgcaaatgatctttttatgagaaaacccattgagaacagtttcccacccactgtcaaggtccacagagtccagcctcctggctggagaactgacctttaaaactcttgtttacatctaaccacatcttcaactccagtctggcctggcatccaaaaccagaaagccaaacaatatactattcagaatgcatcaggctgcaaataatggattaaatcagattaaaatttgattatattaaaagaaatgattttttttttgccctgcaagacacctggagatcaacagttaaactattaggctgtatcttccttgtaacctaggctttacagttcttaagaaaatatataattagggcaaaatcaaaatatggcaatgggtataaattgtctcactcaagtactgttttcaattatccttctctaagctttggctttctttactcttttgcattttctaagtgatttcaggcattttaaaactcttttgttttaaacccaa

SEQ ID NO: 468872 - DNA, 702 bp, Homo sapiens
agacttaaccgtccctgtctgacagctctgaagagagcagtggttctcccaccatggtgtttgagctctgagaacagacagattgcctcctcaagtgggtccctgacccctgtgtagcctaactgggagacacctcccagtaggggccgactgacacctcatacaggcaggtgcccctctggaatgaagcttccagaggaagaatcaggcagcaatatttgctgttctgcaatacttcctgttctgcagcttctgctggtgatacccaggcaaacagggtctggagtggacctccagaaaactccaacagacctgcagctgagggatctgactgatcgcagctcctcgccagcaatggaacaaagctggacagagaatgactttgatgagttgacagaagtaggcttcagaaggtcagtaataacaaaattctctgagctaaaggagcatgtcctaacccatcgcaaggatgctaaaaaccttgaaaaaaggttagacgaatggctaactaggataaacagtgtagagaagaccttaaatcactcgatggagctgaaaactatggcacgagaactacgtgatgcatgcacaagtttcaatagccaatttgatcaagtggaagaaagaatatcagtgtttgaagatcaaattaatgaaataaagtgagaagacaagattagagaaaaaagagtaaaaagaaac

SEQ ID NO: 468873 - DNA, 725 bp, Homo sapiens
ctgaagatggaactgcccccagagatggaggccactgggttcaggaccagtctcacagatggtcccgcaggactgatgggtcctggggctcaaaccctggcttcagtggctcaaactgccattatagcacaggagccccggctaattctggaaattaaaggaaggaaagtagacctccttctaaacattagagccagtctctcccttttctcctctctaatccaggcctctcctcttcccataaaagggtacactcgccagcagttttgccaggagagtacactgaacaaaggagacagggtcatttataacctgacgcgtccaccctactgctgtgtccagtttccaatagctggaatgggacctcacattctgtatttgtcccgattggctagcaacttagaactttttaaaagaggcaaaggtagaggagaacaaaagaaggaggaagtaacttgtggaatgctgggaaaggaagtagccagaaagaatcgccatccaacaccccctgacagcagttaggtttgcttctcttgagcgggggaatgatacaggagttactaagaaataatttttaggcagatagaaagggtaaaaggaattctcgaaaggcaaattaaagggccaggctggcaagctttgatatgcaaacgcaggccattagaagctgagtccacccaatatggtgattcgtgccttcttcttgtcaccaggtatgccaagtg

SEQ ID NO: 468874 - DNA, 958 bp, Homo sapiens
agcaggggcacagcgtggctccagagagggctggagagagatgcttgctggccatatttgtcgggaatgtgcagaggtgtggggcccagctccacctgagcccctggctgccaccctggagctcttggctgtagggcctcaacctcttgctggctgttggctagaagctgccttcagttccttgctgtgggggccttcccattatggctgcttgcttcctcaacatcagcaagggagagagagtttcccagcaagagaggttacagtcttgtgtaaggttataacagaggtgatgacccgtcatcctggctgtattttgttggttaaaaacatgtccaggtcctgcccactcaaggggagggaattacactgggatgaatacctggaggtgggaatcatgggaaccacattagggactgtcagccacaatgaggaaacaggggtggaggttgcgggagggtttatatcatgaacaccatcttaagtactatagtatgaatttgttttttctaaggagcctaaagggagagacaatgactggatagagaagcaaccaaagtttagttcccagggccaaagcgccaatcagggaatagtattcagctattaacttgtcagggaatgtacttgagtaggtaggggactcaatctgaaggtaaatggtatcaggctacctgttttaactgcattttcttagattctgtatgtctatttggtatctacttatcgcagggtcaaaccataagtaaatatggtaaaccatatttacttttgtccttttcaacaatatgaagctatattaattttaagtgactacagcataaccatccctgcagcaattgaacatttgtcagacagtgcatatttaacaccttcacattttcaaaggacgtaaagtctggctgtttttgtagaaatcaaaccatccattattaaagtctttagtatttttgtcttc

SEQ ID NO: 468875 - DNA, 576 bp, Homo sapiens
tgacagctctggcatctgcagctgaggacgcacctggacaggtggtttaaaaaaagtattaaatggattgttttatgccaaaagaaattattggggagaaggtgtggagatggatggcaatactaaaaccattacaagcagaaaggacagatacattacatagcagagaggaaggggatgtggtgagagcaaagtactgcaaaatggcagtgggagatgagactggaaatgtggacacgaggccaatgagtgtacagctgccggagaaagacagtgcaggggatgtcatcacaggctctcaggtgcctatgatgtcccttccaatcctggttcttccacctatcagcctcagtttcctcaactgcaaaatggagatgataacagcaagtagcctcagagaattcctgtcagtattgaataggagaacttcttccacagtgcatactgtatcaagggatcaaaaaagcatgagttcttattattcaccacattgggtcttgttgggtcttgttgtgtcaccattagtgaggtcttgctctactgtgacatgacaaatcacacatctggaaaacaata

SEQ ID NO: 468876 - DNA, 726 bp, Homo sapiens
taagaattacagagggtgcagggagtgagaatcagaatagataactggctagaagatgtttgttgtggtcaaggtgagaggtggtgatggcttcaatcgggtagtaaatcctggaggcagaattactcaggcaaatattatgtactttaaaaagtttttgacacatattgctgtatcctcctctagcctggacatctaccagagattgtctattttctctcactgtgatcatgagtgtgaatgtattttaaacaaacagcttaatacaagaatcaacatctccctggcacccaaaatccccaaaacatgcaaaacagcctgcgatggcctgaatgtttttgccccatgttccaccaaatttattagtgccctatcagagaagccccaagagctgtctttccccttctaccacatgaggacacagagagaaggttccatctacaaaccaggaaacaagctctcaccagacaacatctgctggcaccttgatcttggactctaataagtaaatttctgtggtttacgagctaccccatctgtggtatttggtattttgttatagaggctgaatggactaagacacagcaacaaccatcttattaagaggtgcatattttatatgtaatgtttatttatcaaaattataatatatttatgttataatgtattaataataaatgtaataataatttaatccaaaataagttttaacacttacaaggtctt

SEQ ID NO: 468877 - DNA, 836 bp, Homo sapiens
ggtgacctgaaaattagtgactgaagaatgaaactgaaaatttggagcatgaatttcttgttttcatcttttcctcttttcatagaagttattttaccctgtgacagcgttacctcttccttggatgttgggtctgtctccacacacaggacactgtctccttgcaggaaacccacactgcaaggaaaccaacatggctttgcctgccagtggagagaagtggagaagaatgcttcaaggcagagagcttggactccacagagatggctaaaagggacagacataaaagaaactcagcttgattcaaggtttctgagcacttggtgcttgattaagctttcctctaggttcattggcctctatgttccatctggtccaggtgatgcatttgggattgacttaatttatgatattaagataccttacatcctctcagagatgaaacaataaatattgaaatatgaaactttttttgaatcttaatcattccctgattcaatacttttctgtattacagaaaaacagtgtaaaaatattgatgtctgaaagtatctacagaaggtatctactaatgtgccagcccatcaagctgtcttctcctctcttaaagtagggacacttagtgtgcctaaaaaacagaccacaaaagaattagacgaaagcctttttatttagtctatgtttacatttaaagcatttgttattataatactattttataactgtctgagacaacttttgtctactgacatcaatttaaaacataattactacagaagtgcttctttaaggcttatccagattaagtcacttaagcaaacgaggatggaccaaat

SEQ ID NO: 468878 - DNA, 540 bp, Homo sapiens
gcaggagtggagctgcccaaggccatgggaactcacctcttgcatcagtgtgacctgggtggaagcatttgggatcgtcggctctgctgctgcatgataggtttgggactccgaagactggcatttcctccttctaaacttggaatttcaatacattactatgaggaagacaaagatggatattcaattgccccagcaccatctgttgaaaatagattttctttcccatttaattttcttgacaccttcatcaaaaatcaattgactgaaaatgaaaggggttatttctgggctttcaattatattccattgaccaatacatctgtccttatgctagtaccatactctctgtattaccttatctttgtaatatgtaaagaacttcccaatccatcatgtcctaaagtgctccattacccccactctactcaactgggctccactttccagcctgaaacctggtgtgatcctataagcttcccggtccttggtccctcttctcactttttctaatcaattgccaagttctgcctattttaa

SEQ ID NO: 468879 - DNA, 575 bp, Homo sapiens
cacatccatgaagatttctggtgccatggcaacatcccctactgctttgaacgtgaagaccttcagccattttcgattcaccccaaatctgaagatctttagccatgtctggtccaactcccttgtgtttgcaagtccaaacaacaggtctcagcagggagccccaaagagtggtagacctggtagacctgggctggctgcagcatacctcaagatagatggggaagccatgggtgctgcagtggatgctgggttggctcaccataagcaggcgctgaaacagaaggaacagaaacacccaccagctgccatcctgcaggaggaagtaaaggaggtacaaaagcaagagcatctgaaagttcaggatggatttcttcggaaaagtgatgtgttcctgcatcaccaccacggagccaccctcctcttcacctactcccaactccactgacttccccttgacctgtttttggtgaagctgagccatgaagaattccataaggaagaggaggcctatgaagataaagataaagaagtacaaagttcctgttatagaatcgtaaaaccttttttttttt

SEQ ID NO: 468880 - DNA, 550 bp, Homo sapiens
agatgtttaatcttttccgagagccagctgcggtgcagggaggcagaactgaggtgggttccccgacgtgaggagatgaagcttggtcctgggagacctgggcagcgagagttcacagcagagagttccagagaggagacagctgcacagacagccaactccagagatctgcagagggactctgatgggaatcagcacatgcatatatgtaacgaagcctcttcacctaatcccgatcctaatggccaagacaggaataaaaacagagctatggaccaacgccgttaccccattatgacaacaaatacttgctgctctcagactgtgagtaggatactcagccgagctcattctggagcttttacatcagcacccaatgggtggattcctggcatgttttctcagcacctccatgggtgttttcctgctttccagcctcagccagccacacgtgcttcagtgaactcctctgccatcggtggccctatagccgtacttctccaatgagatgtgaatctcagccttggatggagggctttcttccacattc

SEQ ID NO: 468881 - DNA, 985 bp, Homo sapiens
cagttaaaggacatctcctcatgactatttctcctttgcaattaaattcacgcacattgggtcagcagtgccctgccagtagagagagtaccagagtcagccaacagtaaaagagaactaggtggccacttgggttggcttctgaatccattgctgaaggggggccactgaaccatgggcagggccattgtggtttgttcggggttcaccccagaccctatttgcctgggtctctcccacccctgtagatgtcaccaggagaggctccagaatagcaaagatggctgcctgctccttcctctgagagctctgtcccagaggggcaccaacttgttgccattaggaggcacaggatcagggacccacttaacaaagcactctggctgccccttggcagacggggtgcactgcactggggtaaatccaaatcccacttgtccggactgccaggattcctcagagccaggagggaaaaagactaagtctgctgatccacagagattggccagccagcccccactcccaggggctctgtgtcagggaaatcagagttctgtccataaacccctggctggagttgctgaaattccagcagggtggacccaactgatgaagagagatgggtcttgttccagcctaaagaagcagtctggccacagtctgccacagacactatgctgcactttggagaattactcctgggtccaaacctcccagacccccaagtaccagcagggaaaaatggcagactggagctgcagtgatggctgctgcctcagaccctgtgagctccatcgtcttaggcagcaggcacccacagtgatggtggccacccttccccctgggaactctggagtcttaggcagtctccagctgggcagccacagagaatctgcacagctttgtgcttgggacccaaggcccttgtggtgtgggctcaccaggggatctcctcatctgtgagttacacagacctgtggaaaaa

SEQ ID NO: 468882 - DNA, 504 bp, Homo sapiens
gagaggagaaccaagattgactgcagccaagtgaacgaggccatggacttttatcggtctgtggcctgttaagaatggggccacacagcaggagtagtgtgactcctaatgtgaacttcacatatgagggatctaggttgcatgctccttatgagaatctaatgcctaatgatctgaggtggaacagtttcatccccaaaccacctcctcctttatccttggaaaaactgtcttccacaaaaccagtccctggtgccaaaaagccacacaaaaatagagagagacttcaagatcccactgacaacattagatcattgagaaagaaaactaacaaagaaattctggacttaaagttgacagttgatgaattggacctagtggacatctacggaatacactacagagtacatgttcctcttatctgcacacgtaacatactccaagatcaaccacatgctcagccataaagcaagtctcaataaattcagaaaaatcaaaatcgta

SEQ ID NO: 468883 - DNA, 850 bp, Homo sapiens
tgtcatagatggtctgtgtctgcgtttgagatacagatatgacctgtgctcgtgtcatgggagggctgcccttaagcccctctgcagcatggtgttgtggcagttcaggtcttaatcagggatctgtgccccatgctctggaagctgagctaggaggaagaagagaaagcgacagcaaggagcttccaggttatactttgcctggagctggaattcaactgcagcccaggaccttcattcacttaattgatttattcagcaaacatttgcaccaggcactgggcctaagcgcaagtcttgcaccagtgaacacgagtgacaagctccctgcattcatggagctcacagtctacaacaaaaaatatgcatcaggagaaaatggggtcctgtccactgagaagggtgacatgagcaatgccagacttccctcttcagtgggtgtagtacaggtggcttaccaagagaggctgcagtccaggagagcaggttagatgtttgtccgtccacatgaagtcatgagaatggcaagacgaaaagaaaaacaattttaaatcaagtatagaatgttgctgccagttaagatatagagggtcataaaagattgccaaacatactctaataaaaactaaagacaaaaaaccagataagctacaacatcacaattttttcaaatcaatcagagagctaaggaagcaaggaaacctgtgtggcctaaactctagaaagtgaaaagcccttcataaacaagaaaaggctaatgggtattcttgtccttagtgcaatggaggggggagaaagaatatgacatagatgaagggggagaaatcagctaaaattttaataaatattt

SEQ ID NO: 468884 - DNA, 1110 bp, Homo sapiens
cccggcaaaatcggcgcccagacagcaaagctagaaatgaaacatatggtcagtaggagccttgctgccaggacccgtctcgggtcaacgaaatctgagacagtcaaggtaacagaggcagctgttcgaatagattcattggagagtctaaggcagctctccggaccaagctgtaaaggagataagatagaaataatcactctggtaccacagcagacaggccttgaaggctgtgagtcccaagtgaaaaacatcttactgaaatattttattaaatttgatccaggggacacagatgaaactagaagccatcattctcaccaaactgacacaggaacagaaaaccaaacaccgcatgttcccactcataagtgggagttgaacaatgagaacacatggacacagggaggggaacatcacacactagggcctgtcgggggataggggtatctcatctccagccaatcaaacttgtattctaaagcagactgcctaaaagaattactgtgcaaagaataatcattccattaggaaaaatgtatacctgatccagttatccaagttcagaaatcttacttggaaactacttgacgaaagttatctagagaaaagggacctgattatacctcttgctctgaggcactcttgccctgggatctttgccaaggtatttaatctctttgtgctttagcttctgagtctgtaaagtcattttgtgtatttatctcttataaatcaaaggagttttaggtagctcattaaaatacttgccaggatcacatgagatcatgtaagcaagcatcttaatccatgtactgcactaaacaaatacaaggtaatgttgttattagtatatggttaaagtcctgttcaagtaaatatcattaaaataaaactgtatctttaaaaaaagttcaagctctaactgatgtatatttattcaaagcaatatcttcaaagtgtagtaattaagaaaaaccttgagaaattgctacaggataattttctttttgcaatagtcaattatgttatttctcttataagatacagagatatttgaagaaataagtgttcctgatcacctcaaaatgtcacattagctagtatatt

SEQ ID NO: 468885 - DNA, 700 bp, Homo sapiens
ctgattgttctatctgttattgagaatggggattcatgacaatgaaatgtccctgatcactgtgcagcaaggttgtgtgaaagaaatatttgaaagaaaacgcatttggggtcagctttggcctgctctggacctctccaacagccctgtcaggttcctggtgcctgctctgtccccagcacccactgcccacattagagcaagagatcccttcaaagacaaaccttaccacattgctcttctctttagaaccccaaaccttgtccgagacacttactgctgccacagggcctttgcatatgctgttttgccacctccttaccctaaaactcctattcatacccagccctcacctccacatcactccacaggaaaaccagacctcctagaccatttaggtcccttgaatatatgcttcctaggagccatgtcaccctttatgacaccatgccaggcagaattccctgtgggaaggctgaagagttccagcttcccagtaaatatgcatagcttctttgcaccattgatgtcgtaatatagcactccgaagggtgataatgtggccctttgtgggccacttgctgagttttaagaacagagcatcatcatactttattttttaaaaagaaaaaaaaggtcagatgcctccctgtgtataaaccaatgcctccttctagtaagacaccaacgtgaggctaga

SEQ ID NO: 468886 - DNA, 659 bp, Homo sapiens
cggagcagtttaaacagacagggatggttagaaagactcagagaaggtggtgtgaaggaaagagcctggggaatggggagcgaagaggaagcttattcgtagtagaagatggattttcaaaagccggatggaagagagaagagtggagtaggcccgaggaggggagaatgctggaagagggaattggcctcttctaccagcactgcaccattaacaagatcctaacctattccatgttatttcacaaaacatacttgaagaaggtgagggggaagaatgagaatccaccatctatgaaaatggagatgggaattcagcttggactagaaaaggccaaacaatatactattcagaatgcatcaggctgcaaataatggattaaatcagattaaaatttgattatattaaaagaaatgattttttttttgccctgcaagacacctggaggctttacagttcttaagaaaatatataattagggcaaaatcaaaatatggcaatgggtataaattgtctcactcaagtactgttttcaattatccttctctaagctttggctttctttactcttttgcattttctaagtgatttcaggcattttaaaactcttttgttttaaacccaaccagccaaaccaagttgttttgaacccaaaccaa

SEQ ID NO: 468887 - DNA, 718 bp, Homo sapiens
ctgttagagatggagtgcgtgcatgtggttgaatttgaagagccaaaggtggcttttcctatctcctcctgcttcatctctgctgaatttgaaaagttggtcacatcttcttttgaagccttctctccccactgctggtttcatgttaccactctcattgtattcttctccaagtttccaatttgccttgatctgaacatcatgaccaaatctccaaaactgtcctttcttccttggcctcatcgactcgtcctcttcctggtttacacctttaaggatggcattccttccagggtgaggtggggaacattctgtgctttgcctcttgtctcctctttgctacccccatttatgcccaactccatccacctccaacaagctgatgactctcaaagcctgctgggctccaggctcatgcccatgaccacaggctccctaatatccagcacgcccaaaactaagtcagtatcttcccactgcaacccatccatcttgtatttctaatctcagtaagtgacgctccatccacctatgcagtgctcactcctttttctcagctttatcactttcccaccccaacactaagccatccccttctgcagctctcctcaatgaacatcttgcgaacccaccattccactcttctccctgctgctgccctgcctgaggctgccctcctcatttatcattgtaggggtgtgtttggtggttcatgtat

SEQ ID NO: 468888 - DNA, 3895 bp, Homo sapiens
gtgggagattctggatggatctgacctgtggtgcacggccctggcagcctggtgtctgtgcctcctctcgaggtgagatttttctctggcacccacttgggttaagtccagctgccaccttctctgtcctgtgtggggcggctgagcgctgctgagaccacatggcctcatggatctagacgggtatgagctcctggcctctgcttcgtccttggtgctgcccgtaagtcctgtggtctctggccagctttatgtcctactcccccaatggctatgacagaccctcgccggtctcctgaagctttctttcctactgactcgcccctcgccagccccagctcccagcgaccttgccctctgcttcaaggaagatgaaaagtttcttatgtgggaggaatgtttgcactttctagactccctctgcagagaccctcttcctggcaacctctccttctacagccatgggcggtgctgaccaggagaggagccactgggagtcctgcagaaggcctcctggcagccacggcctccccactgtccccagcagcagcagtgcatcttcaggcagctctgactgctggaccctgcagactcagacccccacccctctgcagcaggaacccacccctctgtgcccacggaacccgctactgagggctcagcatgaggactgtgtgcagcctctcctgagaccctcactcaccaggtacttgcagatttcctccaggacctacatgcatgtggtcgctgagcgtggcacgcagcaatggctggatgaggaatttccaaagttgcttccacaacttcttcccaccttcctgatggtttactcacagcttcagaagaagctctgtgctccagaaactggtccccaccctcaccctgacatataagccagagacttcacagactaagaacaggtcccttcctcttctcctcttgtcctcttgcaccctctagagagctctttccctccatcactgggaaggtgtatgttggacggggtgggaggttgaggtgacacaagtttagagctgggaaggacctgacatccctgagacacaggtttatgggactccagctctggcatctataactctctcaacttgtgagccttggatttcaactatttttgtattggtctcatctcctctatgactttggacacctgctggtggcaaggccaatgtcagactcacctatctttctgttatgtttaaaatttaccatgtgtactatacttgacttaactaagtctgaagataatatctttttccttcctccaaatgatacaatccatggatctttgaatgcttgaattctgatcacagcctcccacatgatatactaatgttgcccagtattaaaatactgggctaaagctccacctttgtatttaacctgtaaatttgctctttatgtcatcatcttcatgactgtcatgattttgtacagttaatactggtttagatctacccatatgcttacaaatttcttggcttatatttctttcttccagctctttcctcccttttagatttattttgtttttccttcctttgtggttccttcagtgagggtctcttagtagtaaacatttttagtctttgaaaatgtctttatttggccttatatttgtctctgctttcagcagtctgtgatgtttctaggcatacatttccttggttttagtctgtttgaggttcactgagcaactttaatctctaaattgatacctttcaccaaacttggaaagtttttactattatttctagaattgttgttcagccccaccatgctctttctcttcttttaggactctcacgacacaaatgttacaccttttgttatggtctcaggtcacaagatacttttggttttgaatcatttttctctctgttcagagtggataatttttattgatctgttttcaagttcactgattctttcctttggcatctccattttactatggagcctacccaagcttatatttttcagttctaaagctttccacggtttttctgtatgtcttctatttctttgctgagactatttctgttatttcaagagtgttcaccgtggctttttggaacactttgcacagtaaccgctttaaagtttttattacataattccaatctctttccccttgacttcagggcatgttcattttcttcccatgtgagttgaaatgttcctggtcctttgcatgctgagtgattatggattgaatcatagacattatgaatatgatattatgtgactgtgggtcttccaagagtgtcctggtaattttagcaggcaattgacctatttaccttcaggctgccaatcctgtcagccgtccgcgggttgtgattccaatgccagttcttggttcgaagcctctgctattgtgcatttgggccaccagccagcctgggacctggatagtagtccatcctgtagttcagttctcattgtctatgacgtgctggtcagggtcagacctgggtatgtaatgagctcgggagttcataaacacctttataggatcactttcctcctctctgccacctccctggtactttacagttccctggggctccccttcttcagtggccagaaagctggggcttttgttgctccacagtgccaggcacttctgtgactgtccccacatctggtgctaagtggcaagcggcagagaagaaataaagcaatgggaattttcctcatcctcttgggcccacagtgactgcaaatggagaggagggcttccctccctcagttttgttttctgcaggttcccatggggcctgcttggaggctgaggcttgagagaccgagagaaaaagaaacgagggatttcttcacttcctttgagcattgtgaagtgtttctggctccttgggtgttacctagagggattctctcagagctctctctgtatcccggtgcatacacctccgtttctggttgtgtggcttgcaggctgtggatcccaggagatattacaacccatgccctggggggttattgggaccagtgatgccctccaacccctagtaggtggagtgtcagcaaactttttgtttttggtccctagagatttctcttactctcctgcaagctcagctatgcatatatataatattttatctagtatatcaaggtgtttagagtaagaaggttgttatcttccatattgctgaatttggaagtcaggagctatagtccaagtgagaagtactaagtggccatcacctacacagaggccacctggggaaatggtaagagctgcaccacagggcccctcagatgtgggtgctgggtgctgctttgccattcacccagtcatgtggagggaggcagggcactgaggcaaagcttactggtctcatcatctgtgaaactttcttctactattttggttcacatgccctcttttctcttctgtctgttccatttttggaatttacttggatttattctctatgtttcttaatttctcttccatatttcccatttctttgtctactttggaagaatttctgggctgattcacttttaacgaattcaccctttagttgtggttattctgctattcaacccacctattgaattttcatttaactttttgtttttctaatgcagaaggtactctatatttttctcttctggatgatgttgtggtatcttgatagttatttcattattctgtggcgatattgcctgaccagtgcctgtattgatttatttattgatttatatataacttcaaattttgaatttctaagcactttaggaactgaactcaatatcttttaagaaaaagtttctggggattcaatagtactttctctaaagttttgttcagattttattgttaactccatccttggatggtggg

SEQ ID NO: 468889 - DNA, 1358 bp, Homo sapiens
accaaacacaatgcatgatccttggcagcagtgccaatcctgagacggcagcacgtggtgaagggggtctcctgcaaagaaagctgaggagcctgtatggttatttctaccatggcctcaatcttgatgatggcaaggaagacccttgcattcctcagagggatatgttctacaatggtttatattacacacctgtaagcaactatggggatggagatatctataatattgtcaggagacatggatgtgggacctcgtcagtgtcgagctctgccaatctttcgttcctcattcctgatacgataacccaatgggaggcaagtggcttttgtgtgaatggcgacgttggatttggcatttcctctacaaccactctagaagtctcccaacctttctttattgaaattgcctcacccttttcggttgttcaaaatgaacaatttgatttgattgtcaatgccttcagctacctgaatacatgtgtagagatttctgttcaagtggaggagtctcagaattatgaagcaaatattaatacctggaaaatcaatggcagtgaggttattcaagctggagggaggaaaacaaacatctggactattatacctaagaaattgggtaaagtgaatatcactgtagttgctgagtccaaacaaagcagtgcttgcccaaatgaaggaatggagcagcaaaagctaaactggaaagacactgtggtcaaaagcttcttagtagagcctgaaggtattgaaaaggaaaggacccagagtttccttatctgtacagaaggtgccaaagcctccaagcagggagttttggacttgccaaatgatgtagtagaagggtcagccagaggctttttcactgttgtgggggatattctaggacttgccatgcagaatctggttgttctccaaatgccctatggaggtggagagcagaatgctgccctactagcatctgatacttatgttctggactatctgaaatctactgagcaactgacagaggaagttcaatctaaggctttctttctcttatctaatggcattcacatctctcctgaagttcagccatgaatttcagattaagaaccactgttctaagtaaagccgtggcctagtattctgtttctctctaaacaataagtgagtaaacattttcaacttaagtgtggctcaccctagccacctcccaatccatagattagatttccaaaatctattcctgaactaagatgctaggaattgtcagggtcattagtataccctgaaaattatcttcagaaatgtaagcctctattttaggcattagaaaaaaaaaactcttaggcctatgataaatttggatgctttgcc

SEQ ID NO: 468890 - DNA, 1117 bp, Homo sapiens
tgcagcaaaccaccataacacatgtatacctatattaaattgcttaatccagacaactctccaatcccaaatgaagttgttcagttgcatctgaaggacaaaatcgtgggaaactacaccacagatgtaaatggcatcgctcagtttttcttggacacatatacgtttacatacccaaatatcactttgaaagcagcctacaaggccaatgaaaattgccaggctcatggctgggtgttgcctcaataccctcagcccgagtactttgcatatcgattttactccaagatgaatagcttcctaaagattgtccaagagatggaagaactgagatgcaaccagcagaagagggtgctagtgcactgcattctcaatatggaagactttgaagacaaaacctacacagcagacttcaattatttggtcaacttaaatttttctaaagaaaaaagtttaccaggatccaatgtcgatcttcaagtctcggctgcttcaaactctctttatgctctttgggcggtagaccagagggtattgctactaaggaattatggtcagctgccagcacaaactgtgtatagtcagctacattccagcgaactacatggctattatttcagaggacttaacttagaagatggccttaaagtgccgtgtcttgaagatggacatatcctttacaatggaatttattacacacctgcatgggctgactttggaaaagatggctatgaccttgtgaagaattcttagagtacaaatttacaattagtactaatgtctgagaaataatatctcaaataatgttataatagcaaaaagacttaataaagttcttatagttataattatataatagttataatattataaagctataatagttattctatatagttacaataaattatagttataatatatttttaaaagttgtattaatataattttatttaaaagttataaagttataattataaagttataaggttattataatgttataataaggttaagttataaggttattagaacttcattataaaactataataatattttaaataactaataatattataatattaggaaaagaactaatatgtgagggaattat

SEQ ID NO: 468891 - DNA, 524 bp, Homo sapiens
ctctattcctccttgtggcccgaggctatggacaaatctacgcaaagatgacacttagcatccaagaattgcagaagattagccacggagggagtgcaggtgggaaagacgacccaggcctgagcccagatggaggggcctggcagaagcagaggagcagttgccaccagggcagctctgcagaaccatctgaacttgacaaaaccccagaggcagcagaaggagaatgggaaggggctcagtcaagatacagccttcaggggaggcatctcttaagaagtcttcatagcatttctcctttccaatcagacctctgcggcaaacatcctccaccagatcctcggccaggccaagaagcttccaagcttgatcctcctcttaatatttattggagctggaggtcctggagcagcactgtatgtcttgcatctggcactgttcgatcagatgttagtaggggcagaaagaataacccaaaaaccctgagacaaactgggtgccaatgatcagtacaagttcaactc

SEQ ID NO: 468892 - DNA, 1069 bp, Homo sapiens
gctgtgaaccctcttcccacattagccggctctcacactgtgactaaagagaccagccaccacatggtcccggttacaggggcagctggggccttgccatctggcaggacctgctgccactggcgctcgctgtctgtgagcacagggtctggtgggcaggaggtgactggagggcatgtcttcccaaaggagagctcgccaggccactcctcagaggccccagcccacaccaccagctgcctctgctcctcccaactgtgcacctcgtgccatcgagggagggctgggacccagctccagggctgcggctggcagagaaggacctggcctcctgcccactgggacagagagacaggccctgttgctaacacttacacccagcagttccgatggacaagctgtaaggacagcctcgccccaggtgccaggcaccagagaacttacaactgacagccaaggccagctggtaagcccttggttcccagcgagagagcctgtgagcacagtggagcctcaggacagcacgatcagagctggcttctcaaaggcggtgcccttgagctcagtcacctctcgcccctttgccgcccattgctggcacctggcttgggctctccgtctgcccaacagctcacttcagaggaaacaggaaaccaacggggccttcgctgccctcctcagccaaacccatgcaaggccagcccatggaaagggagccagggagggtgagagtggaggggcagaggcctggctgcttctcctgctgtgatctgggcacacactaagctgcttagccaacagctctatctcctgggctcagggctcagccatgtgaggaggaagggatcagtacagccctgaggaagagtgaggacctcaagtcagccagagctggtgccccacaaactgctgtggaacgcgagcaacttacttaactactctgagcccccttatgtgcaaaataggaacaacaaacaggagctcccacctcctggggttgtatcggaaattcagtgaggtggtaaagcaccccgctccacgcctggcctatgagagatgctccacaaac

SEQ ID NO: 468893 - DNA, 772 bp, Homo sapiens
cagaagggccatcccagatccagagctctccatggacccactgaggctcagctcgacttttctatctgccaaattctttgtctttcaacacttacagggtcgtgacaaggagggtgaagaagaaggcgataagcaaggagctgagtggggctctgcattaggaaggaccctcttacaaagcaagagaggtgttagacagccagcttcctgctgccttcagtgtatggggatgctgagcttatccctggtctcctggggaggaaaagccaggatctttgggtccagttccctgccttcccacggtcagccctcagaggatgaggccctctgtaaagcgtactcgacgggaagactcggtctgacaggcacacttttggatgccacactggactttagtgacctaacaatacagcccagtatcactggcatcatcctcttccccccttctctccgggatgggagctctgcatactcagccctttagtagtgtcccctgtggtcattactgccccctgctgagtcccctcgggtgtgtggccgtgtgtacctgcctcccctgtgtcatcctcacctgattctcatggggccctggaaggaagtgatgactgtttcattttatagctccacagcagatgacacccaaggttgttttgggcatggcccaggccctggacatgccttctgtccaatgcctggagccctgggatgccacccagtctgtcccctgtcccctcctccatccaccagtgagcacggctcccattctgcagat

SEQ ID NO: 468894 - DNA, 653 bp, Homo sapiens
tggtgttccatacttcttcccacagactctgtgaacatctaatggctaccatattgaacagcaaagacatacagaacttgcctaccattgtagaaagttcaactggacagtgctacaacatctgtgggatagaagaaaaggtgagtttagttgcaaataagcaagtaagcaacactgacttcctccaccctgtcagacaactgaatgatgagaggccacaagagaaggagagcttccatgtgaagaagtggccaccaacactaacatccagatccaagagggatgccaccttggatgttctagccccacacggacctccagctggattcagcctggaagatggtgaacatttgaagcccatccatgtaagcagcatcttcttatcagatggcttctggaagcatgctgactggcttcaagttcttccccgtgttccagagcaaccatattaagcataaaatctattcaagtttgagtccaaagagtggatcctcttgcttatttgaatttatacaggattgcagtctcataactgaaaggagccctgcagggtacctacgcttgatatttcaacagtcagagggcagccaacaaagggactggtcttggaatgttgtgttgcctctgcccaaaacactctcccttttcctgtt

SEQ ID NO: 468895 - DNA, 656 bp, Homo sapiens
tgtttggggtgatggctttgctgggcgccctctccccagccatccctggatgcttgtacctgctctgctgcccaggggctggccctcccgccctgttggtgccccgggcgggcagggggagtcagtgctgccgcagtagcctctcctgctggcctgttgtggctcgggggcatctgccgaggctgagtgagagcccaggctccagggccaccctcaccttttccgggtattatcgggggacccacggggtcattgtggtttacgacgtcaccagtgccgagtcctttgtcaacgtcaagcggtggcttcacgaaatcaaccagaactgtgatgatgtggctgcgctgactctgccttcgtttgaagtgggtaataagaatgacgaccctgagcggaaggtggtggagacggaagatgcctacaaattcgccgggcagatgggcatccagttgttcgagaccagcgccaaggagaatgtcaacgtggaagagggaaactgaggctccaagtgttgaagtaactcaaggaccaccacctggctagtaagagactgagtaaacctctgtcccacaccaaagccaagcacagtttccactccagtcctctgcctcattggccgccttgtgctgtgtggagcccagaggcctgtggaagtc

SEQ ID NO: 468896 - DNA, 502 bp, Homo sapiens
gttctcagaacctgcctcatgggattgccgtgaggtttaaatgagaaggctccaggaggaagcagaggaggcggcgaggccagtggggtgctggtgttgggcacagcgccgtgaaggacccaacccgggactcgggctctccttgagctcagcaggaagcctcacggcggagcaaggaggaagtggccctgagcatgagccctgcaggcccaggctgagcagcgtctgcctgcccaggagagcctcaccctggcctgtctttaggaaagggatttgggagcagcttgtcttacacaaggacgaaggaaaaggtcagggatcgagtggaagagatgttcttggtgtgggcaagagcagtttactgttgcgttttgcagacaacactttctcaggcaaaaagggctaacttgtttacatttgtatttccctaatcactgcatccctggcctccacccactaaatgccagcaacacttccctccccctgctgtgacaaccaaaaa

SEQ ID NO: 468897 - DNA, 7224 bp, Homo sapiens
ctgcctcaatgcttttttgaggccaaatggggtcagtaagctttatgggttctctcgggagagatcaccgtgtgctggaacggccaggaaaggctttccgaggagccctgtgtactgtgttgcatctgacagagagacttttccttgaccacccgcatagactcactggcaacaaagttcagcagtaccaccgggctctggtggcggtgctcctgagccgcacctggcacgtccgcaggcaggctcagcagacagttcggaagctgctgtcctctcttgggggctttaagctggcgcacggactcttggaggagctgaagactgtcctcagttctcacaaggtgctgcccttagaggctttggtgactgatgctggagaggtgactgaggcaggcaaggcctacgtgcctccacgggtcctgcaggaggctctgtgtgtcatctccggtgtgccagggctcaagggtgatgtcaccgacactgaacaactggcccaggaaatgctgatcatctcccaccacccatccttagttgccgtgcagtctggactttggccagcacttcttgccaggatgaagatcgatcctgaagcctttatcaccaggcacctggatcagatcattcccaggatgaccacacagagtcccctaaaccagtcctccatgaatgccatgggctccctttccgtcctgtcgccggaccgggtcctcccacagctcatcagcaccatcactgcctccgtgcagaaccctgcactgcgcctggtgacgcgggaggagtttgccattatgcagacccctgctggggagctgtatgacaaatccatcattcagagtgcccagcaggacagcataaaaaaggccaacatgaagcgagagaacaaagcttattccttcaaagagcagatcatcgagctggagctgaaggaggagataaagaagaagaaaggcatcaaagaggaggtgcagctgaccagcaagcagaaggagatgctgcaggcccagctagacagggaggcgcaggtccggaggcggctgcaggagctggatggggagctggaggcggcgcttggactgctggacatcatcctggccaagaacccgtccggcctgacccagtacatccctgttttggtcgactcttttctgcccttgctgaagtctcccctggctgctcccaggatcaagaaccccttcttgtccttggctgcctgtgtcatgccctctaggctcaaggctttgggcactttggtgagccacgtgaccctgcgcctgctgaagccagagtgtgtcctggataagtcctggtgccaggaagagctgtcggtggctgtgaagagggcggtgatgctgctgcacacccacaccatcaccagcagggtgggcaagggggagccaggtgctgcgcccttgtccgcgccagccttctccttagtcttcccgtttctgaagatggtgctgacggagatgccccaccacagtgaggaggaggaggagtggatggcccagattcttcagatcctcactgtccaagcccagctgagggcctcccccaacaccccacccgggcgggtggacgagaatggcccggagttgctgcctcgcgtggccatgctgcgtcttctgacttgggtgatcgggacgggctcgcctcgcttacaggttctggcttcagacaccctgaccaccctgtgtgccagcagcagtggtgatgatggctgtgcctttgcagagcaggaggaggtggacgtgctgctctgtgccttgcagtccccgtgtgccagcgtgcgggaaaccgtgctccgggggctgatggaactccacatggtattgccagcacctgatactgatgagaagaatggcctgaaccttctgcggagactctgggtggtcaagtttgacaaggaggaggagatccggaagctggctgagaggctctggtcaatgatgggcctagacctgcagccagacctctgctccttgctgattgacgacgtgatctatcatgaggcggctgtaaggcaggcaggggccgaagccctctcccaagcagtggcacgttaccagcggcaggcggcggaggttatgggcaggctcatggagatttaccaggaaaagctctaccggccgcccccagtgctggatgctttgggacgagttatttcagaatctcctccagatcagtgggaagccaggtgtggcttggcgttggccctcaacaagctctcccagtatttggacagctctcaggtgaagccactctttcagttttttgtccctgatgccctcaatgaccgacacccagatgtccggaagtgcatgttggatgcagccctcgcaacgctcaacactcatgggaaggagaacgtcaactcgctgttgccagtattcgaggagttcctgaagaacgcgcccaatgatgccagctatgatgctgtgcgacagagtgtggtggtcctgatgggctctctggccaagcacctggacaagagtgaccccaaagtgaagcccattgttgccaagctcatcgctgccctctccaccccctcccagcaggtccaggagtccgtagccagctgcttgccaccccttgtgccagccatcaaggaggatgctggagggatgatccagaggcttatgcagcagctgctggagtcagacaagtacgcagagcgcaaaggggccgcctatggcctggcgggcctggtgaagggcctgggcatcctctcgctgaagcaacaggagatgatggcggcactgactgatgccatccaagataagaagaacttccgccggcgagagggagccctctttgccttcgagatgctctgcaccatgctggggaaactttttgagccgtatgtggttcacgtgctgccccatctgctcctgtgctttggggatggaaaccagtatgtgcgtgaggctgcagatgactgtgccaaggctgtgatgagcaacttgagtgctcacggggtgaagctggtgctcccctccttactggctgccctggaggaggaatcgtggcggaccaaagctgggtcagtggagcttcttggggcaatggcgtactgtgctcctaagcagctgtcatcctgtctacccaacattgtgcccaagcttacggaggtgctgaccgactcccatgtcaaagtccagaaggctggacagcaggcgctcaggcagatcggctccgttatcaggaacccggagatcctggccattgctccagtcctcctggatgccctgacggatccctccaggaagacccagaagtgcttgcagaccctgctggacaccaagtttgtccacttcattgatgccccatccctggccctcatcatgcccattgtccagagagccttccaggaccgttccacggacacgcggaagatggcagcccagattattggcaacatgtactccctgacagaccagaaggacttggctccgtacctgcccagcgtgacgcctggcctgaaagcatcgcttttggaccctgtgcctgaggtgcggaccgtatctgcaaaggcccttggggccatggtgaagggcatgggggagtcgtgctttgaggacttgctgccgtggctgatggagacactgacctatgagcagagctctgtggatcgctcaggcgctgcacaggggttggctgaggtcatggccggtttgggggtggagaagttggagaagttgatgccagaaatcgtggctacagccagcaaagtggacattgcaccccatgtccgagatggctacattatgatgtttaactacctgcccatcacctttggagacaagtttactccttatgtggggcccatcatcccctgtatcctcaaagctcttgctgatgagaatgagtttgtgcgtgacaccgccctgcgcgcgggccagcgggttatctccatgtacgctgagacagccatcgccctgctgctgccccagctagagcaaggcctctttgatgacctttggagaatcaggttcagctctgttcagctccttggggatctcctgtttcacatctcaggagtcactgggaagatgaccacagaaactgcctctgaggatgataactttggaactgcccagtccaacaaggcgatcatcactgccctgggggtagagcggcggaaccgggtgttggcagggctgtacatgggccgctcagacacccagctggtggtgcggcaggcgtccctgcatgtctggaagattgttgtctccaataccccccgcaccttgcgtgagatcctacccactctctttgggctcctgctgggtttcctggccagcacgtgtgcagataagagaacgattgcagcgagaacattgggagatcttgtgcggaagttaggggagaaaatcctccccgagatcatccccatccttgaggaaggcctgaggtctcagaagagcgatgagaggcagggtgtgtgcattggcctaagtgagatcatgaagtccaccagccgggatgccgtgctgtatttctctgaatccctcgtgcccacggcaaggaaggctttgtgtgacccactggaggaggtcagagaggcggcagccaagactttcgagcagctgcattccaccatcggccaccaggctctggaggacattctcccatttttactaaagcagctggatgacgaggaggtgtcagagtttgccttggatggtctgaagcaagtcatggctattaagagtcgtgtggtgctgccctaccttgtgcccaagctgacaacgccacctgtcaacacccgggtgctggctttcctttcgtcagtggctggtgatgccctcacccgtcatcttggcgtgatcctcccagcggtcatgctggccctgaaggaaaagcttgggaccccagatgagcagctggagatggccaattgtcaggctgtgatcctctccgtagaggatgacacagggcaccggatcatcatcgaggatctgctggaggccacccgcagccctgaggtgggcatgaggcaagctgctgccatcatcctcaacatctactgttcccgctcaaaggctgactacaccagccacctgcggagcctggtctcgggcctgatccgcctcttcaatgactccagccctgtggttctggaggagagctgggatgccctaaatgccatcactaagaagctggatgctggcaaccagttggcactcattgaagagctgcacaaggaaatccggctcatagggaacgagagcaaaggcgagcatgtgccaggattctgcctcccgaagaagggagtgacctccatccttccagtgttgcgggaaggagtcctgactggcagccctgagcagaaggaggaggcagccaaagccttaggcttggtaatccgcctgacctcggctgacgccctgaggccctccgtggtcagcatcactggccctctgatccgcatcctgggggacaggttcagctggaatgtgaaggcggctctgctcgagacactcagcctcttgttggctaaggttgggattgccctgaagcccttcctgccccagctgcagaccactttcaccaaagccctgcaggactccaaccggggggtgcgcctgaaggccgcagatgctctggggaagctcatttccatccacattaaggtggaccccctcttcacagagctgctcaatggcatccgcgccatggaggacccaggtgtcagggacaccatgctgcaggccctgaggtttgtgattcagggagcaggggccaaagtggatgccgtcatccggaaaaacatcgtctcactcctgctgagcatgctgggacacgatgaggacaacactcgcatctcctcagccgggtgcctaggggaactgtgtgcctttttgactgaagaggagcttagtgccgttctacagcagtgcttgctggcggacgtgtccggcattgactggatggttcggcacgggcggagcctggcactttccgtggctgtgaatgtggctcctggcagactttgtgccggcagatatagcagtgatgttcaggaaatgatcctgagcagtgccacggcggacaggatccccattgcggtgagcggggtccggggcatgggctttctcatgagacaccacatcgagacaggcggagggcagttgccggccaaactttccagcctgttcgttaagtgtctgcagaacccatccagcgacatcaggctggtggctgagaagatgatctggtgggcaaataaggacccactgcctcccctggacccccaggccatcaagcccatcctgaaggctcttcttgacaacaccaaggataagaacaccgtggtcagggcctacagcgaccaggcaattgtcaacctcctcaagatgcggcagggtgaagaggtgtttcagtccctctccaagatcctggatgtggccagtttggaggtgctgaacgaggttaaccgaaggtccctgaagaagctggccagccaggccgactccacggagcaggtggacgacaccatcctgacatgagaggcctgggccagcagcagcattgccgctccacatctttgctcaatgttttcatttttgaaaatacatttgttccaatggggagcttggaagatggcgttcccagaaagtattttaatatcaatagaccacagccaaagccttaaatcaaacccacacacaactgaaaattgcctcctccatctctcaccttttcctgtggagaagagaaggaaaagcacacgcatgcgcctcagcaaatggcagcccaggagctgtttgtccagtttagcatggctaggtctggaactataatagcagggtcagactgtgggttcctcttctcctgtgcttgagctctggtttgagagctggcgctaccaacctttttcctatatcccgagtggggcacagacggtggatctctgcccagtgtggtgtgtctggcttggcttttcaatattgtgaggtctgaatggatctgacccctgtcagatgaaaatgattcacagctctggcagttcccaagtctggggaggggtataggtttgaaaggctgtttgaaagaggaatgtttaataaaggctttgatttaatcttgatataaacagatttttaaaaatctccacccattaaacatgaagcttcctgcatcaggaataaggaaaggtttgtacctgtttttttaccaaagaaatgaaggaatttatgccgattgctttccagatgacacatg

SEQ ID NO: 468898 - DNA, 1686 bp, Homo sapiens
tggaatgcctactggtattgagcagcaggtccttgaaaccctcatgaaccgggtcgtccccaggaatgtttattgccagattttttcacaagtttcagggtgtatagcgctggatcaagatgctgtcagatcggaaacgggagctggagcatcgtctcagcgctactttagaggaaaatgacctgctccaagggaccgtggaggagctacaggaccgggtgctaatcctggagaggcagggccatgacaaggacctacagggccacttaactgccctgtctcatactcagctgggcatcttacagatgtctgcagggcctagtcccagcgactgggtggattccatcagcagagcacaggccctgctcactgtggggcaacccaggaagcagggctattccagatcactggtgccattagccaatcatttcgaagtactgacggtgaaggaggtgcgtctctcctgccgacagctgcaggtgaaggtggaagaactcactgaggagaggagtctgcagagctctgccgccaccagcacatccctcctgtcagagatcgagcagagcatggaggctgaggagctggagcaggagcgagagcagctgagactgcagctctgggaagcctactgccaggttcgctatctgtgctcacaccttcgaggcaatgacagtgctgactcagccgtctccacggactcctccatggacgagtcttcagaaacctcgtccgccaaggatgtgccagccggcagcttgcgcactgccctcaatgagctcaagagactgatacagagcattgtggatggcatggagcccacgggctcccggagacttgatgatgactccttagaagaacagataaggcagaccagtgaggactcgagagccctaagggagctcatggagggagagaggggtaaactgaggcaaagcctagaagagctgcagcgactccacagtcagctcctgccctatttcaagacctgcatcctttcacaccctggctatggtcaccacttcccaatttatctgccttcccccagcccgcccaccctcacacgctttggattgatcttcctgaagcgtgacttgaaagtgggacgccccttacaagttctggctggggcacaaggacctgagaaggtggtggtgccctttgctgaagcatgggccacagaaaaggtgacactgctgagtgtggagatgactgccctaaaagaggagagagaccgactcagagtcacttctgaggacaaggagccaaaggagcagcttcagaaggccatcagggaccgcgacgaggccattgcaaagtgagtagggatggcttcactttattcttaagataaagttgagtatatagaattgagcatatgctcaattttttaaattaaatcatacaaaagaatacaaaggtaaaagttagtttccccgctacccacccccacccccacccccacccccattcccattctcctccccagacacatgctggtattgaaagttagctgtgcattttttgcagctctttttcttatgcatatgtagaacctcatgtcatggtgtctgtcagtttctagttcattttagaaattattcttggtgaatcccacataacgatgtatctttgctgcttggatttccactatatttagttaatggatacttaagtaacagtgtgata

SEQ ID NO: 468899 - DNA, 924 bp, Homo sapiens
ggtagacctgaagccaaagaagaagtgctggtcgcagcagtggcctgagcactttgcaagtgggatccacctgttcctttttctggccgcacttcggttagtgcggtcggtgttgtgaagctcgagctaggcggcctctgcaggcggatcctctagctgcccttgagccctgcacattagcaacatcatagttattgttgcagctgctatttgttgtgagttcagggtcagagcctgtttcctcatcctgggactccaggtgccccaagtaaagaccaagatgcctctggcacaaggtgtccatgttcaccctggcttgtctgttctcaggaagaatgctgtggagctggaacttgccaagtgcaggatggatatgatgtctctgaacagccagttgctggatgccattcagcagaaactgaacctctcgcagcagctggaagcttggcagcattcctacattggatttagcgtagattttactgagcacgtcatggaggggcccagccagcccaacttcatgccctcatctcgtcagtggctgctcggaaccaaagaggtcatctgccctggccacagggagcctgccctgaacacaggcctcacctgtcctgatgacatgcacagggtcattgaccggcagctgatggacacgcacctgaaagaacggagccagccggctgctgccctctgcaggggccacagcgctgggcggggggatgagcccagcatcgctgaaggcaaacgactcttctcattcttcaggaaaatttaagttgggaggagtcaggccaccaaagatgggtggactggaggcagctggaaaggcggtgcaggcaaggcctcccctgcagcttgcacctcagcagctgccctgcccctcatgctagggccccatgggtccgggagggcctgctccctttc

SEQ ID NO: 468900 - DNA, 2795 bp, Homo sapiens
ccattttctggaagaacagacccaggaactcaactacttgggtgttgaagaacaggccttgagtcagatggacctggattcaaatccctgttccctcctcttactgtttgagggactttggacatgttacctgacttctctgaacttgagcttcctgatctgtaaaatagagacagtaacacctcgaagggttgttgtaaggagtctggactatggcaagtaccaggaggaggatgaggaggagggaggtggagacgtggacatcagcgcaggacgttttgtccgctatcagttcacaccggcatttctccgcctccggacagtcggggctacggtggagttcacagtgggagacaaacctgtttcaaacttccggatgatcgaacggcactatttccgggaacacttgctgaaaaactttgactttgattttggcttctgcatccccagcagtaggaacacttgtgaacatatctatgagtttccccagctttcggaggatgtcattcgtctaatgattgaaaatccttacgagacccgctctgacagcttctactttgttgacaacaagctgataatgcacaacaaggctgattatgcctataatggaggccaacccttagtggacagactccacaaaccctctgatgagacgattgatgtggccagggtccagttagcatcagtagaaggatgtcactaggaaaggcccaggtatctggtgccttacgtgtggctctgtcccttacgctgcaggggaaagctgcattgccattgttcccacctcctcactggcagaaagatgccagggctgttagcactgtctcctcaccttctgtttctcattgtggctcctcaaatgggatttgcatgttcctgtcaagcgtaacaacaatcccttctctctttgacagaggcccaggtgggacagtttctactatttgatatttgagtattatctgggatgtggttctggagctgcccagagctgtgcttagtagagtgtgtcttggaaacatgcccctgggcacactgtatctgctacattagtgggctatctcttatctgcagtgttcgcttttgctagaaagaggatgtggaggaaggaggaggtgggcaatctggcttgagttgtgctgtatcctcttccttgttagcttgccttagtctcactggagaccatttgcggatagtgcttggtccatgcccagcaggacagggctttgctgcttctgaaagtctggtgttctgtatctggggctgtgggttcctgtgtctagctgctcaggaaatcttgagaagcattccactctggggtgtaaaccagtatgagtttgaaattcaagcgtttgtacctgagttggggagagaattgcaaggcatactttctctgaaagtaacagaaccattcaggctgccatgttattaaggaatctgaactgttgatagcagttaccttgtgggtgatacaatgggaggcggcaaaaaaactacctgcataggagaccctgccctttgtcaagagctgggagcacatttcatcagagtagcaggcccacctggtgccagagggcctgcccctcctgcttctgttcctttgccttgcagtctcctggagagagcctctcttttcctgtacagcctttgggccaaaatgcccttctagcttctccaaagaagatccgagtttatttcattctatgttttaagaggtaaaaggacataacaagtgaaagaagttttgggctaaagtaggctatgtctccttatgtattactcaatactgttttgcagagaaaacatttttcaagcatgtgcttcctgaagacacctcagtctttgggccatttgatttccaatacatagggtggaagaatgtgattttggggctgaccataaactggaaatttgtgaaatggcagtgattgggcaatcttcagtttattttttcagttgaagtggaactcatttctggaatggatttaataggctgtgtctaatgtacaaactgggtgagtcctgccttagtgtgtcctgccccaccggtacgcttccaggatactcttttcccctctgtaaagtcactttcttctgatggccagtgtcactatgatgtcagtgaggtctggggatgaggacagtgtgtcctgaaattcacaggactgactcctcaccccagtgcacgaggattcctgtggcatcaggtgctgctgtacctggtgtaggagcctaatcattgaaccattgtgttactcacattccatgtcacagaacatatcagcctcaagaaggatttggtggaggtggatttaccactggttttacaaaggaccgtgtaaagtcattgaagttgtgaaagtctattttttttcctgtaaatctattttttacagaatataagaaacatcaatgacctgatctgtccttcctcctccttcccgcttcccccaaaatcacattccagtttttattgtctttgtgtccaaagtaaactaggtgacttatttgtataaaatgttattttgccacatgagacagtaataaaagaaagattttcacagtacgtctccctcgtcctgtctcctgattgttgggcccgttgtgttgctgaggggagcaggggcgaatgggggctccaggtttctcttactttggctattatgtggcccttctgtaagtagttgaactagagtatagctggcttctagggtgattgaggaattgtactggactttaggcttaatatttttgctttatattttcccagggtgagtggctttgtaaattgaaagttt

SEQ ID NO: 468901 - DNA, 1631 bp, Homo sapiens
cgtgttgcagttttgcttatgtagtttgatgatctgctttgacaccccaggcctctgagctttctttaggtcatgagtatgtcccttctccttgcttcacgttctcctcaaatgaagcctggcaactgtgtccctggccaaatgatcaagagggatgtgggacaggacagggctgaggacgaagcccgggcccatcccttcaaggtggtccgcctggagagaggctctctggtgagacagagcaactggtgtcgggatcccggggctggatcgcttgtcttcagacatttggttgaatgcagtgaccatcgtgctgtccccctccgtctctgtcctgtggacacccacttcctgtctcccattcctcacaagcgcaggcctgctgcccactgcctggcggcttccccactcccagtctctcaagtcttgcttcctctgcctaactggttcccattcctgtcatctttggatctggaaatctaccgcacgctaaagtgctcctccgtaagtgctgcagttagaatcttcacagcctccctgcaggatgtttgtatcaagcacctgctaaccactggctccgtgcgtgatacaggatccccagcccaagcctctgctatttacagcaaggcccagagttacggagagaaggctgtggattctactcttgaacgcactgtggcatccctgcgtgaccttgtgtgggaatggctgccacaccccctccccacaagccaagcatgctaaagcaagccctgcagagaccgcaggagtagggggtcaggatgtctggttttgttcactggggggcccagtgcctcaagcttcactgaaacatgactgattgcctctaacggacaggaaagggctctggatttcaagggaaaggctgaggaggaaacagatgatggctggagcgggaagaattttgtgatgggagagtctctgcgcatgagacagttggaatctgaacctgcagaaatttgagtttagagttttgcagatagaaagcaccctatacattgcagggaataggaataatttctggattaaaaagtcttacctggtttatcccttccaataagaggaagaagcttgagttggatgactcgatctgcagtgcttcagctgacacgtgttagcagccattgtcctagaaatgatttcactgttggaaactgctgaagaaatgtgattcggtgaagtgggggaggctgtcctggccactgtgcactgaagaccagaaagagaccgagatggcttccttctgagcctgtaccgctgacatagctctgtagagaagggggttgtataaatgatgtccctaaggcatgtactcccatgtatagacacgagtgctgcattcccaggctctgacgtaaacgctaggctttacaaaacagaaacgtacacacaacatgggatctggtgagcagtaacgtgagagctgctaagcagacacagcaggttctatttttaacacttgattggcaaaatggaactcccttcccctccaccctcacagagaacgagtacttttgtttttcttgtgggtgacctaacttacctgtttacccaaggcctgtgagcctgctacaaaagtaattcagacagtagcttagtcccaagccacc

SEQ ID NO: 468902 - DNA, 1024 bp, Homo sapiens
attggtacagaagacaaggagagaaaggacagccaagattggtggggttgacatgaagaagaggatggtcctttccctgcctcgtgcctccaaagcagacctgtccctgaataccagtcggtgtctacttgttactgaaacacaagggattcacgcccccctcatcactctccttctaggctctgactcaaaagttctggagcgaggccaagaagttgcgtttcttaccaacccccaggtgatgctgatgctgtggcccatggaccacacttcctgtagcattgctgagatagacagctttccaatgtctgtcccattcatgaactcctgttctgagaccctcctgttcttattccaaaataataagtccctgtggcaaggtatgtactactccatgacccctgccctcagccataggcaattagaccataggagaaggcctgacccaagctggaccaatcggattttctctcttgggaatttggaattcagattcagcaatgctagtcaatctctgctggtttcatgaactgagttgtataggtacggagctgtggcacgcccattctctgccatgtgcctgaaaagcagaaagccaagctgcaggatggtgagtgagaagaaacagacttaccaagagaatgggagatgagggagagtaataataacagccaacattcactgagcagttattatgtgccaggtaattctaaaaaatattttagtattaattttttaaataaaatttattttggaataattttagatttacagcaaattataaagatagtatagagaatgcctgtatgtgtttcatccagtttctcctaatgttaacatctcagataactatagtacatttgtcaaaactaagaaattaacactggtactttgctattaactaaatttcagactttatttggatctcaccagtttttacactaagctaatgtgctgattttctatctctgtgttacatttgggtaattctcatgtgtgttctgatggctccataaaccagctg

SEQ ID NO: 468903 - DNA, 1135 bp, Homo sapiens
cctccagcaaactccagcagaccagcagaagagaggcctgactgttagaaggaaaactaacaaacagaaagcaatagcatcaacatcaatgaaaaggatgcccatgcaaaaatcccatctgaaggttgccaacatcaaagactaaaggtagataaatccacgaagatgaaaaaaaccagcacaaaaaaaactgaaaattccaaaacccagaatgccgcttctcctccaaaggatcacaactccttggcaacaagggcacaaaaccagacagagaatgagtttgatgaattaactgaagtaggcttcacaaggtgggtaataacaaactcctccaagctaaaggagcatgttctaacccaatgcaagcaagctaagaaccttgataaaaggttacaggaactgctaactagaataaccagtttagagaagaacagaaataaactgatggagctgaaaaacacagcacaagaacttcgtgaagcatacacaagtatcaatagccaaatcaatcaagcagaagaaaggatatcagatattgaagatcaacttaatgacataaaacatgaagacaagattggagaaaaaagcatgaaaaggaacaaacaaagcctccaaggaatgtgtgactatgtgaaaagaccaaacctatgtttgattggtgtacctgaaaatgatggaaagaatggaaccaagttggaaaacacatttcaggatataaaccagaagaacttacccaacctagcaaggcaggccaacattcaaattcaggaaatacagagaacaccacaaagatactcctcgagaagagcaacccccagacacataattgtcagattcaccaaggttgaaatgaaggaaaaaatgttaaagacagccagagagaaagatcaggttacccacaaggcaagcccattagactaacagcggatctctctgcagaaaccctacaagccagaagagagtgggggccaatattcaacatttttgaagaacagaattttcaactcagaatttcatttccagccaagcaaattcttcataagtgaaggagaaataaaatcttttacagataagcaaatgctgagagattttgtcaccacaaggcctgccttacaagagctcctagggaagcact

SEQ ID NO: 468904 - DNA, 878 bp, Homo sapiens
gacggtgagacaaatctgacgggagcaggctggggcacccagcaatggcacatgtagaccagttccaggtccccaaactggccctggctgtccatcttctcaccaaggagaaactggctgtcagcactctcctcctgcaccagacctgtgatcgggtagagcacaattccagttcctacagcttgggtgctttccatacttgttctggctgtggaggctcctactcagctccagagcaggcctgggaaaatgcctacaactttgtctggtgtccttccctttcagtgtctccaagcttctctccaagttggcgccaaggctttggaggaacaaagtgctctcccttagcctggttgcatggatccccagtggaaagaaggccacactacaaggcagtttgtgatcaacattatgggaatgacccagctaagagttatcggagttctctaaagaaagaaatccctggttcctgtgggaaatacgggatgagaaaattccttggaggagaaattggattcactgtttctaaaaagaaaataggtgtagtaacccagtcctctggaaaagttcagctacatccagcatcccatgttttggactcaacacaagaagatgaaaaggccattcatgtggatttctatcagctcagatatttgcaggcacaatgaatttccagagcacatcatgtttaaggggaagcttaaaataattgcaccaaaagcattgtccaagggagctccttttcttgtagccagttccgaaaaaatgtttttcttttttgcttaagttctattctgtttaagaatcttttctctaccattaaatttagccaaattgtacccttttgtctgtgagtctttgatgttaatagcaaagaa

SEQ ID NO: 468905 - DNA, 647 bp, Homo sapiens
gcggcttgtcctgctacactatatttgtattatatattatttatgacaatttatatatatgagaatttatgttataatttcatcttgagatatgtgcccatgacacagcctgaggaagtcctgacgaacatgtgtccaaggtggacagggtacagcttggttttacacgttttagggagacaggaaacatcagtcaatatatgtaagaagtacactggttccctccagaaagtcagggacaactcaaagcagggagggggcttccaggtcacaggtagagttttaggcccctctccccatcactgctgcagcattgctgggggactgggaagaaaaacaaaaagaaagagagaagaagaagaggaggaagaggaagaggaggaggaagaagatgaagaggaggaaggaagaaagaaggaggaaaaggagggaggagaaaggaagaggaaagaaaaacaaaacacagagatttccccttctctctgagcattagaaattcttattcttgctgtttaagcagagctaaaagtcttcttgcactctttctgtttatgcccttccaggcttatttgagttcaagggatatcggggttaaatgggaaacttattgcttatttagtggccctttgaattcttgtcttttcaga

SEQ ID NO: 468906 - DNA, 545 bp, Homo sapiens
tggacatcaccagtgccaggacaggagcggagaggtggtggcttgttgcaattatgaacaaagaaaagggaacaatatgtgcaaagcctttgagtacggagagtatctttggaatgttcaagaaaaagcatggaatcccccctatgtctggagcagagtcaacaaaggggagagtaatcagagatgtggtcagaaagataagacaggtcttttgtattacatttggaactggacaactacactggtccaattcaggcaaatggatagagttcacagcaccaaaccaggtaggagtcaagccacagactgtctgtctttactcagagataagtggccattatcatccttgtgcctctttgtactttactttgaccaaatgatccctttggctttcgacttacctggaatctgctgcttaaactggctagcctttattggcattcaggatctgtgggtggaaattggttgctggtatttctgagatgtgaaaatccttacccacctactttggttgaagtggttctagattgcaaagtattgaatac

SEQ ID NO: 468907 - DNA, 692 bp, Homo sapiens
tccagcagctgcctctgcaatgtccccaggttcgctggggagagaaagcccaccagtgggcacaggggcagattttggaggaaggggttggcaacatggaaggtgctctttccaccaaaatattagggcctagagaacgcctctattcttacaagagacacacacaaaacaacaatcatacagcattcggagaggaagcgaatgctggaactacacggtataatggaagaaagaaaccaggctcagccaaagcaagactaagcaaaaagaacaaatctggaggcatcacactacctgatctcaaacttcactataaggccacagtcaccgaaacagcatggtactggaacaaaaataggcacatagaccaacggaacagaatagagaacccagaaataaacccaaatacttacagccaacggctccttgacaaagcaaacaaaaacacaaagtggggaaaagacactcttttcaacaaatggtgctgggataattggctagccacatataggagaatgaaactggctcctcatctctcaccttgtacaaaaatcaactcaaggtggattaaggacttaaacctaagacctgaaactataaaaattctagaagataacgttggaaaaacccttctatacattggcttaggcaaggattttatgacaaaaccacaaaagcaaatgcaataaaaa

SEQ ID NO: 468908 - DNA, 687 bp, Homo sapiens
tctgatggttttaaaggggcagttcccctgcacatgctctcttgcctgctgccatgtaagatgtccctttgctccttttttgccttctgccataattgtgagacctatctatgcaagggcagaaataaaacaatgctacaagtcttgagtaaaaaacaagaattcagtggaagctgcaagttaccatggaactcgccattacctgaccagaattcccagaaatatagggagttaaggcctggctatttgaaaagcatcacagtgcatctcacagtgcgtgtgcgggagtggagatgcctggaacagaattccgataggactggattacggatggctaaaagaagaagatcccacgagtggaaaaatactgaaaagtgtcgtagtgtaggtgaagaaactcaagtgaaattactcagagcagatcacaaatattttagaccatataatgcactcagcattgttcctagagcatcataaacactcaatatgaataaagtgacaaatactttgaaggctgaaaccatagccttgtttctctgtattcaccataataattagaataatgttgaatatatagtaggtcttaaataaatgtttattgactaaatcataggtatttaataattactggctgtttcactgtcttccctctgtgtgatcagaaaagcacatatatattactttatt

SEQ ID NO: 468909 - DNA, 991 bp, Homo sapiens
tctgaggtttgtcgctgggctgtgcaaacaaatgatcgacatcttgtgggaatggcaggacctggaaaggctttcagcaaagaaaaaatattataggattattatttttctctcaaaggtgtcaaacattctagaagaagaccaccagaaaacagcctggtataatactcctaagactgctgactttgaattccattttgagcttgcaagccttttaaaaaaccttatttccttaaaaggaacaagaagccctgtttttgtccctcacagaggaatttgtgcaggaaacaaggaggtaacgggcaagaggcagagtgggaataagataaaacatgaacaaatgaaggttgtccatgtggagaaggacggacatgaacaaatgaaggttgtccatgtggagaaggacggacatgaacgaatgaaggttgtccatgtggagaaggacggacatgaacaaatgaaggttgtccatgtggagaaggacggatatgaacaaatgaaggttgtccatgtggagaaggacgggagagaaaattcccgggctggctgctagagaagccacaccaaagcctttcttctctacttcctgaggaaaactgacttacgccttctgtgataggataatactttggatttacatagaaaaaaaacacccattccacaaaatattgacaattagacgaactaaatattttctcaaaaatttttatgtataaacatttctcttaaatttacaatataaaccttataaaagcaagaactgtgtttcactcaccactgcattcccaatgcataggacacctttgtcattcttgtgtcatattttataaattcttgtgaatagtaaattctgcaaatactgcccagatttagttcaattccacttaataaacaatttattagctatgaggtaggtacagtaatcatgttagcataagacccagttttataattaaggattttgcatccagagagataaaaagtaggtatg

SEQ ID NO: 468910 - DNA, 645 bp, Homo sapiens
ctgtctgaatacatgacttctcatccgcagtctgactagccatggagcaagggaaattgcgaggcagagtggaactctcagcactgcatttatcagcatcaggaacaattcacttcagaaggaaatttccagacacacattccttagttgtgaagtatttgaattatagcaatgtcgtctggtgcatgcaacaggaatccttgaagtccatgctgacagcacctactatggaaaccattcagtgccattatcgtcactaccctccatactctggacccagcaaacaagcaagacctatgtgtgttgaattggtgttacttatacacttacatgtggtcaaagattttcaggagctagatgaaattgctgctgatttgttatatcaccaaagcgaattatgcccaagcccttattttgcttctgagtccagtccacatttccagcatcagcaatacatccccgggttcttccacctcacagcctaacaatccctgttctgtaaagcccaaaaacatgagaaagtaagaacttgatatcaaacttcaattccaatgtcacttcctccaggaaaattttctgacccctctcactctctaaatctaatacctgctgtttaaaattataaatgttggcatttataaaact

SEQ ID NO: 468911 - DNA, 556 bp, Homo sapiens
tcccagacgaaaacctgtgactcagagggagaactgccctatttgcctgccctttcctgatcgattatttctggataatgccttttttcaatcaaatgttgccttttctgatactaccaacggcttccctgggcatgcccatatgcacactgaggggaacagggcagagctgccaggaatctgcaccttatgctggggaggagtctagctttttcagctcctgtgtggaagtcttgggactccactgggaggatgagcacccctgggctctggcccagtggcagcttccaggggtgggtgtctgtgactcccaaagcccaagtgggcatgtattatggtgtgctcttttagccttgccatctacagatggcttaagtattagacagctcagtggaccttctgcctttttgcaagggcagagggccagtgtaacagctctctatatcccaggctcttgtccagcatccaggaaaagtctgattacacatgggcttgagggatgaatgtgggggttttattgagtggtggaggtggctctcagcaggatggatgggaa

SEQ ID NO: 468912 - DNA, 771 bp, Homo sapiens
ttaaggggcatatggtctgtgtcactaggttatctaggtttgctacttggtgcttatctggaggagaaacaaacttcttacatctttatgacaggggaagttgtgcaagctggggcaaggggctgcagatgttatgcccttaccttcacactgagaggaagagttatcttcctaatgatcttgtttgtgacctgaagattgaaaagggacctaaggcactgctgaccctgggactaagcctccacattaagcttcctggcattctttctgagtttggcctgctggagctggccgatcctgtgtgcatttctgatcaaccatcaatatttcaaggccaagaatttggagatagagttactatcagccagactgatagtagctggagacaatgaaaggcaaagcagcattgaaatatcactagtaaatctgtaagctttatcagaaaaaacaaagggtggagtccatagacatacctagttactgaaaatcaaatatcataaggaaaatgtcagtggacatatagccccagaaactgtgctgaaaacagccatcatttgaaaatagagaatatgtcttttataagatcttcctagcataagaggaaaagaggacaatatgtttggaaattatcactctctgtatcaagctctccctgttggctcatgggttgaagtattaaagccttcataagcttgaatatcctctgtttgtagttacttctacttcagggagattttatggaacgtaatcaagccaaaactgtcagaagct

SEQ ID NO: 468913 - DNA, 664 bp, Homo sapiens
aacgtccagcaacattcctgtttctctctctctctctctctctctcttttcatggcctcttctggcagaccagaatctgctgctttgagagacaatttcagtatctgtccatacaggctcatggttctgcaagctgagaactccaaaggcatggccctggcttctggtaagggctttcacgttggatcacaacatggtgaagaaggtcaaaagcctaaggacttggtgccctttgtccaagctgctccagccatggctgaaagggaccaacgtagagcttgggctgtggctttagagggtgcaagccccaagccttggcagcttccacatgatgttgagtctgtgagtgcacagaagtcaagaattggggtttgggaacctctgcctagatttcagaagatgtatggaaatgcctggatgctcaggcaaaagtttgctgcaggggcagggcactcatggagaacctctgctatggcagcgcagaagggaaatgtggggtcagagcccccacagagagtccctactgagaagactgccagtgagggcttcctggaatgcggaaaatgtttctggagaaatgagactggagaaaagcgggtccttgttgtgtagtggtaaaaagtataacaacactgtcacctgagtcaaagaaaggggtgacaga

SEQ ID NO: 468914 - DNA, 595 bp, Homo sapiens
aaaagttgaaggaaaaaaagccattgttaatgaggcagatgactctagaggcaacattttgcaaaaccatccaacagaatgcctcctcatccctaaaggacccagttcctggtccctcaattgcttttcatgtttcttctcacctgaaaacaaaaaatacagtggacagttacctttccatcaaaacacagcatggtagagacggaaagcctgccgttgtctgttgctgtctaacagctgagacagtggctcagacagttgtccagaaggaaagtggcctgcagcacacccgaaagatgctgcatgttggtgacccaagtgtgaaaaagacagccatctcgctgctgaggaatctgtcccggaatctttctctgcagaatgaaattgatctggctgccacccagggacccccaggcttcaacatctgcctcctgcctcttccccccacccctgaccctaccactaccaccacccgttttattcccatgctttccaccgggtcctagggatcatcttcgagcagaaagcaaattccacagtggcaaaacaggaaatgatgagggggtgggggaaatgtacctgcagaatctcctca

SEQ ID NO: 468915 - DNA, 1470 bp, Homo sapiens
aataggaacagctccagtctacagctcccagcgtgagcgacgcagaagatgggtgatttctgcatttccatctgaggtgccaggttcatctcactagggagtgccagacagtgggtgcaggacagtgggtgcagtacactgtgcatgaaccaaagcagggggaggcactgcctcacttgggaagtgcaaggggtcagggagttccctttcctagtcaaagaaaggggtgacagatggcacctggaaaatcaggtcactcccaccctaatacggcgcttttccaacaggcgtaaaaaacggcacaccaggagattatatcctgcacatggctcagaggctcctacgcccacagagtctcactgattgctagcacagcagtctgagatcaaactgcaaggttgcagcaaggctgggggaggggcgcctgccattgaccaggcttgattaggtaaacaaagcagccaggaagctcgaactgggtggagcccaccacagctcaaggaggcctgcctgcctctgtagggtctgcctctgggggcagggcacagacaaacaaaaagacagcagtaacctctgcagacttaaatgtccctgtctgacagctttgaagagagtagtggttctcccagcatgcagctggagacctgggaatgggcagactgcctcctcaagtgggtccctgacccccgagcaccctaactgggagacatcccccagtagaggcagactgacacctcacacggctggggactcctctgagacaaaacttccagagaaatgatcgggcagcagcatttacgggtcaccaaaatctgctgttctacagccaccgctgctctgcagccaccgctgctgacacccaggcaaacagggtctggagtggacctctagcaaagtccaacagacctgcagctgagggtcctgactgttacaaggaaaactaacaaacggaaaggatatccacaccaaaaacccatctgtacatcaccatcatcaaagaccaaaagtagataaaaccacaaatatggggaagaaacagagcagaaaaaccagaaactctaaaaagcagagtgcctctcctcctccaaaggaacgcagctcatcactagcaacggaacaaagctggatggagaatgactttgatgagttgagaggagaaggcttcagacgatcaaactactctgagctacaggaggaaattcaaaccaatggcaaagaagttagaaactttgaaagaaaaatagacgaatggctaactagaataactaatgcagagaagtccttgaagaagctgatggagccagagagaaaggtcgggttacccacaaagggaagcacatcagacaaacagcgaatctctcagcagaaactctacaagccagaagagagtgggggccaatattcaacattcttaaagaaaagaatttacaacccagaatctcatatccagccaaactaagcttcacaagc

SEQ ID NO: 468916 - DNA, 892 bp, Homo sapiens
gaacatcagaaggaacaaactccggacatgctgcctttaactgtagcactcaccgcaagggtctgtggcttcattcttgaagtcagtgagaccaagaacccaccaattccaaacacagtgggaggtggcactttcaagagagcatcagctgtggtagtatggggagaaacaggtggtggccaggaccctagaactcctaagagtgtatgccctttgtcttcagctaccaggatgggtagggaaggaccattaggtgggagggcagggctaggcatgtctgagcttagactctcctctggtgggtcttgctgcagctgctgtgggggatacaggtgtggttcccaggtcaatggagttatgttcctaggaggattgtgggcacctctactgtgtcatgcaggttgtcagggaagtgggggaaagccaacagtaataggtctcacccagcttccatgcaacccaaagggccagtctcactcccattgtgtcccttccaacagcaccaagtctgtttccaggcagtgggtgagcagggctgagaacttgccccaggctacccaccccccagctgcgaaagcaagtagggctttcatgcttcccttgcctgtggagtctgcacaccagattcacaccctcccctgaattctggccaggaaacttctagatttgttcaaattgttacaaagttcagctggaggtttccttctccctgtggcctttccctagtgcctctggccaccctccccaagcacctccatgaggcaaggcagaaatggcttgctaggggacatagtgagcccatagggcttttcctgctgtttcctctacccctgtattttgcttagctctctaaatggacttagctccagatgctgttatggatgaaatgttt

SEQ ID NO: 468917 - DNA, 950 bp, Homo sapiens
gccatttgatatcaaatattgctaagatttacacctaccacgggcagcagcagaggagcaaatgcagacctatgtggaggagcgtgtggttggcaagcctttccaagccctgctcattgccatttctctaagagcagcagacttcactcctgaagccagcaagaccacaaacccaccaggaggaacgaacaactccggacgcaccatctttatgaactgtaacacttaccgcgaagcaagaccacgaatccaccagaaggaagaaactccagacacatctgaacatctgaaggaacaaactctggacacatcatctttaagaactgtaacagtcactgcaagcgtccgcggcttcattcttggagtcagcgagaccaagaacccaccagaaggaaccaattccggacacaatgctattcatttctgtttattacatttccttcttacagtcaggcccctctgctgcaggtctgctggagtttgctggaggttcactccagtccctgtttgcctgggtgtatcaccagtggaggctgcagaacagcaaagattgctgcctgttccttcctctggaagcttcatcccaaaggggcacctgccagatgccagccggagctctcctgtatgcggtgtctgtcaacccctactgggaggtgtctcccagtcaggaggcaggggggtcagggaaccacttgatgaggcagtctgtcccttagcagagctcaattgctgtgctttggagacccattgctgtcttcagagctgccaggcaggaacagctgctacccttaatcagttttggcagttgggtcacctctattcatgcttgtcacattattttggtcttgtcttaggctaggttcttgtttccttccctctgtgtttgtctctcatcattgtgctgatccagcacaacttgtacccaagttctgagacagaataaaagaaat

SEQ ID NO: 468918 - DNA, 501 bp, Homo sapiens
accgtaccataattaagtgtgtctcatctgtttggctgctatgtgctcaaaccacttacaggaggaggagcacttagatgggcagttgcaggagccagggcaagtgattttgggctccagccccacagtaacctctaaggacagcttaggtgttaaccagctcagtgccctcttggtacctaggtccttgtccagtgtccaggaagaatcaggtcacacggacaaattaaaggatgataaatgcaggggattttattgccagatggaggtgactgtcagtgggaaggatggggagctggaaaggagatggagtggaaaaatgatcgtcccctggagttcagccatcccacggctcatctcctctctgaccacccccagccgaactcctcttgacattcagacactccttctcctctctccttctgtgccacactgctgttctgctcctctgctcttctgctcgtagaacctggggtttggggtttatatgggtacaggata

SEQ ID NO: 468919 - DNA, 781 bp, Homo sapiens
gtgatgttccctgccctgtgtccatgtattctcattgttcaactcacacttatgaaggtgccctgcccggagaggaggaatctacagaggcagtctggctacagcagctttgcctagctgtggtgggctccacccagttcaaacttcctgacaattttgtttacactgtgagggaaaaactgcctactcaagcctcagtaatggccgacacccctctccccacaaagctccagcatcccaggtcaacttcagactgttgtgctggcagcaagaatttcaagccaatggaaatgcagaaatcatccgccttctgcactgatatcactgggagctatagaccggagctgttcctatttggccatatcttgccagccacctccttctctttgaaatctattttatctaatgccaataactcttagatttgccctttgggggttattttctaatctttccctatgtacaaaattagaatattggtttgtgatctttataattttataatttattcatttaaatctatacatttttctattaagcattgctttcactgcattctgttccacatggacacaggaaggggaacatcacactccggggactgttgtggggtggggggagcggggagggatagcattaggaggtgtgcctaatgctaaatgacgagttaatgggtgcagtacaccaacatggcacatgtatacatatgtaacaaacctgcacattgtgcacatgtaccctaaaacttaaagtataataataataaaaaaaaagaaagtga

SEQ ID NO: 468920 - DNA, 547 bp, Homo sapiens
ccagcactattcaatagctgacaacaatgaatgtccacatcatgctcagtatccctccccaagctccctccaccagattaatacttgacctggatttcatcctgacatctgaaactttttctagcttcttccttataaaactctgtctataccctataccattttttatgagattagtttttgattttgatgagaatagtttttggctaatttatgaattcagaaaacagctcagctggtgctctcctgaaagcagttatccagatttccatgtgctttcctctatattctacacaagtgaggagatcaagaactcaatactatgtgcaaaaatccagcacaatatgggaaggagacgacatgacagtgggaatgagacaacccagcagcaacttacacagaatgataagtgaggaccaggggcaatgaaggactctgattggatgcttccatcatagatgcagggaagacagagagaatcttttaaaatatcaagttcactgtaattatttagtacttccaggccaaagaaaaaaaatgcaaatat

SEQ ID NO: 468921 - DNA, 1593 bp, Homo sapiens
gagttaatgagtgcagcacaccaacatgtcacatgcacacatatgggatctccccttcataaaaccatcagatgtcatgagaattattcgctatcatgagaacagcacagaaaagacacaccccagtgattcaattacttcccccgggtccgtcccacagcaggtgggaattatgggaactagaattcaagatgagattggggtggggacaaagccaaaccatatcagagacttgttgaatggcttcgaccaaaatgctgatagtgatatggacaatagagtcagggctggtgtggtctcagatggagatgaggaacttgttgggaactggagcaaagatgttccagtttatgctttagcaaagagactggtagcattttgccaccaccctaaagctatgtggaactttgaacttgagagggatgatttaggttatctggcagaagacgcacctgaaggaatctcctggtttacgggttgcaaagatcatggaaaaagtgtagtatctgggccagatagcatcgtccctcatggcactgtccctcagggctccccttggctagaggagggagttccctgaccccttgtgctttctggaatgtaaaattccttttgataagctgtgcggtcaacatcatactagggaaaaagtacattctgaatatgtcatattccaacaaaagttcaggaaggacatcagagaatttttcaagagcaataaaattttgcaaaattttgctcttccaatccaggttgcctgtaatggcaaactaaaacttaaatgattattaaaccaataagcaaatattcatctagttttctgtgctttgctgtttgcaagatatcacatacatggactatatggctctaacatgttggttttatccaataactactaacttcatttcttttttaaatagtactgattggcccacccaatcagtaaatgtgtgttcagcttcccaaacttttatcaacttttccaccctaatccctggcttcacccacatcccacaatgtaacaccaatatagagctgttctccaggactatagcaatatagaactgttttatcagtatgtaaatttgttcatcagatattttattagaaaattcataagtcaaactttcagatacttcatgattagtaaaatatttactacaacagattctcaaatattttccactatgatgccttctaaagttctatggcatgactttcaaatatttatactcttctaaaatgttcagttctataaggtatattttagcttgtttcatgactaacaaattgccatgagggatatgctcactaattctttgttaaatttattctttcaatacatggtacaattttcattttgggctagtgaaatatatatatttttaaaaatttctgttctggttaattactgtcatttaaacctttttaaaaagcaagaacaacacaaactgcttctgagacaaggtagctgtatcgtagtctttgaattataaactccgtaaagagagggaccatgtctctcatattcagcattatattcctattcacaaataaaacaaataaaaataatgacaaggaaaaagcatgaat

SEQ ID NO: 468922 - DNA, 473 bp, Homo sapiens
tacttgtgcgcatagctttctcctccatttcgatgagtatggtctccttggcagaaatgcccagtagacctgatgggtggctagacccagaagagagacaacaatcaatgcacttcagcttgcaggaagccacacccataggaaaagggggagtgcactatgtcaagggaacaccccgtgggacaaaagagtctgaacaacagtcttcagccctagacctttcctctgacagaggctactcaaatgagaaggaaccagaaaaccaaccctggttttccaaagttaagacaaaggaaagaatcttaagatgtgagacagaagcactagccaagaattttgtatccacgaaaactaagcatcatacaggaagaaaagatacagtcattttcagacaaacaaatgctgacagaattcaccattaccaaaccagcactgtaaaaactgctaaaaggagctctaaatcttgaagcaag

SEQ ID NO: 468923 - DNA, 1307 bp, Homo sapiens
agcaagatggctaagaacataggctctggaatgagactgcctagtgggaagcactatgattggcaaacatgtgttatctatcaccatcatcaccaccatcaccatcaccatcatcgccatcgctatcatcaacatcatcatcaccatcactatcaccgccatcatcaccatcgctatcaccatcatcatcactatcaccatcatcactacaaccattattaccatcaccatcactaccatcactatcaacatcataccaccatcaccatcatcaccatcactatcaccaccatcatcaccatcaccagtcatcaccatcactatcaccaccatcatcaccatcaccatcaccaccatcatcatcactatcatcatcaccatcattaccatcactgtcaccacatcatcataccaacaccatcatcaacataaccaccatcatcaccatcaccgtaatcatcagcaccatcaccatcatccatcaccatcaccaccatcactatcaccaccaccaccatcatcaccatcaccatcatcatcatcatcaccatgttaagtctccattccagaatcttttccaagactgacagctccctccaaatttatagttgctgaaatcaatcctctgggcagggccaaatagaaagcagggtctgcagaacacacatcccagaggtgataatgacagttaatccctgcagatagttagatctaggagactgtccctgggcttcagggctccctgcctctgaatcagactatttgcagtgcaaatgcaagcctctatgttccccctaaactataggtggctgagcagccatggtgttgccagcatttctataaaggaggagctcaaggcagcaatctcatcagatgtgaggctggggctggccttgaatttagattgtttatttggggcagtttgcaaggagggggtgccatgatgagattatgtgagctaaatcccccacataaaaccattttgtgccactgctcctgtgccaactgaccagaaagactagagtgatttcttccctctctcctttcctggttctgttctctgaccctgggtgattaatgtaacctagctatgttcaattacccatccttttcacgatgttggcatgtctgccacctgtccctggtgctcttcttggtttcctgtgagccgtgacaatgggacgcttcctctctttgcaccatccccggacgcctccctctctccttacctcgccatcctcctcccccgctgcccctgcctctgccccccccccaccacttcgctcacgcgccagcagccatgacca

SEQ ID NO: 468924 - DNA, 684 bp, Homo sapiens
acacaaattcgtaaactttcttaaatcggtatgagattttttttttttttttttgagacagtctcactctgtcacccagaaacaagcggggttgtgtcctcacgcttccggagactggagttgctcctgtgttctcaggagaggcgggagacggcgcagggtctgaaacatgggggacgatgtgcacccgcaacaaactaccaacactggagaggagcccctggatgttatcgggctcagcctagatgaaaatgaccgagagcttcaaggcagatcacatgcttatgatcaacatttaaatatgatcttgggagatgaggaagaaaccgcgactactatagaaattgatgaagaaacatacgaagagatatataaatcaaggaaacagaatattccaatgctctttgtcctgggagatggtcgtgctggttgcccctccattgacagctggatgaaacaatttgtcctgtatggaaaatacgagacttcgtacagtagcctttctaaatgtacaaggcattcaaaagagaaacctgcatacattctgatattaagaaataattctggggattctcccactcctgaaatgaattgatttgcagataattcacaacttcttaagctaaatggcattttaacttttctaaagctcttcaataaatatgaccaccaagatgcagagct

SEQ ID NO: 468925 - DNA, 674 bp, Homo sapiens
ttcagataaaaactgcagttacacacggtcttgcgtggccccaagaaagaaagacggaattcaggagccatgggaagccgctgccatggctccttcccgggacttaccgcctctgaaatgctgctgggattcgggaaacagcagctctctgtattactagctcttggggaagccacctgccatacggcttcacactcaaccctatggagaggcccacatggcaaggaaactgaggctttctgccaacagctatgtgagtggggtatcttggaagtagattgtgcagccccagtcaagccttcagatgaacacagccctgattggcatctgaactgcaaatctgagtatttaccatatgtcaagcaatgctgggcacagggctgtaccaacaaacaagacctggtcctattccctgagggctccctgagggctgacaagctgggatctgcacatgggctaaaattagtaattctgccacctcttctgctgaagctaaatgggagggagagctggatctggtgggatgtgcgcccaacattcccaaaccaaaggcaaaaggacgttcagcaaggtttagcagggaagaaggactgtgctcaggtgcgcatgtaaactgggcaggagagctcttgaaacaggaaaaagacaacttgttcatgttgctcaatgttttt

SEQ ID NO: 468926 - DNA, 602 bp, Homo sapiens
tctcctgcagctagaattccagaagtctatggatcttattaaaatgaagactaattcagcagacctagggtggggatggagactccacatttctaaggagcttccaggcaatggggatgctgtgggttcaagcaccactcttcagatgctgaaacaacttcggaggtgccagtggaagacagcacaagatgaaacagctgctaaagaaacccagattaagaagctgaacagcgagtacacttctcctgaaacaagcaagaaattcggcttccagatattattgtacaatttgagtgttgagaagtacatttatctgtacaatgaagacgccaacgaagattacaaggtagttgatggagaacataatgaaactatcaaggctttttctaaagtggttgtaccattttacactcctaccaataacatggaaattgcattcagcattccaaaaagccaatttacaagcaaatgttgggagcataaatttaagctgaagcattcatagggtttacatcatttctttccctccttttagggatcaatgcactgtattgcttgttgttcaatatctgaaaaccattgttctgcatattttatctgac

SEQ ID NO: 468927 - DNA, 667 bp, Homo sapiens
gaatgtttgatcaagtccctgaagtcctgatctagacatggatctgatcacctttccattgttcccacatattaggcaagctgcatatggcacagacttgaagaagcagctgtatttgcagttacctcaccaaacgaaagatacaaactgttgtggcctttcagggaccttctgtttctcagctgataacactttggccctgggagctgcatcccgcatcacagggcctacatggaggaagtccaagatcaaggcactggcagattcagtgtctgctgaatcctgtgaaggtcccgtcctctctctgggagacccgggattgaacccatcctgttccacatcaaccatctccaaaacaacagcccttggcatcgtgtctcctccagtattctttcaccctcatactgttttctctccccctgatctttcttccttcccattctttatctcaaacatttaacagtgccttctgaaatacccatgctatggtcaacaaatgcctcaatattctttatctcttgattaactcttccctacacctcttggctacattgggagcagaaaaggatgatgtttcggggatagaggacataggagtgcgaaggtcctaggttctaacttggatatatgagtgttcattttcttattcttttaatgtgtacatatt

SEQ ID NO: 468928 - DNA, 1224 bp, Homo sapiens
ttctcctggctttgcgaggctttgtcaaagatcagatgtgacatcacctacagacatgtatgtagaggagtattttatgttcaataatgtgatcaattttagatattttgccagtattttgttgaggtttattgtatttacatttcttagtgatattggcctacaggtttttgttgttgtggtggtggtggtggttgtggtgtctttgttttggaatcaaggtaatgctggcctcacagaatgggttagggagaattccttctcatcaattattttcaaaagtttaagcagaattgatattaatttttctttaaatttttggtttaatttagcagtaaagccatcaggtcttgggcttttctttaatgggaagccttttattatttctatctcattctcattattagtctgttcaggttttctgtttcttcatgattccatcttggttggttgtatcagtctaggaattttccatttcttctagattttccaacttactggcatacagttgctgataatagtatctaatgtcctttgaatttttggtggtatcagttgtaatgtctcctttttcatctttgaatttttttatttgaatcttttttccttattagtttagctaagcatttgacaattttgtttatgttttcaaaaaaccaacttttcattttgttgatactgtgtttttagtcttaatttcatttatttcttctctaatctttatttttttccttctactagttttgggcttagtttgctattgattttataattctctaaggtgcatcattaggttgtttattggaaatcttttgctattttttgatgtagatgtttattgctataaaatatcctcttagaactggttttgctgtatcccattggttttgaaatgtatacatttcttctagatcttctaatctattgttatttagttgttcctagtctcttatgattctttgtatttctgtggtatcagttgtcatgtttcctttatcatctttgattttatttatttgagtcttctctttttcttatttagctattttatcctttatgtctaagatttctacttttatgtgtgtttttatatttttttctttgtcaattttctcattttgttcctggattgtttttcaaatttcatttaatttttttaatctatactcttttgtgcttccctgaactctttaagatttttctgaattctgtcagacatgttac

SEQ ID NO: 468929 - DNA, 615 bp, Homo sapiens
tacaagacagctgctaaatttaacatgcctttactggaacaccagtgcctgctgcacaatagcaggctatctcctgtctgtgtagacacatggagccctgtgataaacagagccaaaccaaaaatcagagcattagaatttcattgcaaaagtgttggatgtgtgaggctattggcgctctgtctgtgctacactgtagttcttctgcaggcctgtcaacaagaatgttatctgaagtcagcagttcaagcgctgcacagagccagggaaagaatatctgctttatatcaacatgctcgcttccgagactttctgtttgacagtatttactcgaaaggagtcaaacttcttacaaagaaattaaaggctccaaaatggaaagttccaaaagctccaagtctgaactgcaagccttgtcttatcatctttgcaatattctcacaatcgtaattaatgattattaattcattttttaatgtctgttgtgatatattgtaaggtccataaaaaaacaagacaatgtttgcagtcattctgctgagcccatgtgtttatcagagtgtcttggacacagcaataaatatttgatgaatgaattaaagaataaatgaatta

SEQ ID NO: 468930 - DNA, 617 bp, Homo sapiens
gtatgccacctctaggggcagggatgaccaataagtttcatccaagatggaccctaaaactcagtggcctacaacaacaggaactcattcttccactcagctcatgtgttctgcttcaggctacagtagtggctcagagccaaatgatgagccttcccatggctacatggctgtgataacaaatagagttatacacctgcgctctaaactcactgagaaaggaaaattccaaattgccaaagcaaattggagatttgtagcagggcctgaacctgaggacttcactggagaggaattcaaattaggccttaacagatggaactgggacttcagtaccagactcaaggaacagtctggaaagagggccctgcagctgtattcttcttcttgtattgatgaatttccaaaagaacttctttgtcaactggaaaatccccctctttcagaaaaagacttacgtgaatcatctgccaagattcagcaatcgagtaacactcccccatgggaaggagtgagtgaggacgtgaacaggccaggaagttgctgccataatgttcagtcaaaaagtcaagaaacactgacctagatgcactagatctcagactccagattttatc

SEQ ID NO: 468931 - DNA, 663 bp, Homo sapiens
ttctgcagtctggggtatgggatgaagggctacacgataggaagtgaacctggacagccatggttaaggtctgtattagtctgttttcatgctgctgatgaagacatacctgagactaggaagaaaataggtttaactggagttacagttccacatggctggggagacttcagaatcatggcaggaggtgaaaggcacttcttacatggtggtggcaagagaagagaggaagatgcaaaagtggaaacccctgataaaaccgtcagatcttgcacattgtttgagaatattaatgtttataataccattaagacactttcaaagccaactgaaatagcaaaacccacagaaaagggaaccggaactaagggaggtagcttttgtgataaaaagctgcattattatttgatggcaaatggtttggaaagccgaagatatgtcacagatttatttcagggcctacagtggtgcatctggagtcagctaatcagtagcctgaaaaaaatgtcaacattggtaaaccagacccaggaatttaggagaatctttgaaaatcagggccttattgaaccagtagcttagtttcacgttgaggaacaggagataaagtttctcccagaaggatagctgtcacgttttcatgtaaaactgagttgctgctac

SEQ ID NO: 468932 - DNA, 605 bp, Homo sapiens
ctcctcaagtgccaccaaagtaggagcccaggcagaggaggcgccgagagcgagcgagggctaacagtatgggggaaaccattcccatgattcagttttctcccactggatccctcccacaacacatggaaattatggaggctacaattcaggatgatatttgggtggggacacagccaaaccatttcaatggtcttccacaaaatggttccctggggccaaaaagaataccacatactgagtactttataattagtaaagatttgttggctatggttctggaggctggtaagtccaagatcaagggaccggtatctagtaaggacgatcttgctatgttatcccatggaggaaggacaaagagaagtcttcccgagaaggagacagaaattagtttggggagaccaactgggtggagtatttttggcacagagtatcacaaaggagatggctacactaagagaaaccagcatagactggaagagagagacttcctcaaatctttggttgtgtgctaatctctgtatagcaaggaaaaactgtcttaaatcaaggaaagaactgccagaagggaatagatcagacaatttatgcagctcacacag

SEQ ID NO: 468933 - DNA, 1163 bp, Homo sapiens
ctctctcccactgtgtctagtttctagttctgatgtgtagcattcctgattttgctgggggttggatatctgacatgcaactcacagaaatgtgtctgcattgttgaatgaatggagccacgcacatatcgggaaagaaatggaacagctcagaggttccaataggtagggaaagagtcgaagccaccagagcccagtggtatgcagcaggccgagatgggatgactccctttgaacaaaaatgtcatgctgacctggcggagaagatgccaggatgtaaactctgcaagtggtatctggcagctgctatcaaaaggacagagtcaatatacaatcagagtgacctgaaaccgccaatcacacaccactgtcttcagggacacgaagctccagcattttcagtatgcaatactgtccttctctgctcatcaaacaagaaatacttgggaatcctggtgtcagtgggtgtcaaggagtactaccggggacgaaaccaaaacccaaaaaccaaaaagctcttccgttgtggatattacattccatgaggaatataatgtattttataatgttctttcaactatataaacaaacaaaataagcaagcagagaaaagaaactgaaaggaaattgtactaataatgctgaacatctttacatgtgctcattttccattcgatattttcatttgcaaagtttctgttcacatcttttgctcaatttttaaaatggacaaaacaacaacaaaaacactgaccgtaaaagaaaagattgataacatacttctattaaaattatgaactttcttcattaaagacaatgttaagagtgtgaaaaggtgagtcagataagataagaactgtgtatatttgaaatttgattagggttaaacatgttttcactttccatgggtgataaagacaggactgtgtgtgctactttcccagtgctgcacgtggtgcttggcatagagtatatgttgaatgaatatctgtgaataaatgcatggatgtgtgagtaaatgaataaaggggatgaccttatttaaaggtatatagaagaacaccctctaatgcactgtttgcttttcctaaggttaagagaaagttcaatcttagcgagaacgggactctgaatgtgacttaatagcaatgcgagagttggcc

SEQ ID NO: 468934 - DNA, 561 bp, Homo sapiens
tccctggaatcttcttgggtccaaatgtcccctattcccatggccacttcatgctcacctcatgtaaatgaagtggtagcccacaatcagtctgattggttgcagaaagcagccaaccagagactgaatatattcatatcttttgacccagaaattctgcttccaggaatctatcctaaggcaattgatgaattaagaaataaaggcttgcctgcagttctggttacaattggccaaccacatctcttaaataagtttaattttgttaaagcatactttttcctaagtgtggctgcgacaataaattgtgtcccagaaaataaatttaagacagtaattaccaacaagagcaaaccaaacctaccaaacttggaagataataaacatgctggcaataaactataaacacaagtaaattacagagtgtgggcaaaaatgataagtgctatggagaatataaggagtagaggttggagggggacgagttaccattttaaaatcgtgtggttgtaataagtgtgactccattttgatgttcaatggctgacagctttcaagccc

SEQ ID NO: 468935 - DNA, 488 bp, Homo sapiens
agcagtgagggactgaagtgtgagagatggaagcttccatggcatgacccctttaaagcaagaaatttggagtcccagcttctccagaaaagcctgggcactgaaaatagagatcctgcccttaagccatagtctgagcctccatgattcagagcagggcagcgttgctcaaggctcagcagaagtgagaaaaccaccctcactgcctgcctggaagctgaaaaggcggctctgtgcatcacatctacccatgaagactggtagggaagctgaatgttcaccttcaactctcttcttctgtaaaaacagtggagtctcagcaaactgctgtgctggattgagggaggggcagtatggtctaagtgaaattaaagttgctcctcttaacctttatgtgctgctgttctcagttctgtggtctatggaggtatcccagcctcactcctgagttctaagatattcactagggtattcttgtctgtggatag

SEQ ID NO: 468936 - DNA, 1181 bp, Homo sapiens
ttgctagcacagcagtctgagaccgagctgcaaggtggcagcaaggctgggggaggggcacctgccattgctgaggcttgagtaggtaaacaaagcagctgggaagttcgaactgggtggagcccaccgcagctcaaggaggcctgcctgcctctgtagattccacctgtgggggcagggcacagtcgaacaaaaggcagcagaaacctctgcagacttaaatttccctgtctgacagctttgaagagagtagtggttctcccagcatggagtttgagatctgagaaaggacagactgcctcctcaagtgggtccgtgacccctgagtagcctaactgggaggcaccccccagtaggggcagactgacacctcacatggctgggtacccctctgagacgaagcttccagaggaatgatcaggcagcaacattcgctgttcagcaatatttgctgttctgcagcctccgctgctgatacccaggcaaacagcgtctggagtggacctccagcaaactccaacagacctgcagctgagggtcctgactgttagaagaaaaactaacaaacagaaaggacatccacaccaaaaccccatctgtacgtcaccatcatcaaagaccaaagttacataaaaccacaaagatggggaaaaaacatagcagaaaagctgaaaattctaaaaatcagagtggctctctccctccaaaggaatgcagctcctcaccagcagtggaacaaagctggacggagaatgactttgacgaggaggaagttaaaacccatcgcaaagaagctaaaaaccttgaaaaaagattagacaaatggctaactagaataaccagtgtagagaagtccttaaatgacctgatggagctgaaaaccatgacacgagaactactgatgaatgcacaaccttcagtagtcgatttgatcaactggattgaagttgattcgatcaacaaaatatgggactatgtgaaaagaccaaatctacatctgattggtgtacctgaaagtgacggggagaatggaaccaggttggaaaacactctgcaggatattatccgggagaacttccccaacctagcaaggcaggccagcattcaaattcagggttacagagaacgccacaaagatactcctcaagaagagcaactccaagacacataatggtcagatt

SEQ ID NO: 468937 - DNA, 630 bp, Homo sapiens
ctctgtcaggcatggggcttagcagggctggcttctgctgcttgttaaaaggagttcaggagaacacgcagtgtcgggcctggagaaccatggacatgaaagggccagaggcacaggtgaggggagagagcagcacctgcctgaagaatacacttgagaaactggctgcatgcacaggccttgttcttacacagtgtggggctaagatctgccagagagatctgtggaaccttgaacttgagagagatgatttggggtatctggtggaagaaatttctaagcaccaaaacattcaagaggtgacagagcataaaactttggaaaatttgcagcctgacaatgcagtagaaaagaaaaacccattttctggagagaaatttaagctgcctgcagaaatttgtgtccttgtctcacaactgggaaaaattcagcatgcagatacattgaaaggtgaggaggatggaatttatgtagtgaaaggaaagctctcaacagaaagaggtggggagacaaatggagtaaacttttggtaagcatgtggaaagcctgctgatctaagcatttggatgctatgggcatcagccaggaaggtttagaaagggtatggagaatattcattcatttggcaag

SEQ ID NO: 468938 - DNA, 705 bp, Homo sapiens
gagagcgagctagggctgccagcatgctgtcacctctcaatatgagagtgtataagtcaaacagtgtccctatccttgtttcattcttacctctacaattatatatattaaattcaattttttttgttgttgttcatacttttcttctaatcctcttgaccaggttaactcttactctgttaaaacttttaaaaactgttttggaggtggcaagaagtcccattaatgaccatgggttttctgggcttcatattctcatttataaaatgatcagattaaataagattagccctagagtcttttctatttctaaaatgctaagatatggtatccaaaatgttgccagaaatggatcccaatccagagcccaagagggttcttggacctcacacaagaaggaatttgagaactcttcttcaaataaaatccttaacttccagcaatgagcacagattttggctttaattaacaaatctctttggtattggtatgattacattcttgtaatctttaatacccttagaatctttaactgctgtaaaattcagtgctgtgcctggttgaagaaacatgggttgtttatttactcttccgtgtctgcactggttgaatgttatgttgtgcagaaaactgcttttgattcaaacaggcaacatgatttcagacctaattactacagaagtaattgctccttggcaaatgggg

SEQ ID NO: 468939 - DNA, 1332 bp, Homo sapiens
gagttaatgggtgcagcacaccaacatggcacatgtataccctattgaagacaaaggagaattcagtgttccaagctgttatgggaatattaaaaatgacaacggtggttctagtcttacctttgagcatcctttggatgatgtaaatgtggttgatttgaaatggatccacgactttgtattaaaatctctggaagttttatatcaagtggaaaaatgggaaacactagtatctcttgccattcagttcaatacagtttcacatgagaggtatacagaacaagtgacaccacttctggtgtatgcacagcgccagcttctgctgagaatacagaagttcaagggcccagatattacccaacaaccttgtgcaaggtatgaggctgaatatggagagaagggtgatctagaagacttcttggagatgatggcatttgatgagaggggccagccatacagtgatctagggaaagaacattgtagcccaagagaaaaagaatggcccatgccctgcagtgggacagaaagaaggcctgtatggctgaagtgtagcaaacaaggggcatgggagaaagaggaggctgctccttccgaggattttttgttgcttcttcttctccccagtgtcccaattcctgcaaactgtgattcctctctcttggtcctgcttcatgatgtatgcagcaatgctgcagctgaagtcccaggccctcactcactcttcagagacctcgaagcaactctctcccactatctcccctttctgggcacttttcaggacaaatacagccgagccaaagcgcttgtctgcgtgcccgtggacgtgacagacaccttgaggtgttttagagagacactggaaaaatccaaataccataacagatcaatccgacacagcagaaagttgctttcattatttcttgcacagacacaaggagagaaaggagaaataaatgattcaaaatgtacttctggaaaggtggaattttgcctggggacagaggagatgcatatgtcaataccccctgacctttctcaggagcacttcagagtttttagttccgtggagaaaagcaaacttccatattcacaacttggacttgtaatttcttcttatcaccaaactattgatgtgcaacctaggtttggggtaccaaatggcatctactgggaactgtaagtctctgatagcatcttaaagttccgataaacttatgaagcatgtgctagatagattatttcacttattttcaacagtatagtttcctagcatggaaagcaaatcagtatataacatatcctatatttaatatttggctaaatttgattatt

SEQ ID NO: 468940 - DNA, 1217 bp, Homo sapiens
ggtcctgacatcatagagctggagcagaggcataccctgaacagtctcatagaggtgtcgatggggccacacttgttctaatggctctaggggagaatccttccttgcctcttccggcttctggcatttgctggcggtccttggcgttcctcggctttgctgcaatagtattttctacacttacacttctccaggattcaaaactttttgaaaagaaggtagtacaggatgacacagagaatcctgtctctccaggaacttctgtcactgaaaataaagatgacagtgagtttttagatcctatttccctaaatgcccgagaatatttcaacattcatctgtggttgaggtgccgcttagcattggtgactgcatttgttgcacagattcatggcattggaattgtgaaaggacatacagtggccaagcaagtatattacaagaataaaaggaaggacccctcgaagtggttacctgctcttcatctgtttgatgtggcactgaagctctgtagaacaacagcagtggaggaacatgaggtggaagctgaaatcctttttcagaaaggcaaaatagaacgtcaaatactaatggaagagaaatctccaagttttcaacttgagagtttatatgaagctatacaactaagcctgaaaaatgatcaaaactcaggctcagaaattgttggcaaatgataccaatgattatgcatggtgaagctatttaataagtacagtgctatatcattttagattgataagagactcctacctagaaatggctctattgtattttcatctgaagaagccaaagataaaaatttcaggatcaccattaacacttaagaaaatgttggcatcaaatctttaatttttgagacaacataaacatgatttaaaacctttaggcaaatagagtctcagtcaattcttaccaattattcatatggcagctgccattcatatggcagctgccttagactgagagattagtcaaaatctaagacgatgactgaaacttccaatatggctatttcttcttcatactgcctccttattacttctgaatgatgtgtttactttaccctagtcatttccttgtgttttcccagtttttagggcagggatgaccaataagtttcatccaagatggaccctaaaactcagtggcctacaacaacaggaactcattcttccactcagctcatgtgttctgct

SEQ ID NO: 468941 - DNA, 646 bp, Homo sapiens
tcatcagttaaggcaaggaccggccattttcacttcttttgtggtggaatgtcatcagttaaggcaggaacaggccatttaaatatcacttcttttgtgatttttcagttacttcaggccatctggatgtatacatgcaggtcacaggggataggtccactccagaccctgttttcctgggtatcagcagcggtagctgcagaacagtggatattggtgaaccacagatgctgctgcctgatcgttcctctggaagttttgtctcagaggagtacctggccgtaagctttgtcatacactaccagcagaattccacaaagccctacaacttatcaaatatgtcatcagtaaaactagtcttgcatttcaggtccttaagattccaatttgtcactttagagctacacaactgctttgctgtgttccacttgcctggagtctctgacgtctactgctttgccatgacgggcaacgtaagacaggtaaacaaggagtggcaacctggttctgatggaccaaatgccctccaaacaatagagggattgggagctccttaaaacctcaaacccttgcctacttactgaccctgtttcaaggttttctcagaggcctaaagagaaagtatggtaggtaataggagctgcag

SEQ ID NO: 468942 - DNA, 3307 bp, Homo sapiens
agcagtaggtctaagagaatatgaagaatgaagcaccaaagaaggataaagtctcccaggcaatctctccaagctgccctcagaagaatagacaaaaactctgtgtgggcctggtgatgacttttagtcttttctcctctctggtgcttaatctttcttggttatttaatgagattcctagaaagggagcttcaagactattggttattgcaattcatgagaaattatctaatcttgctcaaatagctgaactatcattgccagcagctcctgaaattacctcaaatgaaaacatatatgaagtagaagtggaagaggaatcagttgataatgaaatggaagccatgaactccttatgggctctctgtgttttgttcatctcctattcctccttcgtggcctataggaggaatttgattgatgttgaatggataaatggtgaaaggattttgttctgtaagagagggctgtgggaaagcagggctggatcttggggcctaggacaaggatcctagatattatatattatatataatataacatgttatattatatataatataatatattatatatataatataatatatattatataacatgttatatattatgtaacatgttatattatatattatgtaacatgtgttatatattatgtaacatgttgtattatataatatgtaacatgttatattatatataatatatgttatattatatataatataatatattatatatattatataacatatataacatacataattatatattatataacatattatatattatttactatatattatatatattatatatactatatttacctataataattatatatacatatattatttacatattatatatgatataatatataatatatatcaccctattgtatattatatatatcatgctataatatattatatataacatatcacgatatatattatatattaattagattatataatatattatataaatatcacattacataataatatgtatcatgatatatattacatattatgtaaccatagtatatattacatattataatatataaaatatataaattagtatataatataatttataatatataaattaatatataacagaatatatcatatatattcatataaaaaaaaaaaaaaaaaaaaaaaaaaaaaaaaaaaaaaaaaaaaaaaaaaaaaaaaaaaaaaaaaaaaaaaaaaaaaaaaaaaaaaaaaaaaaaaaaaaaaaaaaaaaaaaaaaaaaaaaaaaaaaaaaaaaaaaaaaaaaaaaaaaaaaaaaaaaaaaaaaaaaaaaaaaaaaaaaaaaaaaaaaaaaaaaaaaaaaaaaaaaaaaaaaaaaaaaaaaaaaaaaaaaaaaaaaaaaaaaaaaaaaaaaaaaaaaaaaaaaaaaaaaaaaaaaaaaaaaaaaaaaaaaaaaaaaaaaaaaaaaaaaaaaaaaaaaaaaaaaaaaaaaaaaaaaaaaaaaaaaaaaaaaaaaaaaaaaaaaaaaaaaaaaaaaaaaaaaaaaaaaaaaaaaaaaaaaaaaaaaaaaaaaaaaaaaaaaaaaaaaaaaaaaaaaaaaaaaaaaaaaaaaaaaaaaaaaaaaaaaaaaaaaaaaaaaaaaaaaaaaaaaaaaaaaaaaaaaaaaaaaaaaaaaaaaaaaaaaaaaaaaaaaaaaaaaaaaaaaaaaaaaaaaaaaaaaaaaaaaaaaaaaaaaaaaaaaaaaaaaaaaaaaaaaaaaaaaaaaaaaaaaaaaaaaaaaaaaaaaaaaaaaaaaaaaaaaaaaaaaaaaaaaaaaaaaaaaaaaaaaaaaaaaaaaaaaaaaaaaaaaaaaaaaaaaaaaaaaaaaaaaaaaaaaaaaaaaaaaaaaaaaaaaaaaaaaaaaaaaaaaaaaaaaaaaaaaaaaaaaaaaaaaaaaaaaaaaaaaaaaaaaaaaaaaaaaaaaaaaaaaaaaaaaaaaaaaaaaaaaaaaaaaaaaaaaaaaaaaaaaaaaaaaaaaaaaaaaaaaaaaaaaaaaaaaaaaaaaaaaaaaaaaaaaaaaaaaaaaaaaaaaaaaaaaaaaaaaaaaaaaaaaaaaaaaaaaaaaaaaaaaaaaaaaaaaaaaaaaaaaaaaaaaaaaaaaaaaaaaaaaaaaaaaaaaaaaaaaaaaaaaaaaaaaaaaaaaaaaaaaaaaaaaaaaaaaaaaaaaaaaaaaaaaaaaaaaaaaaaaaaaaaaaaaaaaaaaaaaaaaaaaaaaaaaaaaaaaaaaaaaaaaaaaaaaaaaaaaaaaaaaaaaaaaaaaaaaaaaaaaaaaaaaaaaaaaaaaaaaaaaaaaaaaaaaaaaaaaaaaaaaaaaaaaaaaaaaaaaaaaaaaaaaaaaaaaaaaaaaaaaaaaaaaaaaaaaaaaaaaaaaaaaaaaaaaaatatagtgtgcagttatatgtgattatatatagtgtgcagttatatgtgattatatatagtgtgcagttatatgtgattatatatagtgtgcagttatatgtgattatatatagtgtgcaattatatgtgattatatataatgtgtaatatgatacatagtaatatattatattatgtataattatatatgatacatagtaatatattatattatatataattatatataattatatttaatataattatatataatacatagtaacatattatattatatatagttatatataatatataattatatataatacatagtaatatattatatatagttatatataatatataattatatataatacatagtaatatattatatatagttatatataatatataattatatataatacatagtaatatattatattatatatagttatatataatatataattatatataatacatagtaatatattatattatatatagttatatataatatataattatatataatacgtattaatatataatatataattatatattaatatattattaatatataattatatattatatatattatcagaaaagcaaatttttgctttcttcattaccagacactggcaacattgtgaagtaggcatagttaatctctgacaattatgtagttatgacttcttcagttcgtgacaagtggaaaatagtatatcattattgtatttttattgttagtaaggctaagtatagttcttgtgttggttggcattcgtgtttctcctttagcaaaatggtatttattcatttagtcagctgacagatgtttagaagaactatctctgtgtcagaaactcctttctgtgcactgaagagct

SEQ ID NO: 468943 - DNA, 600 bp, Homo sapiens
aggagagcagcagtcataaaggaaaagaactaggacagatgtgcaatttgggggtataatacttggatataatttaaactgagatatcatgatgaacctgatactgtgtatttactgtgaacgtgatgagaagtatatgcactccttgataaaccaagtctggcctcattctggatacaactgcactttcctgaagtttagtcattttgtgtatgttcacagcagctctgggaatgtgatggctgacagccctcaactctcaaccctctctagcaacttctttcaactgaaggacatgaactctttctggagggaagcccacatccaattactggttgatgtgggagtacaaagacccaaccccaccaccaccacaattcaggaccactctgaagggccaccccagcctcaaaattcccccatgggaatatacaaagtgaattccaaattgattgtggcaataaatgtggaagataaaacaataaagctagaggaaataataagagattatcttcatgaccttggtgttagcaaagctttcataaataggatgcacttttgaaagtaccaatcataaagaaaagactgatggattggact

SEQ ID NO: 468944 - DNA, 678 bp, Homo sapiens
ataggaaactatactcttgcacaatgagatggtacaaacctgtacagcttgttactgtgctgaataccgtatgcaactgtaacacgacttcagacctctcttctgcaggtctgctggaatttgctgggggtccactccagaccctgtttgcctggttatcaccagctgaggctgtagaacagcaaagactgctgcttactccttcctctgaaagcttcgtcccagaggggcagagccagccggatctctcctgtatgaggtgtctgttgacccctgctgggacgtgtctccccgtcaggaggcacaggtgtcagggacccactttaggaggcagtctgccgggagatccactgctctcttcagagcctgtaggcagggaacgtttaagtctgctgaagatgcgtccacagcctccccttcccccaggagctcagtcccagggagagaggagttttatatataagcccctcgctgggcctgctgcctttctttcagagacgccctgctcagagaggaggaatctagagaggcagtctggctacagtagctttgccgagctgtggtgggctctgcccagtctgaattttccggcagctttgtttaaactgtgaggtggtttaaaccgcctactcaagcctcagttatagcagatgcccctcccctcacccagttaaagtg

SEQ ID NO: 468945 - DNA, 955 bp, Homo sapiens
tcactaggggaggcattcctgggaagtctactgcaggcattgttgtcataggagataacagctccatgtgttttattgcccctgaagatcttccagagggacaagatgtggaggtggaagacagtgatattgatgatcctctggaactgaatcctattaaaaaccacttgaactttgaagcagatatttctccagttgtgccttcagatgagaccccagccctgaccatccctttgattgcagtcttgggtgaaaccatgaagcagaggacccagataagccatgctcagataagcctgaccaacagaaactgggatagaatttcaacatatgaattttggggagacacaagccttcagtctataccacctactgtatctgaaggagctttctggaggagcctttatggttttccagataatgacatagaggcatttgaagacaggaagtccctagggcaaggtctgattcgctcaagtgcattggtgaccatcagagacagtacagcacagcggttgcaagcccaggcaatggaactaggattcaaatcccagtaccatttctcgggtgtgtgacctttggcaagttatttgttcctctgtgcctaattttcatcatctgaaaaatggaggttccattttctttgaatttctccttatactcgttatggaacatgcaataaggctatctgtcacctttattgagccatttgtcaaacaggtattgaacacttgtgctggggatattatgacgtattatggtgtctgccttctagtaacttatagtctaaaatgggaagaagaggagttgtaatagttatcacataattagactcttcacaatgtacataggaggggttgattagcaattgagcttggtggtcagagagagctttgtagaggggataatgatgatgcaaggaattgaagaagcagagagaggcagtgcaatgcat

SEQ ID NO: 468946 - DNA, 595 bp, Homo sapiens
ttcagggcagttaagcagcgggaatatggctttggtttctgttgtgattcagacatgctgggaggagagcctctgcataggagctggattagcctggtttgatcattctcatctggtgacaaagaagggagtgacagctttcttatgggcttgtcccactatggggcttgaaagctattttagaaggagcaaggatgaaagcaggaagacagataaagttattgcaataatacttgggaaaaaggatggtggctatgaccagggtgagaaacttctgctgatgtcaaatgaccacaaggatattaacaactggacttggagcctgtcggccgctgttggatacacctcctttaccaaggcggctttcttcactactgccactgaccttgcaaacagctccgacaaagaaaatgatgctaccactgagtggtttcagaccacattttgataattaattacttcgcatttgcagcaaatttttataagggaagtatattccattaaagttaaagatccatgaacactttgaaagccccctctttcatgtgcatccatgtgaagagaccaccaaacaggctttgtgtgagcaataaag

SEQ ID NO: 468947 - DNA, 1524 bp, Homo sapiens
tgctagcgtagctggcctgtatcccaggagtcaggaaacaatttctctgcagtcatccaggcatgcgcaatgctggccagacaagagatcagacatgtggaaggggcctggtagaaaactcaggtctagttagaaaccaaagaaataaagtctggaggaatccagaatatcagaggtctaaacacagagacactgagctcacgttgggatgccccacctacctctgtgtgcctgcccccagcatcaactcacctgctccctggagggttgtgtcccgcttacttcacaactgtgagccaactctggctctgggaacccagcaaacttctcgaccattcatgttctctaatgctgctcagtgccaaagagctttaataaaatgcccaaggtcacagagcaaatccattgtagaatcaggggtggaaccagctgttgtgaatttggagcccacatctcttttcagggtctcagactgcctctcagagccacaagagatactcttatcaatgttgtttggtgggtgtccagtttactgcagtcgatactgccaaatgaaatcttcaaatgccagaagtatgctgtcagacagtcttcacctttatgaacttcagcgttataagcagcagcagcacagacacagccaggaaatctatagccacagttaatgctgattgttaaaagtgtgtctgcttagaagttgtttttgcctgacaatgattgatgctaacattcattaaaacaacggtgacaaaaataacaaaaaccacaacccacctgaaacaaaatctaagctaccagaaaggtggtccatggcttctatagggaacctggaaatcatgtcccaattaacccaactaatctaatacaaaatgatagtcatgttgaatatgctgtttccaaacacttcttccttcctccttccttttttcttcctcttttccccagaatattatgatgccttgcccctcactctaccctccagtcattggtgttgggtcaaggcctgttgaagtaggagtatggagacctggatgaaaaataatttaatgtaaattgagagcatgcattctaacatttaaaatatactaactactcagggcaaatactgtgatggagttttagctaccttcaccctaattcttacactactcttacaaggcaaattttatagatgaggaaaccaaatctcagagaaggtaacttgctcatcatctagatggtatgtgattggatttcaaacttgggtctttctggctctaaatcttatcctttttctgccctactcctcaccttccctttaagaaatggtaagttacattaactagtagtagtggcttatttatttatctttaacaccaactattggtgtttggttggggttgcaataacaatcaatgtgaattggccaaaatgtgagcaaaccctgggtactgaaagcagaaaaagttaaaatagttaaaagtcagtattctgactctgctgtataggttttgtttttagattaccagttgctaatcataaagt

SEQ ID NO: 468948 - DNA, 1660 bp, Homo sapiens
ttgcttcaggccatctggatgcatacgtgcaggcttggactcagaggcctgacaaagtttctcactacaaaaatgataactgtcttagactcagccagcagagaggagaagcagctgttatgtcagagactacagctggagctcagagagaagctgcttgacgtcagaggcttcaggggtcctgggcatccactacaagatgctgccacagagtccgcatggagtttcctcctgctggtgcccaaaagtgctcaccccagcttccgcaccaactcatctctgtgctccctccctggaggggtgaaatgcaaggtggggccctcacacaggggccccactggggcactgcctactggagttatgagaagaggaccactgtcctacaggcctcagaatggtagaggcaccgacagcttgcaccatgtacctgaaaagctgcaggcactcaaagtcattcctggagagcagccttggggactgaaccctggaaagccacagtggcagaactgcccaaggccttctgagcccatcccttacaccactgttccctttatttgaatggataaaaaatttatatatacatagagagagagagagttaaaatcatgtaatatatattacatatgaaagtatataaatgtattatatattatatatgttatatgtactaataatataaataaaatgtatgtaatataatatatacttccttttataaaaagtattatataatacatattacatataatagtatattatatatatactgtattgaaaagatattaaaggaaggttattaattcttggtatatctggaacaaattcaaacaggtaagtctgtatttgaatttgagaaatggatgataattcaccaggacaacaaaagaaacattcatattacctttcaaaggaaaaatgtctattttagacaaattgtacttgttttcatatttttatacccagtaattgctgacaaagatgttcacataatgacacttaatctactaaaattatctgaactttagtataagccctttaactttgaattaaataatatattcagctgttaaaaatatttttaagcactgacaaatatatttatatctctcagtacagacagatttatacacttgtgattatgctatgattaatatagaggttatcatttcaaaatgaatttgtctgatctcttagcaagataaagtacttgtgctatgccttgagctatctgtattatttgaaaggtatatgcttttcaatttcaagtccatgaaatagcttttgtggaaatttaaattaatttatttatattgttttctattagattggctgaaatgagtagtacgattgcatttgactggctcaaattcattatttctgtgtgctgtttattatcagttgggtaggtccacttaccagtgtcatataaatgaaagtatgcaagctggtgattaaagtctgatggctagacaaggataaggcccatgctggaaagcaattcttccatatttttgccaaaataagattttgcccataggacagactgtcagaggtctgctacagggatctgatggtgctgttcagacccactgtggaaagcaatactgctctttggggaaaaataaatttttccagcccatacaaccttccaaggaaaacc

SEQ ID NO: 468949 - DNA, 480 bp, Homo sapiens
ttttcaggcttcaggctgcctttggcttgaagagaacagcatgataaagacccagcccatgattcaattacctcccactgggttcttcccattacacatgagaattgtgggagttacaattcaaggaagctcctcccctgtggttttacagggaatagcccctctcctggcagctttcaggactggtgttgagtgtctgcagcttttccagatgcacagtgtaagctgtctgttggtggatctaccattctgggattatcgggaagaaaaccgagaagcagctcccatggtggcagtggcttcctcagtggtactaatagctgggatagcctggggccggggtgccatccttaggaggcagctggctggggtcctccagcaacaagggcacattttggaactgctgggccgtgtagcgagtgaggaggatgccaacgccctcaatgagggccaacaggatgccccccatcatcgctgagc

SEQ ID NO: 468950 - DNA, 653 bp, Homo sapiens
ctgctccagtcacacctggaagctgtctatacatggccaaagcatgaggaaactcatcgtgggactcattttccttaaaatttggacttgtacaataaggacttcaactgaccttcctcagactgaggactgttcccaatgcatacatcaagttactgaggtagggcaagaggttaaaacagtctttctgttttatagttattatgaatttactggaactcaaaaagggacttgtttgtataatgccactcagtacaagaaggcccaaactagcaacttctgggtcttaaagagttccattattgggcaatattgcatagctagagaagggaaaaacttcaccgcccctgtgggaaagctcagttgcctaggacaagagctgtataacagcacagcaaagatagtcacctggtggggcctaaaccatactgaaaagaacccattcaaccatcatactggagttgagtgggcccttaacactctaatatcaatgttgtccttacaaaaatgggaaacttggacacagacacacacacacagggagactgccgtgtgaacatcaaggcaaatgtcaggcaatgtcttggcaagctgaagaacaccaaaatattgtcaggaaaccaccagcagtcaggggagagaacagattctta

SEQ ID NO: 468951 - DNA, 788 bp, Homo sapiens
gcagtcacacgatagggggggtcgacagtgttaatgacccacaaattgtgtttgcaccaagcctttgttattaaatctgtactaaataaatgcgagcgtctctggcttatgagggctgctgctgctactgctgcactcttgttggtggtgctaagcagcagtcccctagccgcgctgtcagcccttgcattggcctctcatcatgacaggagtgaaaaaccaaacttttccaatggccttcaaggcccttcacaatcaagctccccttgctgtagctacgctggtgtccttggtttaccgcccatctgcccatgccatgaggatactcaagttgctctgtggagagatccacatgacaaaaacctgagacccatcaacagccagcaagaaattcaggactgtacagttgtaagccactttgtaagcaaatccttctgctcctgtaaagccttcagacaacttcagccctagtggatacttgactgcaactttgtgggagaccttgagccagaactatccagcgaagccatttccagatacccaactttcagaaattgtacaagagaataaatatttatgtttttaacgccaaagttttaggatattctgttacccagcaacagatcatgtatagcacattagcatgtttagctacaacagttgtagtattttcacaaagctcttgaatactctgtccctctaaacgtttttttttttctttttgtgtttcactttaggttacttcttttgatctattttcaagatcagtaataatttccttgctgtga

SEQ ID NO: 468952 - DNA, 677 bp, Homo sapiens
atttaatctcctgagtacagccatgtctaagccaaatccaggactaaactttctatctgtagtattctgttatagcagcataaatgcactaaagacagtaattgatagaaagtggaagtgttactataaaaaatacttaaaaatgtgggagcagctttggaactgggtaatgggcagaggctggaagagttggagaggcaggctagaaaaagccaagattactataaatgaagctattccagaaaatgtgcaggaaaactggagttgtggctacctcaaagagccccagtttggacaattcttagtgatgccattggagattgaggttattagagacagcataattggtagctttgaggatcgaatcatagtatattggatgcaaatacctaatccaagactgaattcatatggaggagcactgctagtggatagtttcagctggagttgctgtagcttatattcgtgaacttaagatgtttacactataaagtattaaaataaatttggtttagttattctaaatcaataattaatttattctgtgcgctatgcactgctctaggcttttggcatacactgttgaatataactggccaagatcacttacttcgtggggtttacaagttcatatagagggacagagaaggagccttaagtttctaaatagtcaataa

SEQ ID NO: 468953 - DNA, 555 bp, Homo sapiens
gaaactggtccctggtgccaaaaagcatgaacttcccactgtataaccttttttctggtgtcctgctgctttcctgttctactacagctgttaaattaggttatctcactttggatgagatcgttaaagttgctgaagctctcattccccagcagaaactggagtgcaggggcactggaactagccagccactctggcgctggcaggggcgaattccactcactcagaccctctgtgcttcacccctctcaggatggggagtatgcagtatccaggaggaacaaggtcacacaaatgaattgaagacagtaaatgtgggggattttattgctgatgaaagtggacctcagagggaagggaagctgaaaaggggacagagcggttgggaggaacatggcccatttacatgtatatatatgaagatgaagcctttggaggaagaaattgtcaggcctctgagcccaagccaagccatcgcatcccctgtgacttgcatgtatacatccagatggcctgaagtaactgaagatccacaaaagaagtaaaaatagcctt

SEQ ID NO: 468954 - DNA, 602 bp, Homo sapiens
gtggagaacctttatgtctagcccagggattgccgggaggaaaggaattgcatcttccagttactctcttgacccagtgttctggctgttcagctcagacaggcccctgtttttcatctgcagaaattctgatgttcatgttgaggagttgtggttctaccccttatggaagcctgaacctggaggccactcctcctggctgcttcaagcgggattaggggcggcgtgggaacctagagtgggagagattaagctgaagggagatcttgtggggacagacttaccttccactgtgatagttacccgaagctcggcatctgtgatgggctacagggcttctgaggcgatcgggcagcatcagtcttcagctgctaagccgagaaggagtcagtcagagagccttgggccggagttccaggggctctgggagtggctgccagttttatttaatgtcgggagcagattgggtaataaaatgtatattgagaataagacggccttttgaccttttagggtctagggctgtaaagcgtctcagggttgctgccaaacgagccacgaactgggctgggtttttatatttgatgaaaaagagcctaaac

SEQ ID NO: 468955 - DNA, 669 bp, Homo sapiens
tcactaaagaccatgtacgaccaggaaatctgcctcttaaaggatagcagagcagtgatgctgacacctttgggagaagatggggaacctgagctgaaagtggtccctggccaagagacagcgctgaaatgtggacctccatcctacatctgcaaggaaatgaattctgccaacaccagtgaccttgaaagatgccctcagtttcagatgagaaccgcagccctggccaacaccctcatatcagttcaggaagaaaaccataaaacaagatgttggaggtggagcactggggagagaacacatgctgtagcagtgcagttgctgaaaaacaccgatgagagagcagtgaaagacgactcactgagtgatggcaggtggatttcacaatctatgacaagtctaataaactggccatggcttcccaaagaactaagcaaaggaggatgcacagaaaaacaattataaatttatattaatgggcacacaatgtgtacaaatgtaatttgtgaatatagcaatattaagggagagaaatagcaaaaaaaaaaaaaaaaaaaaaaaaaaaaaaaatcctaaaatttgtatggaactccgaaaaaccccaaatagccaaagtaatcttaaacaagaagagcaaagctggaggcatcacacttcctattttcaaac

SEQ ID NO: 468956 - DNA, 958 bp, Homo sapiens
tgctgacctaactgcagaactcgtgatgaagcaggagagattagcagacgccagaccacagggaccctctaaagacatttggatgccatatttaggacaaaggaaaggagaaaagaagaagaaggagaaggagaaggggaaagggaagaggaaggggaaggggaaggggaagacgaggaggaaggaggaggaggaagaagaagaggaagaggaagaagaagaagaggaggaagaagaagaagaggaggaggaagaagaagaggaagaagaagaaaaggaagaagaagaagaggaagaggaagaagaagaggaggaagaacaagaggaagaaaaagaagaagaggaagaagtggaatggaagaagaagagaaagaagaagaagaggaagaagaagaataggaagaagaagaggaagaacaagaggaagaagaagaagaactgctatacaaatacccaaaaatgtggaactggctttgaaactgggtaatgagtagaaggtggaagagtattgagctgaatgctagaaaaaaacctgtattgccataaacagactaataagggcaattctggttagggcttaggaaagttatagagaaagcctcaatcttcttagagaatatctgcatcattgtaaacagaatgttggtagaaatatggatgataaatgttattttgatcaggtctcagatggaaatacaaccacttaggtattcactattttaaactggaggaaaggtgattcttataaagtgacaaaaagtgcatcgtgttcatgtcctagttttttgtgaaggtaaacttgtgagtgataaaactcacaagatatttggctgaggaaacatctaagcacagcgttgaaagagtagcttggcttcccttgaatgtttatagtaaaatgcaagaaaagaaaaattatttaaagatggatttttttaattaataggaagacgatcttaac

SEQ ID NO: 468957 - DNA, 548 bp, Homo sapiens
agatgggggagggaggggcagtcattaaaacttaaagttccaaaatgatctcctttgactccatgtctcacatccagggcatgctgatgcaagaggtgggctcccatgagcttgggaagctctgcctctgtggcttagcagggtacagctcccgtcctggctgctttcatgggcttgcattgagtgtctgcagcttttccaggcccatggtacaagctgtcagtggacctaccattctggggtctggaagaccatggccctcttctcacagctccactaggcagtgtaccagtggggactctgtgtgggggctcccactgtacatttcacttccaactgccctagcagagattctccatgagggctctgcccttgcgtttttgatcaatcattctgacagcagtattaaagatggatttgaagagaataaaccttgagagggaatgaacaattagattctgcttaagctaaaagatactgaagacctaaactagtatattagttttctattgctgttaaaacaaattaccacaaacttagtgagtcat

SEQ ID NO: 468958 - DNA, 634 bp, Homo sapiens
aaagccacgagaattagacaccatggctctaatatccatcgcccaaaaaatcaacactgattggctaatggggtgcatgggcagacttgctgctggagtccttgggcaggttggactggtgcctagaaccacagggactggcctggtgcccgagtttatgggggtgggtatggaacctgggtctactggggcaggactggagtctgggtccacgtgggtgggcctggtgactgggtctgtgaggatggtcccggaacctaggtgcaggggtgggcttggtgcctcaaaccatgggtgcaggcctggagcctggggcagtggaggccagattggcactgtggcaggcttgagtcctgattctatggaggccggcctggtactatggtttactagagcaggcctagtgcttggatgtgcagcaaagttgaatgttcactctctttcctccatgtggagagtacctctcttcatgctgtgcttcctgggattggtggaaagccataaaaaggaataaaataatatattttgcagcaacttggatagagctggagaccgttattctaagtgaagtaactcaggaatggacaaccaaatatcatgtattctcacttacaagtgagagctaatctatgag

SEQ ID NO: 468959 - DNA, 765 bp, Homo sapiens
gttaaaggtaaaactctcttctctactcctccagcaaagctgcaatcctcttaggccaatgatgattaagaacatccacgtgctttcacttccatgccatgctatctctgacagatctaacctccccagtcatgttagactaactggggggcctgttcttctctgtaagacctctgaacttgaccacatccatctggttcaggtgatgtgtctgaagacccaacccaggacccaaggctgtgaagctcagtgctcaattctaccaccttgtccatcagacatctgccccagaaagaagcatgtcctggctggagatggaagtggaaccatgaaagggttggactctatgcccaatccagctccctccatcctccaaaatctcagcaaacacgggccatttcaacaccctattagggtagcttacagtcctgagctcttgtcatatcttgtttcctctggcagtgttcccctacccccacctgtttgttctgtggttcctgtgagtcagtaaatgcacttcatctctgctgaatatccattacctgtcagatgttctgctgagtatttctaggcatggagaaagaataacttcattgaacttttttaaacttatttttgatgttttctcttgattttattttaagttgacatgactggggtattataatctctacagcatgtataacctcttaagaacacctcttaagtcttaccctctgtcttttgcctgttgccaaattttcacgacatctccagttataacct

SEQ ID NO: 468960 - DNA, 902 bp, Homo sapiens
tgtttcagaggatggaaaccccaagccttggcagcttccatgtgttgttgagcctgtgggtgcacagaggtcaagaactgaggtttgggaacctccacctaggtttcagaagatgtatggaaacacctggatgtccaggcagaagtttgctgcaggggcagagccctcttggacaacctctgctggggcagtgtggaacagaaatgtgggatcagagcacccacacagagttcctaatggggcattgcctactggagcttgcattgggaagtcatttgaagggaattgagcaggggtctcatatgatcttgttttcagtggaaagattattgtgtcagcttcatgaattgcagatgcggcaaggtagggagaaaatcacagctattgtagcaagatattcccactttgtggatgaggaacctggggctctgaggaattaaggaacttgccaaagaccataaaactcctaagtgacagagccaggattctgccagctgtctggttgcccagtggagtctctgtccatcttgtcaccagcccccgcactgtgtacaggaatggaatcagcattcattgctataaactgcagtaaggtcaaggaggcagaatttgctgcaaggaagtaaagagtcccttctacctttgccagtgctacttaccagttaaaaaaagacatcgttttttgtgatccatactcctgaaggccaaaagcacccagtggacagacgatggctcttacgcctccaatgccaaggcaaatggtcagcagtgctacataaaacagcctgtgctgctctgtttttgctggatggagccttctttgccacaaacagagttgagaaagctggggacagaggagtgtgagtggaaggagaggggacctaaagtgacaaaagaaggtc

SEQ ID NO: 468961 - DNA, 539 bp, Homo sapiens
gtctgaggtacaaggcataggccatgaccttgggtgtgagtggagtggaagctgaggtagattggagatcagacattggaggtcaaggaactggacaaccaagattgaaaggatggaaggacccaggacctacgagtcagcattgtactaagcactttacatgtagtattgcagtctctgtaatatcatacagatttgttccaagcaatgtcagaggaacctccatgaattttctgacactgttcaatggatttggctgtttcacaggggcactgctggtgaagttggtatatctcatctcagatggtaaaaatagaattcatgctccaagaagaattaatgtcatgttaattctgaagcttcacatactctgtgcaaactcctcttacactagtcagagaaacatggtgataaaaaggtataatcgcatgacatgcaaagtgctgatgtgaaatgaaaaggacagaaatacaattgggatattaattcaagaggggaaaaaatagcactgtttgaataggcttagaaggatggtttag

SEQ ID NO: 468962 - DNA, 1082 bp, Homo sapiens
tggctttgaccaaaatgctgatagttatatggacaatgaagtccaggctgaggtggtctcagatggagatgaggaacttgttggaaactggagtaaagggcactcttgctatgctttagcaaagagactggcaggattttgcccctactctagagatctgtggaacttagaccttgagagggatgatttaagtaacaaggagccaaatgttaaccaacaagactatggagaaaatgtctccagggcaccttcacagcagcctctcccatcacaggcccagaggcgtaggaaggaaaaatggtttcctggactgtgcccaggtcccccctgctctgtgcaacttcaggacatggtgtcctgtgtcccagtagattcagctccagccatggctaaaaggggccaaggtacagctcgggccattgcttcagagggtgcaagacccaagccttggcagcttccacgttgtgttgagcctgtgggtgaacagaagtcaagaactgagaagtttgctgcaggggcagagccctcatggagaacctctgctggggcagcgtggaagggaaatgtggagttggagcctgccacaaagagttcccactggagcactactaagtggagccatgaaaagagggccactgtcctccagaccccagaatggtagatccactgacagattgcactatgcacccagaaaagctgaagacactcgatgccagcccatgaaagcagacaggaggggggctgtaccctgcaaagtcacaggggcagagctgcccaaggccatggaaaacttatttgtgcttcgaacactaaagatttattgagacttaggaaaaacttttcttaagagtcatgggtccacaggttaattaacggcgattgtgagagtctgtgctatgcaatgatttcagtaatggtcataacacgaacgatgactttcattttgaaagcaaaaattgcaggcgagatgccttacatttcactacctcagtgaaggtattcagacgtactaataactaccatttattaaggccttaatacatgacaagcactgtattagaacttttaacaaatagtgtact

SEQ ID NO: 468963 - DNA, 1006 bp, Homo sapiens
gacagggcgctgattggtccccgccagactcaggagcccagctggcttcacccagtggatcccgcaccagggctgcaggtggagctgcctgccagtcccgcgccctgcgcccgcactcttcagcccttgggtggtctatgggactgggcgccgtggagcagggggcggtgctcatcagggaggctcgggccgcacatgagcccatggagcgggtgggaggctcaggcatggcgggctgcaggtcccgagccctgccccgcgagaaggcagctaaggcccggcgagaaaccgagggcagcgccggtgggctggcactgctggggaacccagtacaccctcctggcccgggtgctaagcccctcattgcccggggccggcaggaccggccggctgctccgagtgcggggcccgccaaacccccgcccacccggaactccagctggcccgcaagcgccgcgcgcagccccggttcccgctcacgcctctccctccactcctccctgcaagctgagggagccggctctggccttggccagcccagaaagcggctcccacagtgcggcggtgggctgaagggctcctcaagtgccaccaaagtgggagcccaggcagaggaggcgccgagagcgagccagggctgaggatgcctgaaatcagtgcagatcccagagagacctgccatattaacagagattctctatagatgcaaatttctcccacaaaagacagctttgcaaggccatttcaaaatatgccaaagaaatacattttgggctaaagcatttttatttccttcagggtctgctatttgttatatgatgttatatcagaatcaggtttgaatttggtatcttactgccacaaagagtgtgttttgtcaggcttatgatctctaatgttaatgctgcctagttatgcctaaaccttagaagggagggggtttgagatgtgtccaacctcccttcctttcacgggtgggaattcagtttttcaggtatctctgaga

SEQ ID NO: 468964 - DNA, 1058 bp, Homo sapiens
aaagtatttttaattagtgtctctctctcaatctctcgctctctctctctctctgctgagccacctggaacttggggtatggtgatgcaagcacccctgtggccacagccattgaaactgtgctctgtcagacttgaagccagcacagcactgggtcttgccccacacacactcataggaatcacgggaattctgggagctacagtccaagatgagatttgggtggggacacagccaaatcatatcaccatgaatcaaggactaaggattaaagacttaaatataaaacctaaatccataaaaaccctggaagaaaacctaggaaataccactctggacatagaactagacaaagatttcctgatgaagatgccaaaaacaattgcaacaaaaccaaaaattgacaaacgggacctaattaaactaaagagcttctgcacagccaaaaaacagaacaaaaacaaaaacaaaaaaaaaaacaaaaaaaaaaccatcaacagagtaaacagacaacctacagaatgggagaaaatatttgcaaagtatgcatctgacaaaggtctaatcccaaatctataaaaaacttttaaaaaattacaagcaaaaaaaccaaacaaccccattaaaaatgaggaacataacatgaataaaatgattcatttcaaaaagatgattcatttcataaagcacttagtctagtgtctaaaagcctaagtgatcaatcaatgtagccattattactactcagtaatttttaaaatgagataaatgtgcaagtactgatatgttaagctaaaacaataaacaaagggaagaataatatgtgatcttcacttcatcctatataccaccattagaagaatctttgaacacaattattctcaaattattcctagcccaaaaactcaaatactttctaaataaattttattcaaatcaaaactctctagcatagcgctgtatatcccaacatgccaatttcaccttctttatttcattttccattcaactgtatgccaaggctctactttgagctcatctgcttgttagatcagctt

SEQ ID NO: 468965 - DNA, 761 bp, Homo sapiens
ctctccaggcgcggtggcgtttggggaggagtgaagtcctgtcctccattttgttagtaacctgattatggatggggcattatcacccaaaaaggaaagagatactatggtatgcagttacagggagccggagcaagagcaagacaaagaaattccctcatgtcttcaatgcagagccggcatttagacctctactccaagcagggcccacaaatctctggcagccgtgcttcttttctgtcccatggcaggcagcaccaagagaaggcttctgcaaagccgagagctacttttacccatggatcaagagaggatcagcaggtcaagaaatagtagacaaacacaagatagtgaaagctgggtccaggatggtcaccgccttcttgtccagtggtgctgtcaatgcactggatataccagcatttattatgaagtttagtgagggcagaggagcaatgtggaatcctgtattggcaaaagctaattttaaagaggtgaaacattgaattaattcacctttagtgggagcaacaatcagtatatcatccatataatgaagaatgtaattatttgtaaaagtctgtcagataggttgtaacacagtactgacaaaccactgacaaatagtaggactgttaatcattccttgaggtaaaactttccattgatatctagttgcaggagctgaattgctaatggaaggtatagtgaaagcaaatttttcacagtctgacttgtctaaaggaatatgaaaaaagcag

SEQ ID NO: 468966 - DNA, 676 bp, Homo sapiens
ggaggagctatttagagccttatagcaagatggttaagaacataggctctggaatcagactgcctagtgggaagcactatgattggcaccatgtgttatctatcaccatcaccatcatcatcatccatcaccaccactatcaccaccatcatcatcaccatcaccgtcatctccatcaccatcatcacattaccatcaccaccaccgccatcgctatcactaccattatcaccatcaccatcatcaccattgctatcatcaacatcatcatcaccatcaccaccaccatcatcaccatcacgatcattaccatcactatcaccaccatcatcaccattaccatcatcatgaccatcaccaccatcaccatcactatcactaccattattatcatcaccatcattaccctcactatcaccatcataccaccatcaccatcagcaccatcatcatcatcaccatcatcaccatcactgtcacatcatcataccatcaccatcatcaccatcaccataataatcagcaccatcaccttcacccatcaccatcaccaccatcttcaccaccaccaccatcatcataccatcaccattttcatcaccaccaccatcatcaccattgccatcatcatcaccaccatgttacgtaagcactttgcctacattaactgatttaa

SEQ ID NO: 468967 - DNA, 641 bp, Homo sapiens
ggtcccgtccctgcgtggcgtcctgctgtgcgcccacagtgcgagtattccccagattgttcggggatgccaggtgggtcatcagggcagaacccccactcggtgtgtgcgtcggaggagctgcagcccggggcagtgtgtgtgttaatatatgggacagagccctttagagttgtcatggctctgtctgctcagggggactttctcagccatttctgggctggtttggagaaccctctgttcttccactcacctcatttcaatgctggcccttgttggcaacagcaagcttctgccccacaccaaaggaaacagagtgttaccccattaatacgtttttgccaatctcctgtgtggagctctgcaaagatagtaactggcagccagatatggaagcctcagagctatttctggccatcactgctgctccttatacaccatgcaactttctgctcgccagcacgtacacaacaatctgagatgcgaaaggcacagaagcttgtcttaatctgagcaaatcaacagctttcagaagctgcaaggaaatgaagcatcagagaaagtgaaaattgtccctaacgatagttcagaaaatagggctgattaggcaaactatccctgagtttcagtggatcccagac

SEQ ID NO: 468968 - DNA, 925 bp, Homo sapiens
ggcttaacaaacggcacaccaggagattatatcccacacatggctcagagggtcctacacccacggagtctcactcattgctagcacagcagtctgagatcaaactgcagggtggcagaaaagctggggaagggacacccaccattgccaaggcttgagtaggtaaacaaagcatcccagaagcttgaactgggtggagcccaccacagctcaaggaggcctgcctgcctctgtaagctccacctctggaggcagggcacagacaaacaaaaggcagcagtaacttctgtagacttaaatgtccctgtctcacagctttgaagagagtagtcgttctcccagcattcagcttgagatctgagaacaggcagactgcctcctcaagtgggtccctgaaccccgagtaacctaactgggaggcaccccccagtaggggcggactgacacctcacatggccgggtattcctctgagacaaaacttccagaggaaaaatcaggcagcaacatttgtggttcaccaatatccactgttctgcagtcactgctgctgatacccaggaaagcagggtctggaatggacctccagcaaactccaacagacctgaagctaagggtcctgactgttagaaggaaaactaacaaacagaaaggacattcactccaaaaacccatctgtacatcaccatcattaaagaccaaagcaatggaacaaagctggatggagaatgactttgacgagttgagagaagaagtcttcagacgatcaaactactctgaggtaaaggaggaagttcaaacaagtggcaaagaggttaagaacgttgaaaaaaaattagatgaatggctaactagagtaactaacgcggagaagtccttaaaggacctgatggagctgaaaaccaaggctcagaactgagtgatgaa

SEQ ID NO: 468969 - DNA, 1209 bp, Homo sapiens
agcgcctggagctacccatcctcctgcagcccacgttcctagcacagtgactggaccccatggctggccagtccttgggacccccgacaccatgcatgagtgcctgcagaagcagctgtagcccagtcaggcagtattttgggtccctgggtggtgatcacaggtgcactgtgcccccgctgctggagcagaacaaaaaaggcaaggaaaaggcaatcttcccccccaacactccccccacacatagacaccccccgacccctgtgtcctggcctcctggagctgggacattcttcttcctttgcacatcagaactccaggtttgcctgtctttggactccaggacttacaccaacatcacccactacctgggattctcaggcctttggcctcagactgagaattacaccatcagcttccccagtcctgaggcttttggccttggactaagccatgatacagcatatcccagggcctctagcttacagatggcctgtcatgggacctctcagcctctataattgtatgacccaatttccataataaatcacctcctatctatctatctcctcttagttctgcctcttagaagaacctaatacatgtgggtttaattacacatgtctatgctttatgtaatattattaagttgtttacttttcattttgtgtattttgctttttgtgttttatactttataattgagatggttaaatttaataactataattagtatcttaatgaagggactatgcatcagatatgctaggcataattcattttcaataaaccagaaaatgaatctgatatgaaattacctagaatgccaaatagactccacaaccaataaaaaatatttaaaataatttaaaaatcatggagaaattgtaaacctctgggtacatgaagtatataacctttgagctgagttcattcccttgcctctgggccattgctcatttgaccatcacctgtattttcactacactacatggtcatttaaagttctgggcttgttttaatttgtttgtttaaaagttgttctagggtttaattttgcaagtattcaagcctgaaccttgtcttttaccctacttatttaacatatttttgtcagaccaaaattatactgatttttcccagtatttcctgattaaaaagcaaagtgaagagtaaaacccaaacatttttcctagaaatctagggggc

SEQ ID NO: 468970 - DNA, 625 bp, Homo sapiens
gacttgcctgatttgcaactcaatcagcagtgtgcctcatcgtgccaatatgtttcttgttggaattcggtattataaaaccacttccctgcagatagccacatttttctttatcagatttaggaaccctaatggagctacttcagcctctacaggagtcaaattctgccaaacacacgggctagtttcaaaattgagcatgcaaaatggagcatttgaaaatgaagttaaactaatggacaaatctgtcctgggagccctctgcggaacaagcagacaccgctcgcgatccaatgccagagaatcaaacgcttgccgactactgccgcgaccttggcccggaatctccttgccttcatgtaaactttcaagttggcttgtcatttcaaaaattgactcacagccgacttggaactggcataggaagtaagggcagtcttgcaggactgagcccttcttctgaggagtttaggctaagctcagggagtagtgtcagaatttatttgaattgtgggacacctacttggtgtccagacagttggtgtgggaaaacaacaacaacaacaatagcagcaacatacatttgatgtcagcagtgaagtggggtgagtgttgagagtaaagt

SEQ ID NO: 468971 - DNA, 739 bp, Homo sapiens
cggcctctgcctctggtgcctctctaccctcgaaaccatctttagaatattatatccatctctccacttgatcagcaggacatggccctggcacaggctgggctgctggggtgcacgtcctgcttgatactacccaacaccaggccatgggggcttcgaagtctggcggagtcaaaggaatgagaaaagacaggttaagagtacataagttgggtccagggggccaatgctggtatggaagctgcaaaggcctcgagctctgggagcccacactatttattggtgatcaaacaaagaagcaggtggtgaggacaggccacgaggggctttatgtcatgagccctggattccatcaaagccacgagaggttttatgctctgggcttagatttgtggtgcggcagggcagccttccaccctttggcacagagcttggcgttccaaaggccacgaggagttttagaccctggaccctggacattttccaagactcttttatattatgacagacaagccagttctgccttagttcttctaccaacaagcatatatacatgaaggccagcaataaggactggaggtatgcactaggcaggcagacacatgagcagggctcttaccatagcttggatatcagatccctgagttattttggtgctaagaacaatcttgtcctatcagggtgtccctcagtgaccttaccttctaggtcttcatataggcaactaagtgaattatat

SEQ ID NO: 468972 - DNA, 681 bp, Homo sapiens
ccagcagacaatgacatttaattctgaattcaaaggtacctcttttttgctggagtccttggctggactggcctggtgcttggagcttgagtcctctgaagcgggactggagcttgaatccatgtggttgatcagtgtggagcttggcactactggtgctagtctggtgcctaaggccttgggatcagcatggagcctggggccatgggggctggcctggcactggggcagcttgaaacctggccagcatggtgcatggggccatggggacctagagccttggttcaaggacaaagctggtgctgggacaggcttataccctgggtccatgtcgagggggcggtcacttagtgacagggttcatgagggcaggcctggtgctggggtccatggcaaagatgagtgctcacttcactctccttcccccacacagaaggtatctcccttcactctgtgagcatgggcttagggaaggggtaatgtgagaaactgtctttcctactctcttcagagcatgttttcttatttctgtgctctgctctggtgctgtggtctgtcacctgcattccttagctcttgtgaaggtgtttctgagcatgaatagttgtttgaatttacctttctatgagggttgagcattggaaactcctattccatcatcctgctgatgttactctggaa

SEQ ID NO: 468973 - DNA, 752 bp, Homo sapiens
ccttgcaacactaggttgcaaaagcctggttacttataaatgggtaaagacaatgtggtgtgtatatatctgcaatggaatattattcagctctaaaaaagaaggaaatcctgtcatttgcagtaacatcatgaacttggagaatattatcctaagtgaaataggccagacacagaaagacaagtactgcatgatctcatttatacatggcacaattcttaaatgcagggatcttgtccacaacatagtgctagtacgaatgaatgtgatccttagaattatgaataaaccaaagcacacgtccatttggttgacgaagcatctaccatgtatgattgtaccaagcaacaccacttggattgaagcctgtctctactacttaactattaggttggtgcaaaattatggttttgcagttaaaagtaatggcctctgctcttcatcttcagtcggggataataatacattcctcagaggctcagctgtgaggtttaaatgagataactagaagtgtgtctggctagcactgtaaatgctcgatagtgctggttacttttattataggtcagctctcgtaggatatttacttctctttcagtgcatgtgttctggtttttattatagatttatctcattattgcttaatacctgtcaccccaactagactatatgatgcatgaggatgttgacctatttgtctcattcactactgtaaacctcatcaactagcacatagcaggtactcaagaaac

SEQ ID NO: 468974 - DNA, 591 bp, Homo sapiens
ctgctggtttatgtgtccctggacccaaggggtggccacagggcagcagtttgctggggatgtgaaggagcttgcatgtgcaggatggcatatccacacaaatgcagttccccgcagccatttgagaatgttaaagaggatgtcagagattcccagggcttcatgcaaggtagcagagggctaaaggaaggggcaggggacatgaagatgtccaaagttgataagagggatgcccgacaagagacacaagaaggaagagcagcagctcacaatccccttggtcgagttgggacagcccgggagtttgaaatggacattcagaaccataggcttaaactagaccgaaatgagtttcaattgcctgatgtaaacctctatccattgtcactgtatctccacaacccatctgacaccagtggactgctaattgcattactttgcttgtcctctggccacagaggtggacatgtagttaagccttggccaaacatgactccccatctccttgtttacaacaattagtgtattgcgcagactaagatcaaagcaggccaatcagagtgccatcaagtgaattaatctatggttgct

SEQ ID NO: 468975 - DNA, 752 bp, Homo sapiens
gatttgtgcgaagcgctggtttaaagtagactggattcacactgcaaggtttgcatcctggtcctgatgcttattagctgtgtggaggcagatcatttaactgctccatgcctcagcttctttctttatcaaatggcaataattttaggacttaccccaccggttcagaaaccaggccccttgccccacatctgtgtcctctcctcatgccggtatattgtgggctatggggatggtgtcgccattgtggggttgaaccacttggcctacacagctgtacacagcacatctgccctctatgtgttcagggcatcaggatcctgctgccttcatgcaggctatggagggagagggaggcttgccgtctacactcacagaatcttaatatctttggattttgcttcaggtcagaagctgattcagtataggctccaggagctggcatttgaatacgtaccccaaaggcttctcctgaagaacattcactctgagaaacaccgccgtataatgtagattaaggtgtatacccaagataaatgaaaacatatgtccacaaaaaacccactttgtacacaaatgtttatcgcaacattattcacaatagtaaaacaacccaaatgcacaactgaagaatggataatgaaatgaggtatcttcatgcaatggaatatttttcagcaataaagagaaatgaaatacgatacatactacaaaatggatgaaacttgaaaacttgaggttaagtgaaagaa

SEQ ID NO: 468976 - DNA, 735 bp, Homo sapiens
ataagggggcggcttgtttctcattggacaatcttttttaaagtgtccttggtttgcgggtcaaattggtcccagtggcttaggatgcatttcaagggtgggcctgttgatgcctgagtgtttcccatctgaaagaaaaaaacgcccatggttttggtttgtttggtttctccccctgactaagaacccgcaacagtccctggaccctgctgatcggaatagttgcactcaccgatgaagcagcagaaacacctcttgcccaagaacccgcaacggtccctggaccctgctgatcggaatagacagaatagcaagcgaaaggggtccaatggtgctcaccacttggcgatagtcaatagtccctttgtggttgccaaaatgtgtctggaattggttccttctggtgggttcttggtctcgctgacttcaagaatgaagccgcggaacctcacagttcgtggtctcactgacttcaggaatgaagccgcagaccctcttgctagacacagagccctgattggtgcgttttcacagagtgctgactggtgcgtttacaaacctttatctagacagaaaagttctccaagtccccactcgacccaggaagtccagctggcttcacctctcatccccccttcagagaaccaattgttagacattcatcagcatattactgtcttaatcactattgataactaatttgtccctgaaacaagacaagtattttagtacaga

SEQ ID NO: 468977 - DNA, 576 bp, Homo sapiens
aggcacatagagggtaagtacgcatgaccttgcctatgaattgctgcaaatgttttcacagcccgtctttcaaaacaaaagactataatttcatcaaagctgtttgctttgcccttggtcggcttctcagaataatcacctctacagtctgcaacgtgtcttggaaatgtgggctttcccggggttgtaaagcgttacagctactgctagaaggaggcttttcagggcatgccattctgcacatggtttctgagacttttaaatcggagagggagctcaaagaccacgaaatcatacctgttaactttacaggtgaggaaaggaaggctcagaggcactgtggggagccgctgaaagattttaaacagggatgggccaacggggctctctgtaagtctctcctgttcaattcaatgattaaatctatgggtgatacaaagcaagagttgaagagactgctagagcggaaaattggtggagaggagacaaaccacaactcacgtaacagctcagtgtttgtggacaagttctaatatggctttaaatatctgagaatgttaagacaacagttttatg

SEQ ID NO: 468978 - DNA, 957 bp, Homo sapiens
gcagttgctagtgggagtcacaaactatacttatggtcaaaaagaattcacaaagtgctgatgtattatggaaacaggatgtggcgtccccaagccctggttgcagatgaggagatactttttatcgatgagcaaagaaagtggtttcttgagatgaagtctgtctctggtgaagatgctatgaacattactgaaatgacaacaaaaaatttagaatattacataaacttagttgataaagtaacagcagggtttgataggattgactcccattttgaaagttatactgtgggaccatcagccaaatgggaggtccagtgctcagaaggacctaacaattccactggaggaaatgctcaaagttggggagaactatcattgggcccctgctggtaccttagctccaagttcagccaattccttcagggctctgagtcttctctgaggcctgatgttaggtgccaaattattgtaagtgaaagagccaaactctgtaaattatttgaagagatttattctgagccaaatgagtgaccaatggcccatgacacagccctcaggagatcctgagaacatgtgcccaaagtggttgggctacaacttggttttatacatttcagggagacataagacatcaatcaatacatgtaagatgtacattgtttcagccacaaaggcgggacaactgaaagcaggtatggggggtgagaggacttccaggtcataggcagattcaaagattttctgattggcaattgattattgtctaaagacctggtattgatagaaaggaatgtctgggttatgataaggagttgtggagaccaggttgtaaactcatttgcatttgcaaactgaaattagtgtttcaagttagaattccatctaccctggttgcagaagacttaagatgtttttatgccctcagccttttcttcatctgtaaatgacggacca

SEQ ID NO: 468979 - DNA, 508 bp, Homo sapiens
ggcctaaaggtttctcttacctagtgaactgtaacctaactggatgtgtgaacagactgtggaacagaaaccagagtctttggtggcagctcttgggccagaccctaatgctcctgatgggtgctgtagtatgcacgggcagcagagagctgtggagtttgacttcctgcctggaatcaggtcctttctaaggcctgagagtgaaaagggagctgcttggagagcccaggctgacccattcatggagggagccagggaagtggggcagaattggcatgccgtctcattcgttttgaaagaatattgtctatctgtctcccaagagaaatcttgtcagctgatcctggttagaggccatcccagacctaagggcaggaatatggtggccataaagaggatggagaaagttgctagactgaatcaactgtagactccagctccttatgaaaagtggaaagtacatgctgggttacaagctgaccctgaagatgatcagacaaggcaaaac

SEQ ID NO: 468980 - DNA, 731 bp, Homo sapiens
gaaaagtatggctggatattaggtacgggccgcagggtgcccataacttgcgctctttctgctgctcccagctcttggatacagccgatgacgccatgggtttcagagatctgaaaagcccggctagcctccaggtgctcaacgattacctggtggacaagagctacatcgaggtctatgaagcagtgtccggcccaccgcctgctgacttgtgtcatgccctatgttggtataatcagatcaagtcttatgaaaaggaaaaggccagcctgccaggagtgaagaaagctgtgggcaggtatggtcctgctaaggtggaagacactacaggaagtggagctacaaatagtaaagatgatgatgaaattgatctccttggatctgatgaggaggaaagtgaagaagcaaagagaagcattcaagcagatggcttagtctggggctcatctaaactagttccagtgggatacagatttaagaaacttcaaatacagtgtgtggttgaagatgataaatttggaacagatatgctggaggagcagatcgctgcttttcaggattatgtatagcccatggatgtggctgctttcaacaagatctaaattccattctggatcattgcacttaaataaaagcttgaaagattaaaaaaaatgtagagttagacaagctggaaatttgatctggttttagtcacttatgctgattgggtgactttgggcaaattcatc

SEQ ID NO: 468981 - DNA, 974 bp, Homo sapiens
tttctcatcagttacaaggtcctttcctatccttggaagccttaagtgagataatgcatgtaataattacatacatcttctttcctgagacatgttctcacagttcagttcctgctgttacggctttgtctgatgatgatgatgatgatgataacgatgatggttatgatgatagcaagcctttttgtgcaagcttagaaaaactccaggccgttttgtaccagttagaaaaaaactccctttccacacctctcctaaacacagtcaagactggactggaagttgctgtgggtgagtcagtgagtgagtggcaagtgaatgggaaggtcttggacatcactgcacactcctttatgtttgtatacccaagcacattgacgagtacctgggacatagtcaatgctcaatcaatgttaattgaacaaattgatatggattggtgtgcttgggactatagatttatctttgagactagttcctgaatgggagctagataagaaatgtgtgatatggaaatgaagtaagaaaaatgtgttgttttcccaattctgtttttcccatttgtctcttctgacattcttttcttccaaataagcaagattttattgcatttttctgattgcagaagcaatacattcgaagcatagtatttatatggactctggcatcaggcttgagttcaaattttgctatgtgtatcaattaataagcaaatagagagggctgtgtgcttgcacacagtgcttaacacctttatgtcttagttttctcatctgaaaagtggatggaagctattataatagtgcttacttctcaagattgttttcaagttagactgtgcatgtcagtgcacagtacagactttggttatggacttcttacaccatgcatgttagtgcacagtctaacttcaagtgcttggcacagtgattgctcaacaaatacttgcagctcttattgtgaagttcagtgcc

SEQ ID NO: 468982 - DNA, 574 bp, Homo sapiens
tttgaagagctcccctttttcccagggacccacagaactggcaagctgtggggaagcagggggatgcgcgtgtctgtatgtccagaactgtcatgtcttctcttgggtgccaccctcccaaatctcaaggtattcaccaacctggaagctcctccctcttcctataaggccaccaatcctgtcggcttagggctccactctgatgacctccttaaacctgaattacctcctaaaggccctgcctccaaatacagcccaagcttggaagtcccaagatgtccctgctactatatcctattggtcaaagcagtcacagggccagcccagagaaggggtggacatgttccacctcttgatgtgagaatggcatgcacatacagggtgaaggggaattgctgggggccatctttggaggatagcaaccatagaagcttcctggaagttgccataggccacccctgcttacctcccatcagccagaactaagtcatatggccatacttagctacaagggagactgggagatatagtttttaaactgagcaaccatatgcctacataaaaactgtgggtt

SEQ ID NO: 468983 - DNA, 661 bp, Homo sapiens
gagttaatgggtgcagcacaccaacatggcacatgtatacatatgtaacaaacctgcacaagaagacaggaagatgagggaaactttggaacttcttagagattggttaaatggttgtgaccaaaatactgatagaaatattgacaatgaagggcaggctgacaaagtctcagatgagaaagttactggtaactggagcaaaggtcacccttgttatgccttgacaaagagctcggctgtattatgtttgggtcctagggatctgtggaattttgaacttagaagtgatgacctaggatatctggcagaagaaatttctaaacagcaaagtgttcaagatgtgacctggctgcttctaacagcctataatcagtcatgggagaaaccatcaaacagctttccaaagatggatttttacactcccttttacactcccatcagcaatgtatgagagttccaatgtccctatatcatcaccaacaccatcaattgtaattgtcatattaaaacattttagttattctaatggttatattgatacttcattgtggttttttaattttaacattcaaaattgtttcatttattattttactgccatacatgattaaatttcagtttaaattattcacttcctgtaatttttaaagataaacctttt

SEQ ID NO: 468984 - DNA, 937 bp, Homo sapiens
cagcagtgggctgaagggctcctcaagcgccgccagagtgggcgctgaggacgaggaggtgccaagagcgagcgagggctgcgagggctgccagcacgctctcacctctcaatggttgaggccttgacacatccacctctgtcccctcctcccagccttttgggttccagcagcagccgctccccacgatgctctctgctggtcaactgagatcagaaacatgcaaaatgctcagaagtaagcgaagaatcagggcagttgagttgctgcaggcagcaaaacccactcttggcaggaaggggtgtggcagcctggccttgctgtgcaagcccccgcgtgtggcagcgaacactcaggagcaatacctgttggagaaagtctatgctgaggagatgtcagagccacaggacagtcctgaaaatcaggtgccactcagaggcaattgccatccactaccagaagagggcactgtagtgcagcggcccgggagggagcagctgcagccgatgaagactattcctgcatccgtggctgtggccctcttacccgctgtcctggtattacccttggacttgtttctggagctggtgggggcaggatagcctcgtggctagaaacttaggctctgcagctagaccacctgggtgtgtgacttggggcaaagcacttaaacttattgcctcagttcctcacctggaaaatgaggtgattataatagtacctacctcatagagtattcgtgagaagtaaatctataaagtgcttacagcattattatcagtccagtcttaaacatgtttgcctctctcctattcatgaaaacaaaaaagcaaaaaaacaaaaaaaacaacaaaaaaagaaaagctccagtgccatctcaccccttaccttccctccacagacaaaccttccaaggagtcacctgtccttgtctgct

SEQ ID NO: 468985 - DNA, 1239 bp, Homo sapiens
ggagccagcgcctgggcctggaaccgggccgcagtcccacagcttcgacaaccacctccctaccatggacccccacaaagtgaacgagctttgggcctttgtgaaaatgtgtaagcaggatccgagcattctgcacaccgaggaaatgcatttcctgagggagtgggtggagagcacggtgggtaaagtaccacctgctactcagaaagctaaatcagaagaaaataccaaggaagaaaaacctgatagtaagagggtggaggaagacttaaaggcagacgaacaatcaagtgagaaaagtgatctagaaattgataaagaagagataatggaggagatgatggatcaggcaaatgataagaaagtggctgctattgaaaccctaaatgatggtgaactccagaaagccactgacttattcacagatgccatcaagctgaatcctcgcttggccattttgtatgccaagagggccagtgtcttcgtcaaattacagaagccaaatgctgccattcgagactgtgacagagccattgaaataaatcctgattcagctcagccttacaagtggcgagggaaagcacacagacttctaggccactgggaagaagcagcccatgatcttgcccttgcctgtaaattggattatgatgaagatgttagtgcaatgctgaaagaagttcaacctagggcacagaaaattgaagaacatcggagaaagtatgagcgaaaacgtgaagagcgagagatcaaagaaagaatagaacgatatggctcttttctgggtggctttcctgggggaatgcctgctaattttcccagaggaatgcctggaatgggagggggcatgcctggaatggccggaatgcctggactcaatgaaattcttagtgatccagaggttcttgcagccatgcaggatccagaagttctggtggccttccaggatgtggctcagaacccagcaaatatgtcaaaataccagagcaacccaaaggttatgaatctcatcagtaaattgtcagtcaaatttggaggtcaagtgaattacaaactctaaatactttttaaatcttaaaaatatttaaaacaaatttaaaggatctgttaattcttatatttttctttactaattttggattttttttctttgaattattgggcagggaagatacttatgtatggaagattattgctctaatttgagtgaaataaaagttattcgtgtgaggcaaacat

SEQ ID NO: 468986 - DNA, 592 bp, Homo sapiens
aagaaactggcctcccacagtgaaatgatcaaggtttgtgtaagtgcactctatcatatatgcatggcgatgagtgtgccaaacgccccatttctcagaatgtatccccatcattaaacaacacgacagtatactcagccaggcaagctactgatgcagcgagaggcttgcaggaaccgagacttaaccccctgaccatcaaagtaacttcgagcaacttgcattctgcaatggttgaagaatgtagtgtgtggacgtctgagaggaggataagtggggcatcaaatcaagcccagatgtcagtctccccaactccagctgttggttgggacagaactcagaggaagagccctcagtgggggttcctaggagctgaacaaccctactgctggctacccgctgggcgtggctgcacttgtgtcagccccagtgtaagagcatctgcagaggcagctgaagcccagcaaggtcttttgtcccccactccctcaaagtcatcctaggacacaggtgtgcatccctcacagctgaccgactgaagatgaatcagcttccctgaaagacgtgacccacaggagtgtgtcagctgaaa

SEQ ID NO: 468987 - DNA, 1130 bp, Homo sapiens
gggtagtgtagcctcccagggtccctgacttggctccttgccttgcagccagttccctacctcggctttagttgacatggctatgcactgtgatactagtaccttttgggcaagggccacgtcatttcttccagagggatgggctcttctcattctatatctatataaccaaaagggacctttgaaaactccttccaaaaacagaacgatttcctggaacatgacttgctatcttccctctttaaagacagacactgttggcaaccagatagctaccacccttgctaaaaagaaaattgtaaagttctgcactctgatgtacatgcaaaatgccaagcactattattacatgacaggtcacaagtctgggccctatgggttgaatatggtggacagggccatgccatggtttggccagctgggctcaatccaaggcaaaggcaagttctggaagctgaagcctgagcctgaggatctagcttgccatcttctacgggcacagttcatggctcctgaaaacaattacaacagtaacatcaatgatcacggctcactgatcaccataacagatgtaatagtgaaaaagtttgcagtatttcaagaatttccaaaatgtggcatagagacacaaagtgagtccatcctgttggaaaaatgataccattagacttgctcgatgcaggtttgctacaaaccttcattttgtaaaaaacacagtatctgcgaaacaaagtaaaatgaagcacattaaaacaaggcatgtctgcaattgctatggcaaatgctatggtaactaatgatagcaataaaaaattattaatttcaaatacaaaataattcccatacctttcgaatagttaataaacgcagagatagcatgatactattatggatattttaaaaggagtaggctagctagataattttaaaaactaatagcctctttgagccaacaaatctttaaaaagtttgaataataatacatgacaggatgatagagaataatttagactagaacgctcatgcttgtagaattatttgtcacacctcttaaataaccgtaaagaacttacgatatttattttccatttaggccatgagtctttggagaaaatgttttatttggaagg

SEQ ID NO: 468988 - DNA, 446 bp, Homo sapiens
gatactaccttaacctaaaacttttagaatgttcaacttggacattgctgggaagagagcctcatcagtggggcagcccaatgcacttgagtttccttatccttttgacatgcgattgttgctggtccctggtgccctctgtgcccgtgggctgcacctagaagatgccattctcatcagcaaatggctagaagttcaaacttacatgagtcaacatttccaaggatttatagttgtaggcatttctattcctactgccgccaagttagggagtgagtttccggtttctggagttgttaaaacagccggcacatggctatttgttgaagataatggaaaagaagtcaagcatccggtgaacattggaggtcccttccgaataagtgtccaaaattctcaggggacgtcagatgctgtggtacctgtgctgtgctaggggcatatgt

SEQ ID NO: 468989 - DNA, 616 bp, Homo sapiens
tccatttcaatctggaaggagcctgatttcaacttgttataaaatggatctactagtccatgtctctctgatgcttaaacatctgtgtgcagcatttttaggaggcctctttcctctgcaaaataagaggcctctgctcttacattactttgggatatgtttggaattttacttattctccacaagatttaactgtagtacaagaatctgtaacaagcttgcttattttgtttcccagtttaaaggaaatgaaggagaattagaagagaaaaagaaatcaggaaaatgtcacgatgttatttatagcagtgggaagcctggactgcaggggccaaaagaagcagcagaaagacctgtgaagaggctcccacggtcttcacaaatgctagagataatggtgttagatgtgagaagagaaggagaagattaaaatagtctccctttcctgaacgttctgaagtctgggaggttcaagaatctcagcaaatcccagattttcttaaagggccagtcaatgtaaattaatgaatagtttttaaaaaatcttcaaagaaatataaagagtttttaaaagagagagcagaggcaagaatagcatattgatggtagacattgc

SEQ ID NO: 468990 - DNA, 1301 bp, Homo sapiens
ctgagtcatagagaggcaaaatggcaaggggagaaagagctgaaattgtggaaaaacagacacaattatccccagacactcttatcatgcaagtgactgacctgcaacaaaaggtgcatgcacagcttcgccaggtgtctactattaaagtgaggacattgattggaaaagaatgggaccctgcaacttggaatggggatgtgtgggatgaccctgatgaaggtgaggacactgagtttgtaaatgctgatgaatcttttttgccagaaggaacagcttccccatttccagtagtggcaacatcccctcccagacccatgctgccatcagccattccacctttgtctgaggagataagtgctggagacctccagcctttcaccacggtaactctgcattggggaaaaagaaatggtcggagatttcagggacttctggacactgactctgagccgatgttgacaccaggggacccaaaacatcattgtcatcctccagttaaaataggggcttatggaggtcagagagaacttgatcgcattttgcttccacaagatatcgtactggtccattacattgatgacattatgcttattggaaccagtgggcaagaagtagcaaacacactggacttattggaaccagcagatccaatggtgcctgacatgtcagtggaagatagaggtgctgtctggagcctttggcaggaccccataggtgaatcacagcagaggcctataggagtttggagcaaggccctgccatcttctgcagataactactctctttttgagagacagctcttggcctgttactgggctttggtggaaattgaacgtttgacaatgggtcatcaacctgcacccatggcctcatggggagttccctataatcagttgacagaggaagagaagactagagcctggttcacagatggttctgcacaatatgctgtcaccactggaatgtggacagctgcagcattacagcccctctccaggacattcctgaaggatagcagtgaagggaaatcttcccatcaacaggctaagaagggagttacagtgttggctgtggtgactgacctggactatcaagatgaaatcagtctactgttccacagtggaggtaaggaagagtatgcatggaatacaggagatccattagtgggaaactacaatagcccaatccaggcaggactacaaatggcccagactcttcaggaatgaaggtttgggtcactccaccaggaaagaagccacaacctgctgaggctttttgatgtaggtgtttagggctac

SEQ ID NO: 468991 - DNA, 636 bp, Homo sapiens
agaaacgggctgggctgacagtagatttaccctcacaagatgaatgaaatcccatgttattcacaaaacccagacatctgggcagtgtttgtctttaaatgtgaatgatctagaaccttcatctgctcctcaaattttaacatatatggaaatccctgggaatcctgtgaccaccacctactatgtgcccagtactgttgtcagtgccaagatacagaatcaaataaggcagatagcaggccactcccatgaaagtgatgttctaatgggaagagacagacaaaaagcacgtgaagaaggagatcatgtaacttcttactttgctctaaagcaaataaagcaggattgtgtgaaagcactgtgggtaagaggggaatcagcttcagattgtgtggtcatggagacactgaataatgggagagacaaggcaggcaaaggtgggaaagaatattccagagcagaggaggagattcggctgggcgggctgaaaagtgaggggcagaagcctggtcaaagaaattcacatgagctacgagaaggagcatgaatctcttccaggagtaatgagaagccacttgaaggtttaaagtagggaaggaatgtgatctgattttacttttagggcaatcactttgg

SEQ ID NO: 468992 - DNA, 553 bp, Homo sapiens
gcagcaattgcggtcctgagacttgttgaatgggttaaaccaaaatgctgatagggatatgggcaatgaagttccagctgtggtggtctcagatggaggtgaggaacttcttgggaactggagtaaaggtgactcttgctatgctttagcaaagagactggcagcattttgtccctgctctagagatctgtggaactttgaacttgagagaaattatctgaaattggaacttatgtttaaaagaaaagcagaccattcaagtttggaaaatttgcagcctgatgatgcaatagaaaagaaaaatccattttctggggagaaattcaagccttctgcagaaatttgcataaataacaaggagccacatgttaatcaccaagacaatggggaaaatgtttccagggtatgtcagagattttggcagcagctgctcccacaggcccagaggcctaggagtcaaaaatggtttcacgggccagctggctcctgtgtgcagtcttaggacttagtaccctgtgtccagctatggctaaaagtggccaaggtacagctc

SEQ ID NO: 468993 - DNA, 677 bp, Homo sapiens
aattgtcacagcagaaccacaagatgtgtgttagtgtgcctgttatacagatgaagaaactgaagtgtggagaagcgaaatccctcatgagtttatctagccaggagttgaacctaggtctgcccaaagctttgttagctggagatggtggccttggtgcaaatgccacagtgattctaaaggcacacagctgctggctgtcagtcaattgcacccttggccaatgctctctgaaaagaagagctgagcagtgcacctgcatgagaaccacgtggacgaagccaatgctttggactcagaaagacctgacttaccagccacgggttcacagtgacccctacaggggttgttacctgggaggtgtatttctcaataccgaggcgaatgcactagatgccatcacaggctcatctataggagccaacgggtatgtggtgggaattgaacaatgagaacacatggacacaggaagaggaacatcacactctggggactgttgtggggtggggggaggggggagggatagcattggaagatatacctaatgctagatgacgagttagtgggtgcagcgcaccagcatggcacatgtatacatatgtaactaacctgcacaatgtgcacatgtaccctaaaacttaaagtataataataaaaaaaaaaaaaaaaaaaaagaa

SEQ ID NO: 468994 - DNA, 2448 bp, Homo sapiens
ccgatcgaaggaggaagcctcttataaaaccataagatcaaatgagaactcactcactatcatgagaacagcatggggaaaattgcccccatgattcaattatctccacctggtccccgccttgacatgtggggattattacaattcaaggtgagatttggggaattagtggacagtcttcccttcttgacactcaagactgtgtatgactatgaaccacaatctgaagtcttagatgaagcaatgggacaaaccaacaagctcaaaatgggcatctattggcatggacagctactgatagatactctacaactgtgcttagatttaaaggatcttgatggaaaagagtgtgcggtattcttcatcacagctaccagcatgggatgtacccagcaacttgatgtgaccctcacagaaattgaaatgacactctcagaagtccattatttttcacttcaccagctcatgctaccacatctagactcaaatgaagctccaatcctcggtacacgagattcagcatcccgactggatgtggaggggccagatgacccaccttagaaaagagggaggtctctgtgggtgaactttggccagtgagaggacagcatgtaacatacaacctttattgtttcccattctttttgctttgcttcatttcttcttttctctcattgacttgggtttgtacttctccaataaagcctccacactttaatcattttattaggccctattttttttttaaagtactcaaggttaagatgctttccctcctgggtatgtgtatatgtgttacaatttttggttaattcaaaaatcagaacttaaatgatcatgatgatatatatgctacatatcccagcaaaaccagtaagcatgattttaaatttgtttcctaaaactttggtgtttttggagtttaagattgcatggattttttttgtgcatttatgtcctatgccagtaaagaaattttctcaaagtacaaaagtactcttaatgtggccaaaagtgttaggtaatataacagtttttcttcagtctttgacattcctgctgtagtcttgtgttctctcattccaattttaactggttgttccttagacctgatattcaatactatcctttaaattctttttgtatctttcctctgtgttatctatttcccaaatccaataccttccttcttcttggtttgctatgtcatgttgataaagcatatcctccagtagctttctgagataaggtgtatgggtaggcaatatttaaaaaaccttaaacatctgagaagctctttatttaaccttcatatttaagtgatagtttatttgaatatagaattttttgatcgaaataaattcttaccagaattttaaaggcactgtgcatttccctgcctcaccccagtatattgcatcgttactgagaaatttaatgccaatctaatcccaagttctttgtgtattaccagttattttctcacaggaatttttagtgcctttaaaaaaatctctaacattctgcatttcataatgttgtgtattggtgtgggtcttatttaacaacagaacatcaggtgccaatttttaactcaggtccataagttttaagaaaaaatttaaaattatctctttaattattttctgctatctattttcttgattatttatttcacccctaaatgtcttggttatgtttgtgcattcttccatgctctggggatatagcagtgaacacaattaacacaaagatgaaaaacatcatgccctcatgtacattctgatctcatgtacattctgatagtagagatagataaataagtgaaacaaaagtctgttaggtaatgataagtgctatggaaaaaaataagggcaacaaggaggttataatatggtgtgtatatgtgcatgtgtgtgtgtgtgtgtgtgtgtgtgtgttgtgggggaggaggaagggagggagagagagagagagagaaaaagcgagagagagagagcgagagagagagagcaatttaaaaaatggtggccagaagaggcttcactgagaaagtgaggtgaattgttgtgcagttctttaaggatgaactgaatggctggtatcattgcttgcaaaagagtcttgaacttgatggaaaataaagtttgaaaataaagttgaaaaataaagtttgtacttttactttttatcctttaattccatttttcatgaactgaaaagtccccttatatttgactgctaatttaactagatatagagctatcagtttaaaattattttttctgacattaaagctatatttttcattgtgactactggttttaactaagctttattaactgttcactttttaatttctttacttttactaacttttcggcgattctctacgagtccgccctgcagccatcgcccgctgtcgccctcgtccgtcctcttatccat

SEQ ID NO: 468995 - DNA, 1024 bp, Homo sapiens
agtctgaaatgatatgttgaagatgtgggaaagtttggaacttctgagaaacttgttgaatggttttaaccaaaatgctgataatgaggtggatgatgaaatccaggctgaggtggtctcagatggacatgaggaacttcatgggaactggagcaaaagtcatttttactatgctttagcaaagaacttggtaccctgtgtcccaggtgcttcacctccagccatggctagaaggggccaaggtacaacttgggctgttgcttcagaggctgcaagccccaagccttggcagcttccatgtggtgttggacctgcaggtgcacagaagttaataatcgagatgaaaattaaaatagaaactatcagagaaagaaatgcagcatttgaagtgattaaatgtaagctattatccagtagtgttcatgaaaatatgcaaagtttacctttagatattggctttagaagatctctcctgctgaactgtggactgtgatcagacacaggccccagtgagctgtctactgtgtgagcattttgtttgatgggaggaattgaagaagtatgctcagtttgaaaacgagtcttaaggtacaaggctttgagtcgtgacatctcaaacatatctccatggacaaaaatattctttgaaaattaattgaagacgctcagctccatgcttggatatatgcttccaaaacagctacagccttcagtgatgttctttcatgtagtcagaataaaactgtttttggcagggagaggatgctagaaatggcaggtcacaggaaggtaagcaaataaggaaggcctaaggacaggacacatgatttgggtctttgaagttgatacttttatgtcaaatttagctttgggatacaagtgaactgacataactaattgccttagttgccgaaaatgtggctttaaagcaggaaaatatcagttactgtttaagtcaaattatactatgaaagctttgcacttacaaaatgatttcacatgcattgtctccactgattctcct

SEQ ID NO: 468996 - DNA, 818 bp, Homo sapiens
tcacacatccagcataccctaagaagatgacactgcctcttagtgctcacaaaaggagtgcaagttatatgaacctcaactatcctttctatccaactggaactgtatctgtctgtttttcccccttctgctccgtcttagaagaaaagttcatcaatacttttgggaaaaagaagcaggagggaccctcatccaaatttgatttggatgtcaaaactgatgatgccacacatccacctcacataggcaggctgtcccaccgagtaatcggctctcagcagaaaggaggccctggagagggtggcctctctctgccagctggtcatcctgtcacctctgcagctcttagcagagagggtagctcctcggtgcatctggtcacctcatatcccgctatcagcagagacagtagctcatctctacagaatggtcatgccatcatctctctattctctgccctgctctggctgagcctggggtttttatggacctcagaggggaggaagtgcacagcaactggtccatgggcaaccatggatgggccagaaaaggcaccacaggtccccactctggtacgtgggtctggaagccctgccctcagcctttgggacctccctggtctgaaggtggagccttatggaggacccatctccttctgcccaggaatctgtctgcctcctgctgctgttcatggctgcctagactcagccccaacgttgttccaagattggagccagcaccaacagcagggaaaaactaggcagcaggacaggttctttggagcctgcaagggcagggggccttcctaggcccacaat

SEQ ID NO: 468997 - DNA, 500 bp, Homo sapiens
tcctgacattgccatggcatttgtgaactgtcatgacgctggagggatctttaggaggattaatgtacaattcaaaagttctctgagaaaaagaaggagagggcagtctcttcccttattttcaacacggagaattaagcctcttatttttaataggtatttgtcctttcagggacaatggacagggagctgggagaattctccatgttacaaatatatcttaaattgtacttggtattttaacttgaatgcagacagccaagccctcactcaagatggagttgctctggttcgagcacttctgaaaatttcacatttaaatgtttatcagtcgatgcttagcaaatatttttcaagcaccagctgcactcctggagctggggataaggtggtagaagagacaaagtggaggcctcctggaactcacattctaaagcagagctgtccaatgtaagccacgtctgcaagaaggaggtctgctttggaaaggggctgttatc

SEQ ID NO: 468998 - DNA, 1977 bp, Homo sapiens
ttctgagcttcatggaatacctgagaattctccaggctccagaatgagtttgaggaaaggaattgcctgtactgacctacccctattaaaaacagaaattggggtctgttataccaaagtccctaaggagacaagctccagaagctataatactcatgactggcatggctcatgtggaaaggacttaggagttccgaggagagagagtgtgagaggatggaagaagccacccggagacactgggtgtaaaagatatggttacatctcttccctgctacataaacccctgattttagttggtcagggagagggaattgagactgagctcccatctcctccactgcagcatctgaataaagccttctttcctgacaatacacatggtctcagtgattgcctttctgtgcaacagacgcagttaccacccaacactggcagcccctctgtgctgagtgtggccctggactccagtctctggctccagctcaggagtgagtctcactggccaatcagagcaccctatctccctgaacatggtgattggttcagggatggtcatgtgaccaaagctgagccaaaaagatttcatccaggaatgtttgctaaaactgtgggtggagactaaatatatcagaccccccaaaaaattctgaaacaaattattgttaactatagccaccctatttttatgcctgtatcaaagcatcacatgtacttccataaatatataagtattatgagtccataatacttaaattttttttaaatccctgatatagaaattttgagtattacatcagatgctcatcctgataatatttaaaggggtgggaagtttcatatatattttcaatcaagtcctttatcatacacctgtttaataaatattttgtcctagtcagtatcatttcaacattctttcaacagaatctttagaaaagaagaagttttaaaatttaatgaagtccaatctgtattttttatattttggtgtcatatgtaaaaaaaatctttgcctaacctaaagacattttcttatgtttccttctggaagttttatatttctacattgtaaacttaggtctaggatccattttgaatttttataaggtgtaaaataagggttaaggtacatttctttctatgaatgtttatttattctacaaccatttgttgaaaagaccattctttatactttgaattgcatttgaagctttgacaaaaatcaatttatcatacatgtgttgtaatttttttttatcatgaacagattgttttttcaatctgtttgggtaatcaaatgcttttttcttttttggtgtgataaattacaataattgatttttgagtactaaaacaaccctttactcttgggtatagccaacgtggtcatgatgtattaccatttttgtatattcctgaattctatggatcacaattttggtgagggttttttgcttctgtgttcatgagggacgatgaggtttgcataatttcccaaaatatggtttatcatgctgaatacttcacttgcacctgaaaaaaaaatgaatagctgttgttgagtgaaatgttagataaatatcaattgcatcaaggtggttgatagcattgctcaataattattaataattgtaaatcgttactaatttcctatctactttttctttcaataactgaaagaggagtattaaattgcaagtatagctgtggactttgcatttctccaattattgctcttttcagttctattactggtgctttatatgtttggaaagtcagtttttaggaacgtgctcatttaagatcgttacatcctcttggtgaatacactcctttcatccccaaggcttctgtttccattattttccagtcatcaatactcgataatgggcaggttttcttcaatcggctcacactccagttttcatcagcagaagccatttttctctggccatacacagttgtgtgaataat

SEQ ID NO: 468999 - DNA, 714 bp, Homo sapiens
acaaggactcctgtggctctccactactcttatttctgccacctggacctttgacaagatgtggccaactctctgggccttaatatctccagaagtcagtatccgagagaaggcaaatgccttccctgagtacagacctcccacccctgaagtcttaacccctagaagatccctggggctgcagggggaaaagcctgagggagcagaattgaaggggtcagcccagatggcactggtgatctggggaaagtgtcctgtgcatgataaggtgctgatcagcattccaggactctgcccaccagctgccagtagcaccccctgtccaagtgtgacaatcaacaataaatgtctccagacactgcccctggggaaggtggagagcaaaatcacctccagtgatttattgaacagagataagggtgatggagagtgtgtgcctctggaactagcgggaagctcagtattggcctgggtggcccaaggcagctccggaagacactgggaacctcatcagtgctccctagatacaaagggattagaggacaagccatctttcaaatgaaattgaacataagctcctttcaattatttgtccctctgtttaaaaagggatgcctagttgacctaccttggcggaggtaaccaccggaatagatcatgtctaacatgaaagaggtaggtgtgtgcacatgtgtatgtttatatatgtatatt

SEQ ID NO: 469000 - DNA, 791 bp, Homo sapiens
ctctcgcttaaagaatagctatgctcgaggcatgggtgtaagcagggatgagcagtttgaagtgggatttggagcacggacttggtttacggcagatctggattcaggagttactcctcagcccggctgcggggcgggaattgacgtcaccgacgtgctgggtgttggtggaggctgcacgtgtgatccactagggggcactgagtgtcctcgaaggtcaatggaaacgcctttaaaacacgtgggtgccaaggacatggatgaagctggaaaccatcattctcagcaaactaacaaaagcacggaaaaccaaacactgcatgttctcactcataagtgggagttgaacaatgagaacaaatggacacagggaggggaacatcacacgcaccggggcctatcagggagtgggagggatagcattaggagaaatacctaatgtagatgacgggttgatggatgcagcaaaccatcatggcacgtgtatacctatgtaacaaaccttaatgttcggcacttgtatcccagaacttaaagtataacaaaaaaaaatttaagtttctattatgtatagagtataggcaggacctgtgagtagcttctaaccaactatatatacgagtacaaataaatctgggtaaatctatatacatacagatttatgttttatgtcagctttactaaagtatagctcacaagcaattaaaaaaaaaaactttacttgtccatagcccttttgcatgtcaggcatctggttgtaccctaatgggtgaggagagaggctgtttcaa

SEQ ID NO: 469001 - DNA, 611 bp, Homo sapiens
cagaaaatggaacgagctaccagttatgtttgctcaaggccctggggctctacaatcagcaggtggcaaagtcagccaggttggtgcccttcccttcagggtggtgagtttcctcaggatctgggtaggtccagaggtgctgtctgggagccagggactagattcaaaaaccttggaagtctacctggtgttctattgcattgtagctaagatggcactcaaaccactagacgcagtccttccccctcttccttcgcctttccaaatgcagagaagcctcaccctggggccaccaccaccacaggcctacagagtactgccagactactgccaatgttcccttaaggatattgccgctggtttttcgggacccaaggattcttcagctactgccccagctggtatctcagtaggtcacgtgcccccaggtccactggccctgggcccagttcagcactaggacttgcctaggtgttgtaatccttgtggactagactgcctttcaagtttatttaggaacacagagcactttagcccacagtgggctggatttatttatttaatttatttatttatactttaaactctggggtacatgtgcagaatgtgca

SEQ ID NO: 469002 - DNA, 693 bp, Homo sapiens
aaatcatggaatctttcagcttcagttccctcatttgtaaaatgaggataaaaatagtgcggatctctctgagtttattctattttgagttcgctgaactcttggacgtgcagattaatgtttttaataaaatctgggacacctttgccattaattactcaaatattgtttcttcctttttctctgcctccttttcttctgggactgcaattgtgcttatgctggcagctaaaagtcaaacagttgcctggcaagtatctctagggaaagagctttccatactgggtgaactgagagtgaagccaaataccgacaaccttgcaagtgggttttttcagggaaccattagacaagacaccgaggttttgaacactgccattctcactggaaagcctgtttcagttcctgtcaaagtcgtgggggtccaggaggatggttctgtggtcgatgtgtctgagtctgtggaatgcaagtctgccgatgaagatgtcattaagcaatccaaataagaccttctcattttttgcaaactcactgtgcctaataatattatttactcaatatattttctttaaatgccttgcttctttcgggtagccagttagctcagtgggttagagtgtggtgctaataaatgcattactttttcaaacttaaaaactaatttagcttcattataagacaataaagtcc

SEQ ID NO: 469003 - DNA, 565 bp, Homo sapiens
ggctggaatatggttgatgggaaatggcaggggtgcagggtacaaagcaggtcagcagttgtctacctgccctgtgcaacatgtcaccaagggccacatgtggctgggtaaatggatccttctatgagatcttgcaagtggactttggaattgataatagcagtgacctggctggggcccagcagattacctggcaggtggagtacccgattgaggactccatgagtgagctggtcgtctccgagatcttcgtcagccagacaaccttcgtgggcatcgtccctcttgccatgcaagtcatggaaagatcagtggcaattaatgctggactgcccctgcatgaagccctgcgatttccagggattcccgatttccctgagtgtgagcaaataaaggctccttcctgcagcccgagccagcgctcagcgcagcccgtgacccctggcacctgacaacctgcttcagccaaaatcttaataggctttattatttttatttaagatgatgcatgctcattataacatttttaaacaatatatggaaaaatcagaatctcagcaccccc

SEQ ID NO: 469004 - DNA, 2682 bp, Homo sapiens
ggaataaggctgaattggaaaaattggtttttatcacatggccatcattaaccaaacttccttcaaagccgcagctcaccaagggtttcctccatggccatgatgttcactgcatctgcagacaatgctgcctgtgtgccattggcatattcaattcaaattacttctgcaagagctgagaaccctctacctaccttcactgtctcagatatggcttcctgtacaccagagaacccactgtggagtggaatattctgctatgatttgccgctggcccatgtgagcctaattgagcttggtccattagtcaagtatgggccaacccactggctcgatggatcgataggcgtttgtttgtttgattccacccagccgtgcaccctggcaagggcagaaaacagcatcaaaggtattactggaaaaggggaaaatttaatcaaggaggatcaatactgcttatgtggagtgaaagtggcccatgtcatggggatctgggtttctggggaaggaatttcccaggaatcttcttgtggccaaccctaacgagaaacacacatgaaaggggatatggggaaatgtagttcagaggagccaagtggttccctgcagagtggagacagaggatgcagggggtgaatctggaaggtagcttggggtcacaccagagggaacgtcgactacccagcatgttagtttttctccactggccctcacttccactcaccttcctctcttttcttccctgctgtgtgcttggggtgggggtggttcataccaatccatggcttcacctgggttctcttgctgctggcttctggctgggcgctgccagtgcactggcattgatgggagaccagagggcaggcaggaggagggggaggtagagtgagcccctccttctgcttctctgcatgcacatgagcacagaagagaggcagcaggaaggatgtaccctacctccccctcctccctgggaatggccgtgtccctcctctccgtcctccctggaaatggccgcatccctcctccccgtcctccctggaaatggatgcgtccctcctccccctcctccctggaaatggccatgtccctcctcctcctccctggaaatggccatgttcctcctccccctcctccctggaaatggccgcatccctcctccctcttctccctggaaatggatgcgtccctcctctccctcctccctgaaaatggatgcgtccctcctccccctcctccctggaaatggatgcgtccctcctctccttcctccctgaaaatggccgcatccctcctccccctcctccctggaaatggatgcatcccctcctctccttcctccctggaaatgaccgcgtccctcctccccctcctccctggaaatggatgcgtcccctcctctccctcctccctggaaatggccgtgtccctcttccccctcctccctggaaatggctgcatccctcctccccctcctccctggaaatggccacgcccctcctccccctcctcactggaaaaggatgcgtccctccgccccctcctccctggaaatgggcacctccctcctcccctaaaatggatgcatgcctcctccccctcctccctggaaatggccgtgtccctcctccccctcctccccaaaaatggatgcgtccctcctccccctcttccctggaaatggccatgtccctgctccccctcctccctggaaatggctgtgtccctcctccctctcctccctggaagaaatggatgcgtccctcctccccctcctccctgaaaatggccgcgtccctcctccccctcctccctgaaaatggccatgtccctcatccttggaaatggatgtgtccctcctccccttcctccctgaaaatggctgggtccctcctccccctcctccctggaaatggatgcgtcccctcctctccctcctccctggaaatggccgtgttcctcctccccctcttccccctcctccctggaaatggctgcatccctcctccccctcctccccctcctccctggaaatggccacgcccctcctccccctcctccctggaaaaggatgcgtccctctcccccctcctccctggaaatgggtgcgtccctcttccccctcttccctgaaaatggatgcgtccctcctccccctcctccctggaaatggctgtgtccctcctccctctcctccctggaagaaatggatgcgtccctcctccccctcctccctgaaaatggccgcgtccctcctccccctcctccctgaaaatggccgcatctctcctccccctcctccctgaaaatggccgtgtccctcttccccctactccctgaaaatggccgcgtccctcttccccctcctccctggcaatggccgcttccctcctccccctcctccctgaaaatggccgtgtccgtcctccccctcctccctgtaaatggctgcgtccctcctccccctcctccctgtaaatggctgcgtccctcctccccctcctccctggaaatggctgtgtccctcctccccctcttccctggaaatggccgtgtccctccaaggctgtagctcctgttggatggcccctcctccatggctccaggcctcaagggacttttgtgaccctatttcttccccttgacccttccaactcagggtgatagcagctttttgttgtt

SEQ ID NO: 469005 - DNA, 1085 bp, Homo sapiens
ctggtgtcttaaaaaagggagaaatttggacacagacatgcacacaggcagaacgtcgcatgaagaaggcagagggcgtgatgcatctacaaaccaaggaacttcgaagattgccagcaaccaccagaagcaaagggagacgcacaggacaggttctccctcacagctctcagaatggggagaccttgctaacaccttcatattggacttccaggctccagaacttcaagggaataaatttctgtggttaaagccactcaattggtggtactttgttacggcagccccaagaggccaatccacttgccttcatcttttttggtccacctccctggaacatagaactatggctgaactatttatagtcaagtggctggcatggttccagcccatcttctccaagtctcagaagcatctccccagaatacgcaagtcccttctgccacctgcaagtgtcctctctggatgccaggtgacttttgaccctcaagccaggtcatctctagagcacagtggctgcaccattttgcattcctaccagcgatgtaagagggtttccatttctccacatgctcatatggataaagaaaaacgtagcgtctccatatattgggatgttattcagccaagaaaaggaatgaagcagcaacacaggctacaacatggaagaaccttgaaaacatgacgctgagtgaaagaagccagacatcaagggccacatggtgtgtgattccatatatatgaaatgtccagaataagcaaatctatagagacggacagcagagtgccaggagcagggctaagggggagtggctgcttaatgaatatgggttttcctcttggggtgacgaaaacgttctggaggtgggtggtgatgactgcacagcattgtgaatgcacttaatgccgttgacttgcttgctttacaatggtcaattttgtgttctatttattttaccacaacaaaaaataaaacaacaaaaagggggagaagatttttctctgcaaaagtctcttgtaatgtgctttatggccactttaagggatattcaaaggctgtttctaatgtagtttttcaccttcca

SEQ ID NO: 469006 - DNA, 1139 bp, Homo sapiens
tggaagaagcatcgtgcacggagtcccatgaatcaattcagagctgatgaatgaggaagcccctgaggacgaggggacctgtgtcttagttttgggtcagaataaaagaaggaacaaaaatctcacagaagaaccctccgtgggagggaaaggagtggggtttggagtgaggggatctggtttcgaatcctggctctgccagaaccagctgtgtgaccttcagccggtcgtgcgctatcgggtgggagcgtctgatttgttcatctggatgttgagaacaacggtggcaggcctggccacacggctgcttggtgaaagaactctgtgggagagtgagaaaagctattatggtagcaaaattaaggcggcagcaggtgtgaagataacggcagtgagagtcagcagtgaggaccaatgggcagtccaggaggaaattgataatggcagcactcagacgtcggccaccctcacctgcatgggccatcgcccggacacgcagagcagaatccagccgagcttgaaccaggtcttcacgacggtcatctctgcatccagcgtcctgtgcttcagttcagcagatgtctatcaagtgccacccaccttctgagtcctgttttgggttctgggaaatcagctggaaacaaaaccatgaatgggccaagggaattccttgaatatatatatatatatatatatatatatatatgtatgtatgtgtatatatatatatgtatgtgtatatatatgtatgtgtatatatatgtatgtgtatatatatgtatgtgtatatatatgtatgtgtatatatatgtgtgtgtgtatatatatatatatatagagagagagagagagagagagagagagagagagagagaaagagagtgttagaatgtggcctgcaatgcccatggcttgctgcctagccaagggatggggcctgttgtttatgagcattacttttgctggttgggagcatttttagaatttcatttttgatatatcaacttgcttacttaacaagcagtgcattaaaaagcatgaaaactgacaagcactggctcatccgtccctttgatgggccggccttggtggaatcggcatctggtatctgttggtgtgatgcttggtgcacacatgtc

SEQ ID NO: 469007 - DNA, 956 bp, Homo sapiens
ttgggtttagccaaaggagctttttgcctgcccctgggattgcaatgtcagatcaatgttaagagatgtttttccagtggaaagaggtagaaataaggacacccattttgcactagttaggattgacattggtgatactttacacaaagtatttgaaattctgattgggttggaagtagaaaggcagctgggaggtaaaaagtcccctttcctgctacaaatgtgcagtggtcttgactgtgaccgaaggccacagggcctgatgggaatgaaggtgggctttaatccgataccttctgagaaaagggagatccatgtgaagacacaggaagatgatcatctgcaagccaaggagaggtctcggaagaaaccagccatgcaaacaccttcatcttggacttctggcctccagaactgtgagaaagtaaatttctgctgtttaaggcgcccccagtctacgacccactcagagaggctcgctgagagtggggccagcagcctgcgtttccccagtgctgctgctatgcaggtctgcaagctgctgtctgtgcactgcctctgaggcacagaacacctgtgcaggtgacctgcccactttgggctttcaaagtgttgggattaccggcatgaatcaccatgcctggctggtaaatatatcttgaagggtgattgtagaccctggcttcattctctttgttgatagttttgcatgcatttgtccatcctctactattacaagatatgcaatttcactttgcaatggatttgcattgcttttgcattgtatttatagttggcagtcagcagaatctgaccaatcaagatggcagagatgttgaagtggtgggcaggggtagatgctgctgtcatctaagggccatgtgtgggcagggactgacatctggaagagtccatttatcaacaagtggtttcttgttctgccaatttatccttcc

SEQ ID NO: 469008 - DNA, 1318 bp, Homo sapiens
tcaacttgtgttttgaacacagtatgtcaaattgcaaagtgacagagagtcgagggattgtggatagcctgcagaagttttcctcgctccctgcttacctccccacgaacttgcacatctccaatgcagaggagtcctttttccttaaagaagccaaccaagacctcacaaggaactccagtctgcaggcccgggtggagccattcttcatctaccgagccaggacaccccctattatcaatgccagctatggcccattttcagtggagaagataatcccccaggagctcctgttgacatctacagcctttggaaacatggacaaatttcccttcaactggaaattgaaatcccacatccttgacagctccatctactccaacagacccaaagtgcagaccttgttttatgtcactggcatgggctgggatgacagtgaccttacggaagatctaccctgtgtcaagatgtttgctttccctgaggccagggaagtggcagccagctgtcggctgcaaggggccccagggctgtgtgtggctgagctggagctgctgcccgagtggttcagctcaggcctggacctggaaccagaggaggagatcccagccctgctcgggggcaccacgatggagctcttcttcacgctctacccagctgacaaggctggccagtgtcctctggaggaggaaggcaagtgggagaacaatatccactcgggcctggagagcccccagcaagcgtttccagcccgagagaggattgggagtgtggtggtctacccaacccaagatgatctgaagtggtccctggtgagcttggacgagaatgtggtcatctcggtacctctgaatctagtccgggaaggggacacggccacctttttggtctctctgaccagtagctctgtggcagaccagttcactcttagatatgtcacccatctggctcctgagggtatttgaattttgaaaccctgattcagtactgggataaaaaaggatgcaatgctaaaaagggagtttagattttcatctataaaggcaggcattgccaattcattatgcgtgtttgtgggagtcagaagtgaccagtgggtgcatcacagggagtgaaaccaccctccattatcgctggcattatggagtgaattagttacttcatgtaaagcacttacaagagtgcctggcacaccaattctcttttatgctataattaatatgtgttaattgatactgttaattcatacttttaaattatcatgtgtacttgtcccaggttctgcatttaccctttctatacattccctcactgtgtt

SEQ ID NO: 469009 - DNA, 508 bp, Homo sapiens
taattggaggttttgccgagattcggtaccaactctaggcagcagatgggaggctctttctttccttcttgctcagaagcctggtttgcaagaaggagcagatgttatgcacccattatctctctatttgcaattccagattcccaaacctctgagaaccacaatgtttttggtaaattttcagcagactcattgggtggtagaacctcacctgagctcatttataactttatttgttccacttaagaggaaggctcttgtctttgacttggaaccactggtgtgtggattcaaagatcctgccccaggctccgctgaaggtgctactgagattcagcgtatgcattggtcttgcctgtctaaatcagagaaattaggaactgagagttctggaaaagaggtgctggatctggatacatgcaatgtagaccaaagaagtggtagatttttctgactttgggggagagaaaccggaggtcctaactgttatgtgacatctctcaatttc

SEQ ID NO: 469010 - DNA, 1045 bp, Homo sapiens
aatataaaaattctagccaatgatagagggtcacggggtcacagacaacatacagagattctcctcactgccaccttacctacctgtgagctaccacatcctcagagcagagacctccttcttcctcaaggaagccaaccaggacctgctgcggaactccagcctgcaggcgagggtggagtccttctttacctacaaaaccaggcagcccccagtgctcaatgccagctatggacccttttctgtggagaaggttgtgcctctggacttgatgttgacttcaaactttttaggtccaaccaataagtttagttttgattggaaactaaaagcccacatcctgcgggacaaagtctacctgagccggcccaaagtgcaggttcttttccacatcatgggcagagactgggatgaccacggcgccggggagaagctgccatgcctgagggtctttgctttccgagaaaccagagaggtgcggggcagctgccggctgaagggggacctggggctgtgtgtggctgagctggagctcctgtccagctggttcagtgccccgacggtgggtgccgggaggaagaagtccatggaccagccggaggggacccctgtggagctctactacaccgtgcacccaggaaacgagcgaggggactgtgccgggggtgacttcaggaagggcaacgccatccgtccaggaaaggatgggctggaggaaaccacgtcccacctgcagaggatcggcaccgtcggcctttaccgggcccaggacagcgcccagctcagcgagctgcgtttggatggtaacgtggtcatctggctgccttccaggccagtcaagcagggagaggtggtcacggcctatgtcaccatctcgagcaattcctctgtggacctcttcatcttgagcgacgtcatgaactcttacatctttttatgagatttactgtacaagggattctcattgcatttgcattgtgaaccttggtggtcagtgagggacatgctgacatcatggtggggagggacaggtctcgctgtcagc

SEQ ID NO: 469011 - DNA, 1739 bp, Homo sapiens
gtctccacacacaaaaattgcctccgtctaagtgtgagggggtcctaccagcaacccctttgagccagcgagaaccaaatacttcgtgaggggctgttccaggggccatagcccagctctctgtgggagcactgtgatcaagaggtagccttcaccccaagttcagagtaggcagccggcttgggagatacaagccctgtccaccagcaactcatggagcagacagcacccacgtcactggtgtatgactctcacttgcggctgcggcaaatcagagccgcagatcaaatgatgctaaaatggatctttaacgtatcctgtataaagcagagtcatgattttatacatactgcagacaaagcccacgggctcaggtctcttatagcggccctcacatcagttgaaaacggaaacattttaggggcaaaaggaaatgtgatcatcatgtgccatgtatcaggctctgctctgtgcgaggactcggcgtttatgtctcgaatctttgcaatgatcctatcaggctctgtgcgaggactcggcgtttatgtcttaaatctttacaatgatcctatcaggctctgtgcgaggactcggcgattatgtctcaaatatttgcaatgatcctatcaggctctgtgcgaggactcggcgattatgtctcaaatatttgcaatgatcctatgcagcaggtctccttgcctccattccacagatgggaagagggaggctgagaccataaccaagtctccagtcacacaggatttcaacacagacccatgtaaattccaaagccgagctcttctcatcacgctgttgccatccgaatctgcaaaggggtatgacatcccataaagttctcgaatattttgagacaaagggacgaacaccaagacaggaggctggactttgacagacgtgaatgtgaagatcacaggtggccgtgaaggctttaggagcccggagaggaccacgtcctgcgtggcagaggcctttgcagggactctatttacatggcatttggcatgaggctcattatgtctcagtgtgcgcatctttgaagggagggttggtggatacttacttgaaagtagaaggtaaagtcccctcactaagccagcctttagtgccccactgtgggaggtggatttggagcggacagaatattcactcactgcatgaggcctgatgaagtggaacaaaaagtttctagaaatacatgtaaaaatcagaactgaacaagactgatccaaccctctgacttccagaagctttagtggagcctaggaatggagtccccaacacagtggcctcaccaaaggccataaaagagccatccgacccaccatcacgggcttgctttgctttgaatcctggaaactttgctgccagaccttgaacatgaaaacaaagatccctcccctaaatggggttcttaaaacctcttgacccttcttcatctgatagaaaccaaatggtacaaccctgcctgccgttgtcatcgaggctggggatggcacaactgctggaggagccacccctccagagcccctgccctgggagctcctacaacccacggtttcttctgcagggagggtgcgcccccagatcttttcccatcctgtggcccatgctcaccacctcccaaaccagtgacttatttgatccactttactctctaaattgtctcctttgtctgtcaagaaggagaaggtcagacttcagctcctctaatgattgac

SEQ ID NO: 469012 - DNA, 1062 bp, Homo sapiens
tttgatggttctctggatctccggtggccatctgacctctcaggaaacagggcatggaaatggcccttgtctcccaccctgttcatggcggctggtctagaccgtgctaactgctgtcagccggactttggagatgaaagaggtcagataataaaggacattatcagagctctggctttatacatggcaactttgcgtgaattagaaaaagctgatgcttctgcgcagaccaagaaggagacaataccccatcttccaggaagatctagccaccagccagggtgccccacttggcaaatggacatggggcatagttcatccccactagctaggagcttttatgaaggccacagtctgcatagcagcttgcagctcaggactaatttgtccccgctgctctgctttacagccggaagcaacgtccatttggtttgagtgtcagggaagccagatttgaagcaaggtagcgcagtggttatgactgccacctctgggaccaaacaaacatgcttgaatccagtctagctccgaaaaggtccagtcaatcttgggcactttacctacttaaactttctgggtcttcgtttctcccttcctaaagtagcgaagatgataagaaggtcctcctgggcttagtgaaagggttaattaatcgctccggttcctgacacatagtcatcactctggaaatgtttgctgttattacaatgatgaccatccttgatttagcaaaggagggtgggcatgaaggtgtaaggttctatgggggcatttcagtgtcctgagaaggtgtgagtggatggtggttatttgctgattttacttattggaatactggagagcacaatttcaggaacgcctacatcaaagcactaattggcacttttacagtgtctttctccgcacgtgagccttgctggtggaaggagctgtcatagtaatgcgtattcctccatgcccagtgagtagggtgacggtcaattcacagttcactaggcacaaaagatgacggggctctcctctgctcgggacagcaagaaggttgaggtgatacggtttgtc

SEQ ID NO: 469013 - DNA, 586 bp, Homo sapiens
gaatctcccaccccggaccccccagacccagagctgccccgcggatgaggagggggcccccagcacagtcaccctgtggaactggcatccaggagaggtgctccgctctgtgcgctccttcctcccggctgtgtgctccctgtccacagctccccatccacagcttcggcactgtggggctggtgctccaggagggaaggcccggttctttgcatcccctttccgcaaccgctagggtctctgtgcgggccctagaggaacgctcactcatcgcgcagctcaccagggaccccagcttggcagaaaccaggggctctctgcgggttctctcaaatgagtcctttgcggtgggggagcgcggatggggaggtgggtgcgtccctcgcgacgggaactacctcaccagcggtcctgtccggggctccttcacctcagtgtcctcttctctacaatgggaatcagtgttggccacggaatgaattaaatacaaccaaccagccaaaccttgggattgtcagtgctttaggggttttgggtttctgcctcttagtagttattgcaacttcttggaaatcattctattaaa

SEQ ID NO: 469014 - DNA, 965 bp, Homo sapiens
ctgcccccatcattggcacctggctgtctgatggttgcacaatgggagctgtgcctccaggtgttgcaccatctggactgatgactccgccttctaaatctagcttccgagaggttgtgggaaggagagagtctcagagggtccatggtgaaggggaaaggaagaagaatttaccccggtccccacctcccactcatcaaaggttcaccccttgtgtgttacccctggaacttcccaatgtgcatatagtcacaggtgagcaagtgacctacatggagccaaaagtcaatggctctggagctttgaatgctgagttgtatgtgatgggccagctggagccactgcctgactgcagagagagcctgagatacctggaaattgacatcctttctcggggggctcttgagcccttgatgggccttgctgaaagcccagatcccttgccttgagttgagttcaaatgtgaaatttaacttttcttccacatgtgaccatgagccaagggatgcgggtggcctctagaaaagactatatgaaaataaatgtgttgttttaagtcactaaatttgtgataatttgttgtagcatcaatatgacactaatacactggcttaagaaaataagaataatgtttattcaggaagcctgtgtcatgtgtgcaagtatttgtgcatgtaaatgtaaatgtatgcatgcatttgtctctgtgtgcatttgtgttgcaagacaacctgagaatatattttcatcatcttcctcagtgatctgttcccatacaaaagtttctccttgtctgaaaactctccctaaattgtaacccaaatctctcttgctgcagtttaagcatagccagtcaggcctgtgcatgatttcgtcagagtgcagcttgacacaggcagaatgagccagttcttgatttgggaatttcaacagcaacgtcttgtgaactcagaacagaaagagtt

SEQ ID NO: 469015 - DNA, 1538 bp, Homo sapiens
aggcgtccaaagtccagcggaaagaacaaatcatcaaggtttcaggagaatatcgttagcttacgttagaatttgcaacacacaagtgcctacagggccagccagttcagagtgatctttaggcaggaggccaggcagagttgattctgaaagccctctcctcctcttgatcatgtgatgaaagctgttctgacccttcatgtcctgcatattcagctgcgggtcctcacctctgcgaaggcttccttgatgtggcttgtagaccagtcacttcagtgtctatcactgtgccctgggaacaaatgtgagactgaaggctgcactgtcggcttccctacttttgaggttttgggacatggactggcttccttgctcctcagcttgcagacagtctactgtgagacctcaccttgtgatcatggaacgcccagcacattttctctcacatctcgttggtcagatgcaggtcacatgcctacccctaaaccaaacactggtggggcaagggacaccatgattggcttagagtattctggattaacccctgatctagacatagatgagaccagcagcgtttcccaaacacacattgtggagctcagattcactcaccagaaggcacctgttcactgggggaattcaaatggtccctgtgagtgcttgaaagtcggatcgttccgttcttcaagaccagatacaccttggatgaacacacctagacacaaacccatttactctgcaccacatcttcagaagcaacttaaaaaagagtttcaacaggagtatttgaatgtatcttttgatagatgtgcagaaacaggggtaattgcttctgaaatggaaagttttgcaaacaactatatcactattaacagtgaagagcattaccatttttttatttcgactttttgatagggtgaaatgtcctttggaatgtacagtggaagatcagcagcagcatctctgctgcttgaacaatatgttgcatattgcttcatatttttgcatgttacattgttgcatgttgtttcatagtgttgcacgttgtttcatagtgctgcatattgttttcatattgctgcatgttgtttcatatcgttgcatgctatattgttttgtttcatattgttgcatgttatactgttgcatactgttttatattgttgcatgttatttcatattgtcacatgttatattgttgcacattgtttcatattgtttcatattgttgcatgttgtttcatattgttgcatattgtgtcatattgttgcatgttctattgttttgtttcatattgttgcatgttgtttcatagtgttacatgttgtttcgtattattgcatattgttttcatattgtcttatattgttgcatgttgttttatattgtttcatactgttgcatgttatactgttgcatactgttttatattgttgcatgttatttcatattgtcacatgttatattgttgcacattgttttatactgttgcatgttgtttcatattgttgcatattgtttcttcagcagaacagct

SEQ ID NO: 469016 - DNA, 1097 bp, Homo sapiens
gggatgctgaatgaggggtctgagaagcaaagttcatggtggtgaagagggttgctggaggtgatgacagtggtattggtggtgatgttggagatatgtagttatggtagaaatggtggcgatgatagaggtagtaaaaattatgttggaggtgatggaaatgatgatggtggaggtaataaaggtgatgatggtggaggtaatggcagaagtgttggaggtgataacgatggagataatgaagaggtggtggaggtgatgatggtgaaggtgatagaggtgatgatggtggaggtagcagtggagttgttattggcgatggtagaagtgatgaaagtggtgttggagttggtggaggtgatggaggtgatgatggtggaggtgatggagctgatgatgatggaggtatcagtggtattggtggtgatggtagaggtgatagaggtgatgttggagattgtggaagtgatgaaagtgatgatgatggagatgatggaggtaatggaggtgatgatgatgaaggtagcagtggagttggtgataagtgatggaagtgattgtggtggaggtgatggagatgatgatggtggtagcagtggtattgctagtgatggtagaggtaatggaggtgatactggagatggcagaagtgatggaggtggtgatggagattatggaggtgatgatgttggagatagcaatgctcttgttagtgatggcagaggtgaaggaagtggtggtggaggtgatggaggtgatgataatcgaggtagcagtggtattgttggtggtgatagaggtgatggagatgatggaattggtgaaggtgatggagatgatgatggaggtagcaatagagttgttattagtgatggcagaggtaatgcaggtgagggaattgggggagatgatggagatgatgatggtggaggtagcagtggagttggtgatggtagaggtggtggttgtaggggtgttagcagtgatggtaatggtgggatggtggtggggtgtcactaatggtggaggagtgggcctgagcaactggggcatctgtgagaaatgtgcgcttcaaaggaagatgagtttgggggatg

SEQ ID NO: 469017 - DNA, 1094 bp, Homo sapiens
cctgcacttgtgcacgtgtaccctagaacttaaagtataatgaaaaaaaaagagaaggtggctgtgtggctggcatgctattgctgctatgagggttggactcctaagtttggcagaaccggacagcaaggtctgtgactgccttatccacaggcagatcccgctcgccctgccctggcatcaccaccactgggcagctttgcctctcactagatatgaaaaaagtggaaaagcaaaacagaaactaaaggtgaagaagggggtgaacatcctgagtgctcagacccgtgagccccggcagtggggcgtcaagcaggaggtgggcagcggcggaaagcacgtgacggccaccgtggcctgccagcgcctggggcccagcccacgcaacagaggagctattgaacccaccacgtggaaatctggaggcattgatatccatgcaggaccctctgcctctgcagcagggcggggtggggcgctcgctctgcagcgctgcggggtcagctttggagccgggtgagctcatctctgctctgatagggcttgtgcatcctccacacctgaactgactttctgggggccttgccctgcctacattatcagaagatgctcggttacaaagtactcattttttcatgaaggggaagattgagttttcagtgagaaggaatttaaggaaaggtggtgacagtcagtggcaataatggagaagcacctgctatgtgagattcactgtagacatcctggatgattttttaaaataattgttttctggttataaaagcaattcagactcattttagaatatgaggaaagcacaattatagcggggggaatcatgtgccaatatccttcctactcaagggtaacccactgatagcatgttggttcatttccttccagggtgttatacctgtgtaaggctaatgtatgctaaatatatttagtttacaaatttgggatcatcaaatacgtacagattttaaggacactacaattttcacttgtattggaaacattttctcttgacattaaatattcctcaaaaacattcttaatagctttataatattcatcagacggatttaacgtaa

SEQ ID NO: 469018 - DNA, 707 bp, Homo sapiens
cctgacccccatgacttatcttccatgtctatcattgaggctaccactctgcctccctccactacctctcagcaagctgaactcattgccttaacttgggtcctcactcttgcaaagggactacacatcaatatttatactgactctaaatacaccttccatatcctgcactaccatgctgttatatgggcagaaagaggtttcctcactatacaagtgtcctccatcattaatgcctctttaataaaaactcttctcaaggctgctttacttccaaagaaaggtggagtcattcactgcaagggccaccaaaaggcatcagatcccattgctctaggcaatgcttatgttaataaggtagctaaagaagtagctagcattccaacttctgtccctcatggccagtttttctccttctcatcggtcactcccacctactcccccactgaaacttccacctatcaatctcttcccacacaaggcaaatatcttagaccaaggaaaatatctccttccagcctcacaggcccattctattctgtcatgatttcataacctcttccatgttggttacaagctgctagcccgtctcttagaacctctcattttctttccatcatggaaatctgtcctcaaggaaatcacttctcagtgttccatccgctagtctactgtccctcaggtattgttcaggccccctcccttcc

SEQ ID NO: 469019 - DNA, 807 bp, Homo sapiens
ccgggagggggatcttcatgatcctgcagatttggaaatcagtcaggaactgtggtagacataccagtgctccctcaccctcctgccccagccctgaacccaacataatcccaagaatctgtgaatatgtaagtttcaatggcaaaacagacttggcagaagactcagaagaagacaggaaaatgtgggaaagtttggaacttcctagagacttgttgagtggctttgaccaaaatgctaatagtgatatggacagtgaagtccaggctgaggtgatctcagatggagatgaagaacttgttggaaactggagtaaaggtcactcttgctatacaaagagactggtggcattttgctcctgccctagagatctgtggaactttgaacttgagagagatgatttaggaccccggaatggtagatccatggacagcttgcaccatgctcctggaaacgccacagaacctcaacactggctcgtgaaagcagccaggagggagactgtatcctgcaaagccaaagaggtggagctgcccaagactgtgggaacccacctcttggatcagcatgaactggatgacaaaattggagatactggttactttaccaaggttttgactggaatggcacattttcagatatgaccagactggcttgaaaaattatggttaaatttgtagagcaaagaaaaagccccttagaaagactgtccttatatcttctcttcatggttccttcacaaggttcttgacctgataagtcctacaagctaaaactagataacttagtataaactttggaaaagaa

SEQ ID NO: 469020 - DNA, 2052 bp, Homo sapiens
cctcgtaacaattttttttctctctggataggattgccactgtgttttccttctaacagacaggaccctcagctgcaggtctgttggagtttgctagatgtccactccagaccctgttttcctgggtatcagcagcagcagctgcagaacagcggatattggtgaaccacaaatgctgctggccgatcgttcctctggaagttttgtctcagaggagtacccggctgtatatcaagctgcatgctgggagaaccgctactctcttcaaagctgtcagagagggacatttaagtctgcagacgttactgctgtctttttgtttgtctgcgccctgcccccagaggtggagcctacagagatcacccatcttctgcgttgctcacgctgggagctggcactgaggtttcccaagcccctggggggtccagaagtgctgcctgggagtcagggaccacagtcaaaaaccttagaagtctacctggtgttctattgtgctgcagttgagctggcactcaaaccacaagatcctttctactcttctctcctctttccaaaggcagaagaacctcacttcatacccaccaccaaccctggccacaaggagtactgccagaccacttctgatgttcccttaagacccaaggtcccttaagtcagcttgccatgaatgccgcctaacctgggactcacctttcaaggcagtgggctcccctcttgcccaggaggctgctgtgacaccattccttccctgggtttttaatgtctacacagtggagttgtgttaattgaatctttcttgtcatttgtgtaaatgatacataaaggagagaaagaactgtcttcttcccatacataagagcattccctaagtagtaatttatttattttatttaatcgttatgtatttcttggcttcatagtctcaaataccaatgttttaatatctgtttcacctataaatgaaatctaagtcttatgtgacaataatgaaatacagtatgtgccattacattcaccagtcaaaataaataacaatgtacaactttgatattttagactaaaattaatacagataagagttgaaactaaattacccaaaagagcaataaaattctgatgccataggatcttaaattatatgcatagaatataatcaaaagaagactgaacaatgtatatacctaatggacctaatgaatctgtatttattctggattttttgcaatatgctattattttcatatatataaattaagtccatatataattctgatttttattataaattcacagattatgtcttggcatagttaatatttcatatttgtaattgacaagttaaaatgatgacgtgatgatgatcgtgatggctatatcaataagaataacacctctcatttattaagtgatcactgtgacctagacctttagttttacacttaagttttctgttatttatttaagtcaagctttgcatgtctcaaaaatactctgcattaaaagtacctatatgatgtttagtttaataccagtgtctagatccctctaatcaaatattttgctccattgtatgggaactgactatagttatttattaaaatgttttctccttaagaagtagttttaatatatacaaaatgtaacaaacttttactttaaactgtgctgcttccaaatatgattttattggagatatcatttttggcaatatttgtggttttaatgtagtgaatgtgataatatacagaaaacctggtcctctgtagttatattatctagagttgttttgtttgaattttatatacaatattaataaaaccacagttggaatatgaaaaaagtaatattaacatgcttaaaaatataaagatgttgagatttaatttgtgcatgcattaaaaattagaaatgtgagacgtaaaccacaaaaaaaacagagggtagtcaaaatataagctatcaaaaataaagagttacgaaacatttagaagaaatacaattatttgtacattttatattaaagattcatatttttatattaaagattcatat

SEQ ID NO: 469021 - DNA, 636 bp, Homo sapiens
cctggatgcccaggcagaagttggctgcagggttggagccctcatggagaacttctacgagggcaagggtccagtgggtccccggactcatcctgtggtcatttccccagtgccacaatgcataattggcatagacatacttagcagctggcaggacccccactttggctgcctgactggtagggtgagggctattattatggtgggaaaggccaaatggaagccattagagcctcctctacctagaaaaataataaatcaaaaacaatatggcatccctggagagattgcagagattaatactaccatcaaggacttgaaagatgcaggggtggtgattcctaccacatccctgttcaactctcccatttggcctgtgcagaagaaagatgcatcttggagaatgacaatggattatcataagcttaaccaagtcgtgaccgcaattgcagctgctgtaccagatgtagtttcattacctgccaaagccagcaatatacctttactgtcctaactcaggggtatatcaactctccggttttgcatcataatcttatttggagagaacttgattgctgttcgcttccacaatatatcacactggtccattacattgatgatattatgctgattcaa

SEQ ID NO: 469022 - DNA, 751 bp, Homo sapiens
ccataaaaatgggcaacgagtagccctcgggctgctctgcctatggatagccagtctggcccctgcagaaaggatcatgggaaatgatcatagcctaccacaagctcaaccaagtattagtcctgacgctgtggccatgctggatttgatacctttgctagacaaaatcaatatgactacaggtttgatggctttaaaaagtactaaaattggggctgcatctttgctgtttgcaaaactcagccattctaccctgtgggctttggagagtccaaaccaactgagggtggaagggatcccccagcacagcacagctgttctaccaaaacatggccagactgcttctttaaccttcactggtgatacttccaggtactggaaaacccaaggtgactgggaccaggctgccagcaaaccacagcagccctacagaaaagtgatcaagctgttaaaacaaaaacaaaaaccatccaaaggtcagcaacctcaaagattgaaaatagataatcccataaagatgagaaagaatcagcacaagaatgctgaaaactcaaaaaggcaaaatgccctctttcctccaaatgactgcatcacctctccagcaagggtttggaaccaggccaaggctgtgatggctgaaatgacagaagtagaattcagaatatggataggaacaaacttcactgaattaaaggaggatattgtaacccaatggaaggaagctaaaaatcatgataaaacatcataggag

SEQ ID NO: 469023 - DNA, 1236 bp, Homo sapiens
gtttaaaccacctcagagagaggcggatccattggtacgatgctctcaaggcagttgccaggctatccacaggaataccaaaggaatggaggagaaagtatagccattgactgggacaaaaccatgcgcttcactttcaatgaaaggagtaatcctgatgatgactccatgggaattcagatagtcaaggaccttcaccgcacaggctgtagttcttactgtggccaggaggctgagcaggacagggttgtgttgaagcgggtgctgctggcctatgcccgatggaacaaaactgttgggtactgccaaggctttaacatcctggctgcactaattctggaagtgatggaaggcaatgaaggggatgccctgaaaattatgatttaccttattgataaggtacttcccgaaagctatttcgtcaataatctccgggcattgtctgtggatatggctgtcttcagagaccttttaagaatgaagctgccggaattatctcagcacctggatactcttcagagaactgcaaacaaagaaagtggaggtggatatgagcccccacttacaaatgtcttcacgatgcagtggtttctgactctctttgccacatgcctccctaatcagaccgttttaaagatctgggattcagtcttctttgaaggttcagaaatcatcctaagggtgtcgctggctatctgggcaaaattaggagagcagatagaatgttgtgaaacagcagatgaattctacagcaccatggggcgccttacccaggagatgctagagaatgatcttctgcaaagccatgaactcatgcagtcaggcctctctgctgcatgtctgctggagtttgttggaggtccactccagaccctgttttcctgggtatcaccagtgaaggctacagaacagcaaagattgctgcctgttccttcctctggaagctttgtcccagaggggcacctgccagatgccagccagagctctcctctatgaggtgtctgttgacccctgctgggaggatcatttctttacccttgacctttgagagtttgattgtaaaacgccttgagggagtcttctttgggttaaatctgttggtgttctataaccttcttgtacttgactgttgatgtacttctcttggtttgggaagttctttgatattatctctttgaataagtttcctatccctatctctttctctaactccactttaaggccaataactgttag

SEQ ID NO: 469024 - DNA, 646 bp, Homo sapiens
acatagtctttacaattgacaaataggaaaaagaaagaagaaaaaaaaccgatgcataagcctgggagtgaccacgaggtggcagcacaggagacactcagccttgaattcaacttgtactcccctgactggaggagtaagccagagaaagctttggttgcagagaaagatgagcacccatattcaagttccctggaaggagagtcaagggaattgttggaggcctacaggttcatgggtcccgagctacatctgctttccttctgtacatggttcatccccatggatgtccacagcaaaattgagggtgagatgcagagatttcctatatcccacctgtcccacacatgcacaaccttccccattatcaacatcccccaccagagtgaatcattcattacaattgacgagtccacattaacacatcattgtcacacaaagtccatactttacattagagttcactcttggtattttttaattgacaagaaatattcccaaggagtgaacagtatgataacccacagtggtgggaaaagatatactgtttagggaaagcaatatttttattactctcctagtacacattatagttactaaagttcaacaaattctttgggggtggggagatacaccaaatatagaa

SEQ ID NO: 469025 - DNA, 771 bp, Homo sapiens
aggaaaacacaggccttaggctaatggctggatatactttattgactcttcgaatgggggaaaaatatatttttaccttttactatggtccagagaacacagagacaactgaggcggagaccctatttccaggaaccaatacattacctgtggtaactgaatttgggaaatggcagcgttgggatgtgagtcccagcagtcgggatcctgaatctgcctatttcactactgccctatactgtttaaatcctattttatgtagggtggtcaaggaagacttccctgatatggaaacatctgagcaaaggcctgaaggaagcaagggaaagaggcatgtagggaatagcattccaggcagaaggaaggtcaagctgatgtcagtgggaattgaacaatgagatcacatggacacaggaaggggaatatcacactctggggactgttgtggggtcgggggaggggggagggatagcactgggagatatacctaatgctagatgacgagttagtgggtgcagcgcagcagcatggcacatgtatacatatgtaactaacctgcacaatgtgcacatgtaccctaaaacttaaagtataataaaaaaaaaagaaaaaaaatgctaattcaagagttattaaagctttacctagcactcatgtatgggaagtggttttaaatattatagagtatgaacagtttttgagatatgtaatatttggatttgaatttttgcttacgtctttttaattaaaactttacagtgtaacaggtca

SEQ ID NO: 469026 - DNA, 853 bp, Homo sapiens
cagaggcctgcccagacctgcttgcctctcttctgcaagtctgctacagtttgctgggggtccactccagaccctgttctcctgggtatcaccagtggaggccacagatcagcaaagattgctgcctgctccttcctcctgaagcatcctcttagagaggcactgacctgatgccagcaggaattctcctgtatgaagtgtctgttgacccctgttcggaggtctcacccagtcaggaggcaccggatcaggtacctgcttaaggaagcagtctggctgcccctaagcggtgtaggtgcgctgggcggtggggaatccctctcatccggattgcctggactcttcagagccagtaggcaggaaagattaagtcccgttcccccaggtgctctgacccagggagatgagagttctgtctgtaaacctctggctgcatttgctggaattcctgcaggaaggccctgcccggtgaggaggtatggatccagcttctacctaaagaagcagtctggccacaatctgccacagccactgtgctgcactgtggggaattccaccctgtccaaacctcacggtctctctatcaactggcagggaaacaccgcagactagagcctcagcatttattgctataaactttccacttagaactgcctttgattcatctcataaattttggtacgttgtgcttccatttttgtttgtcttaagatattttaaattttctcttttaatttctcatttgactcattggctattcaagaacttgtttaattaccatgtatttgaatatattctaaaattttttatttgtgattaggtgattttctctagtggtatgctttgatttctt

SEQ ID NO: 469027 - DNA, 2085 bp, Homo sapiens
ccattggtctgtatctctgttttggtaccagtatcatgctgttttggttactgcagccttgtagtatagtttgaagtcaggacctcactgttgcaaccatgattcaagccagcaaatcaatgcccaatgatcggcttgcaatatgcataaacacaggcaaatgggcactgggcagaaagcacaaacacttccataattgtgctagtaggcaggaggagcagaagtgtggcctccactcttcacttccactttctgactttcattcaggggtacatgtgcgagtttgttacatgggtaaattgcacatcactgaggtgtggtatacaaatgatatcatcacccaagtaaaaagcaaaagctttcccataagctcccccacacccacaccaagccgacttcctttgacacctcattgggcagaactgggtcccatgacctttattaaattcaaccttagaagtttacctgtcaatgtatctaaaaaagggcagcaggattttaatgtttggtctgtgttatgagctgaaatttgtttccccaaaattcacatgtggaagttctaatgactagtaattcagaatgtgactatatttagagatagggtcttcaaacagatttccctgtgtctttttgtagtcaatttctccttctacccacattcctcgacaatgccagtctgacttctgtggcttaggctttgcctttttcataatgtcacgtaagtggactcagactctgtagccttttgtgactggcttctttcacttagtataatatatttaagatttttccatgttgttatgtttatcagtaatttattccctctttattgatctttgtctggattctctcccctgttccactgacctttctactcattatccaaaatcactctaaatcaattattttttggaaagtctaaagataagaaaaatgtattttaaaatatttacattcattttaattatatttgaaaatcttcatgtctttatgaaggtgcaagtctggtatcatatttctttttgcctaaataattttcttgtatatctcttatagtacagatctccttgtaataaattctctcagcttttgttgcctaaaaaagtatttgtttatatttctgaaagttacacactggatatagaattctaggttggcaagtttttgttttgtttctgtgagactattttaaagatgttgctcactgtcttcttgcctgcattgtttctgatggaacatctgccatccttttcttcagtgcttaatgtatcttttcactctggctgtttttgaaattttctctttatcattgattttcaacagtttgatcgtaatgtgctttggtgcagctttcttgacattttttgtgctttgtatttattgagcttcctgtatctatgggattatatttcccatcaaatgtggaaaaaattttagctattacttttgcaattttttttctgctttcctttcatgaagactccagttacatgcatagtagggtatttgaagttatctcacagctcacttttactttgttaattttctaaaattctctgtctctcttttgtaggagattctataacttctacttaaatagtccttttttcggcaacgtctaatttgtcattaattatatccaatgtatttctcatctcagacattgatgttttcaactgtggaaatttgaggactgtcttgttgtcttccatgcctctacatgctttttgaacatgtggaattcaattataaccattttagtgttcttacctgttaataataacatctgtattagttatggagcagttttaattgatttaattttttctccatgttgagggtcatatttccctgcttcttcagatgcctggaaattttttacaattctatttgatttcacaaagccttcccgttttaggacagttttaaatttacagaaaaacggtgaagataggacagagagtcaccacatactccacactaaatttaccctactgttagcatcttacattagtgttgtatatttgtgataattaatgaactaatactgatatattattactaactaaattccataatgtattc

SEQ ID NO: 469028 - DNA, 575 bp, Homo sapiens
tcaccccttaaacttctcagttatgtgagcctataagtgttcttttttacttaagccaaaggacatgcggtggcctggctcccacctggccaccagccagcagagaacaaatcccagccctgctcatgaccacggcatgacccatgagccactgactgcccggcagaaatcgactttcatgaaaccatgtcagataatggaatgggggccagataaaggctatggtgttggggaaacctcatccttgttgcaagctttcttcaagaacaggagactcagtgccactgaacttaggatttggggatacagtcgtgtgtctctgagaatcttctgttgcaaggaacagcttagccacacagcagtgctccatggcggctgccgtcaagaatctaaacacggcttggaattctctgaggatgttattcataaaggcacagttaatcaaactcagacctctcttcagaatctcactgtacaagccaaacttattgccaatagaaggaaggtgccagaccagagaagcccattttaaaaagtaaaaaaaaaaaaaaaaaaaaaaaaaaaaaaaaaaaaga

SEQ ID NO: 469029 - DNA, 688 bp, Homo sapiens
ttctcagtctgtaggtcacaacactctgatgggggggtgtcaggcaaagtacttcatcagggcagtggcagtgggatacatgcttgcttgcacatgccagcagccacagcagtgtgatgaagtgcatgcacattggcttgagatggccactggacacgctttttctcctacccttggatattggaactccaggctcttcagcctttggactctgagatttgtaccaacagcttcacatggctcttgggcatttgacctcaaactgagagttataccattggcttccctggtctccggctttacaacttggactgagccacactactggcttctccggttctccagcttgcagaaagttatatgggacttctcagcctccataatcataataaacaggattcccaggagtgacttggttctgaatgacttggaagtcaaaaggaagagtccgtttctccagtaacaaaagtatgcctgacaagaggctctaagctgtcctggatgccaatctttgtgccgactactttacagtgattgattgctcatacttcacggcaaccctgtggaatagataacatcatcatcccccttttactgaggtgtggggaagttacctctattgcccatgatcatagtttagctggcgctgctttataaaagaatgaatgaataaattaatgaatgaata

SEQ ID NO: 469030 - DNA, 630 bp, Homo sapiens
accatcagatcttgtgagaattattcactaccatgagaacagtatgggggaaactgaccccatgattcaattatctccacctggccctgcccttgacaagtggggtttattacagttcaaggtgaggtttgggcggggacacagccaaaccatatcagtcatccaacaaaatttttatctgccttggttttgggtcctcagtatatctggtaatcatgcattctaccacttcattaaagccactgatgaaaacactgaaaagaaaaagattgaggacagagctctgatgcaagtcatgacattaattaaacaattagcatgcttcaggaatgccaatgggcacaggcagaagctgcagctggcaacaggctacactctttctggaccagacttgcagagtatgtcagacatagactgacatagcttctcattctcctccaaactatacaatgggaatcaaaactttattaagaggttggtagaatagaataaatgtttttggaaaatgttacatctatgcttttcagtttcttcattttaacactagggctggaatatagagtaggaaatctatccccagaccccagttaagtaggtagttttcctaccattttcttcagaaaaccattc

SEQ ID NO: 469031 - DNA, 1181 bp, Homo sapiens
ataaaaccagaatcctctcacctggcagaaatctttctctccagatgctgcaaagccagcacagatcatcttctctgtgatccctcctggatgggcagaataaaagaagaggggctgaagcggatgctgcttgatatcatttacatgacctattttcaaaaataacaactggcattaatgtttatgcaacaaaaatatgcttacctgcactgatgcttccccatccggtcacagcacagatctccgaggaaaatagaggctctgcgctgtgtgggagacatactggcctcaccaccgagttgtactccagaggagagcttagttgtattagggcaatgtcagagtcataacttagtgtgttaaagtcttcatgcactattatgtgtttggcccttctcacctgtatcggtggcaagtaagcaaattacaacgtaagaaagtcaaagaatccagcaacttccttgttgatggtccaaaataatcctaaatttctgcacttacatacataaacaatgcagaagactttctattaaatttaaaagagcaatattggtttacaatttgcagggggctatgaaccaccttctggataaaggtggtgctggagaaataaagctttgaaaacctggacacggatgaagctggaaaccaacattctcagcaaactatcgcaagggcaaaaaaccagacaccgcatgttctcactcgtaggtgggaattgaataatgagaacacctagacacaggaaggggaagatcacacaccggggactgttgtgggttctgcctacttctgatacacctcaaaatgatgttaagaagtttgaatcaatatccattaatttctcgtatcaagatctccagctgaaaaagtgtctgaggaaagagtccctctactggaaccaatacactgtcacttctacttggagactaattcttccatttaattcttccatttctttaaacactgtttcttcaggaaaagtaaagttactcaaattatttttcaatataccttatttaaaggtgaagattcttaatgcatgtaggcattttctccacagtcataaccatgctcatttcaattccttgcataatgggtttgacttactcatgtgtttcaatatgcctttattaacggagctaactcaagtgaagcacttggcaagtacctggtagatg

SEQ ID NO: 469032 - DNA, 1301 bp, Homo sapiens
caaagcacacatctgaatttgcagtctcctgcctgcagtctcatgcatggctgaatagaaacagctccagtctacagctcccagcatgagcgacacagaagaaggttgatttctgcatttccaactgaggtaccaggttcatgtcactggggattgtcagacagtgggtgcagtgcaccgagcgtgagccgaagcagggagaggcattgcctcacccaggaagtgcaaggggtcagggaattccctttcctagccaagagaaggggggacaaatggcacctggaaaatcgggtcactcccaccctaatactgtgcttttctgatggtcttagcaaacggcacaccaggagattatatcccacacatggctaggagggtcctccacccacgaagccttgctcattgctagcacagcagtctgagatcaaactgcaatgcagcagcgaggctggggaaggggcacccccattgctgaggcttgagtaggtaaacaaagtggccgggaaactcgaactgggtggagcccaccgcagctcaaggaggcctccctgcctctgtagactccacctctgggggcagggcatagccaaacagaaggcagcagaaacctctgcagacttaactgtccctgtctgacagcttggaagagagtagtggttctcccagcatggagcttgagatctgagaacggacagactgcctcctcaagtgggtccctgacccccgagtagcctaactgggaggcagcccccagtaggggcagactgacacctctcacagctgggtacccctctgagatgaaacttccagaggaacgatcaggcagcaacatttgctgttcaccaatattcactgttctgcagcctccactgctgatacccaggcaaagaggggctggggtggacctccagcaaactccaacagacctgcagctgggggtcctgactgttagaaggaaaactaacaaacagaaaggacatccacaccaaaatctcatctgtacgtcaccatcatcaaagaccaaagcaaaggaacaaagctggacggagcatgacgttgacaagttgagaaaagaaggctacagacgatcaaacttctctgagctaaaggaggaagttcgaacccaacgcaaagaagacttgatggagctgaaaaccatggcacgagaactacatgacgaatgcacaaccttcagtagccaattcgatcgactggaagaaagggtatcagtgatggaagatcaaatgaatgaaatgaagtgagaagacaagttcagagaaaaaagaataaaaagaaactaa

SEQ ID NO: 469033 - DNA, 539 bp, Homo sapiens
actccttctaaccagtcagtaggaaggttgtggatggcggagcgctctgaacacagacacactcgggaagtagatggaaccgccatggagtcagtactgctcgtttataagccactgcctttagaaacaggaacagtgaaagggcagcccaggacggctggctatttcacaaggcacctcggaacagccacgcctttccttcagaagaagaaaaagaacggtgctaaccaggtgcggccacagttcaacccactcaggccatttagctttgccagtccccacagtcacaggacgagattaagactggaatgtatatcaattaatccaggacagtatggcaaatgcaagagagaccaaggaagagacggagccgccaaggattcctggagaagacacttgagttgagatttgaaggaagagaaacttccctctgccccttccatgggagatgttaagcaggggagtggcatggctacactttgcgtttttcaagtttgcatttggaaaattgttttgcccacttcttgagcccctcttgc

SEQ ID NO: 469034 - DNA, 800 bp, Homo sapiens
gtgacgaactggaagcacagacgtttagttgtttcctgagggtcactcagcaagcaaactgtggtgctcacgttgcaacccaaggctggggactccaagggtaatacgtgtatctgtttctgccacaagcagggaatgcggagccttcgacagccctgtgggaatgtccctgtggaggaactgaggcctccagccaacagccatgaggatattgaccaagtggaagggattcgaagaagagcaggacacatgaatgggggcctgcaggaagtctcacctggacatttggagggcggtgctgacctcctccgagacgtcgtcacctacagcgccaccgcgctggtcctaagaagacacatcaagaaggcccttgctgatgcaggcccctcgaccttggacttctcagcctccagagctgcaagaaataaatctctgttcttcataaattacccagtctcagagataaaatgtgattcttattacatcagagcaagaatccatactatcagagcaagaatccatactatcaacacaatctcacggttgctgaccttgatcacctgtgaagtcacgtgcacagccacaagccattgactgtgaccaggggcgtggcttcatctcattggccgggtttgggtcacatggcaccagggagacagtatagaggataggtgtagccctgagaccgaggtggggatgggggtatggggggtgggggggctggggggatggagggtatggtgggactttgatgcttatttctgccctcatcattcttaggtttcccaccaaaggtactc

SEQ ID NO: 469035 - DNA, 501 bp, Homo sapiens
gggtacccttaatgaagtctactctttctggatgtccagccagcggcttagggtggcagagattcctggaagaccgcccctccctgcaccccaggaacgcctccctttgccgggcagcccctgccctggagtgctggagatacaggggcaaggagaccaacgagggaacagtgactctcacagaggagtgggttgacctcatttcctccaacaacagggtgccatataagagcagcagcagcgtgcattcagctcctcctacgtgccaggctatgagacaactattaatatccccactttacgggagagaaaacaaagctcagagaggcttgaaatccttttttgattttcaagagactgtaattaaaatgacaatacctctgacagtggtcatattaaacttgcatcagctacaagcttaagcaagggaacaggggtgctgctttaggaaagggctactggaatgtcctcacaacatggtggctggcctccctctctttc

SEQ ID NO: 469036 - DNA, 757 bp, Homo sapiens
gtggcttaatgtggctgccttcatctgatattaaccaaagaaacagagacatcacactcctccaagagcctccagattatagagactttaaggcatccgtcttgagagatcagagtcttataagggctggagatactgtgtgctggggcttacctgagactgttcctgaaaccttcagcttagctcattcacatttgactccagttgggccagtgctctctcggcttgtgtggctggctcagcttggggccacaggtctctacaatggtgtgtctgccctgccttcaggacccatatcccaaaatgtggaaaacaccatcggcagcttcagaaccaaatgtaactctcctctcaagtgtgaaataatcccattcaggtggtgagtgacttggaatcgaggtggccaaggtgtcatggagtagccatttagaccatagcagcttgggggaacaaggagctcatccaaccccatttgcttgggtctgtcattccaatgaggcttctgctgtagggaaagccttgctgttctttcccacagacctcagaggcatgtcagttaccacctcccaaggtcagcattcataccctgctcctgcctgagctggagccgctgacataatcagcaggcaaacccttctggaatgttagatgaagtcacctttaccttcctgtgacaggacaccctttgccaaaaagcacaaaacattccactctgtgtaaagctcatgctgttctgaccccttcttctgtgccagcc

SEQ ID NO: 469037 - DNA, 621 bp, Homo sapiens
ggaaaagaaactaaaggaaaaagatgggactaggagaaagtcatgggagaggcaagagaggaagaactttaggacacaggaatgagccagccatgcacttcgatattccagcaggtctcatgcttctcaaggttgttgaggacactgacgatgcacaatgttttcttgagcagtgctccgggccgtcattcctgtgcaggatcatatttcatcttcatagtcgacttccaacattagagacccaatctgtgatgtctaataataatgttggaaatgtgacaactattaataacttcatcatccaggatgatataaagccaaaagggaaggatgaaacaatatgggaataccaaagacagaaaataccgaatgtccggcctaaagcaggatttctcaatatctgcactattgacattttagctgggcagtttttggccgtgggggcctgtcctgcatgtggtaggacatttggcagcatccctgctctccccgcactagatgccggtagcagaccctcccccaaatgtggcatgacaaacagaaatgtctccagacattttcaagaatctcctggggacaaagtcaacccctgttaagaaccatgggcatacaggaaggtat

SEQ ID NO: 469038 - DNA, 577 bp, Homo sapiens
gacacatagtgagtactcaatgcatgttagctgtgttactatcatgattattctagttgtcctcaaagagccgtcccttgtgtctcagacgtcccagttccaactctccttaccatctgctggtagtactttcttcccttatggaatctctgcaaccgtcgaatctttgaaaacccaagtgaatttcgatctttatgccaaatgccttcacttaaatttcaggctgtacccagaattcacagtgagaaatagttgcaatgctcataaagaagcacataaaaggatgttcactgccaccctgcttgcagcagcagaaaactggagacagcctgaatacccaccagtaggagactggttaaataaatcatggcacgcccatgcaatggaagcaggctcagcagtcttaagcaatgaggatgatctacagaagggtctacaggacatattgataagtgaaaaaaattgcagaacaattgcatttatgtaaaaacaaaattaagcatcacattgaatgttgtatgtatcagtgcacagatgcacagagaaatgtctggaaggatgcccagaaaactagtaa

SEQ ID NO: 469039 - DNA, 461 bp, Homo sapiens
ccctcatctgccaggggttggctgctcttcatttatagtcaacggttgccacatggaaatgcaagcccagggggctagattttctgattttgcaaggagagctggatattttaatgtgaaatttcccacttccaagggaggcttggctgacagactccgatgggagtctttgattacttccaactacccattagttaattgctcagaggcaataaagacaaccaaggaaacaggagaagacccagtgattctttccaaagtcttccgaacttgtgtcaacaaccttgtagctaaatccattcttccgtatcacaccaaaaatattaaccggatgcacttttacttattcctaagaaatttcttcatgctaggcttgtgtctggccttgtacctggacctcgggtaaagatattaaaatcaaaccaaggcagagaaattaaaatcacatggaaagtgttttt

SEQ ID NO: 469040 - DNA, 880 bp, Homo sapiens
tgattgacatcctataagaagccctcagttaggtcccagttacatgcagcttaggagagggaggtatgattattatctccactttacagctgaagaaacagatctgaagccaatccctgagcctcctgggccatacactgtcccactatttcaaaagaaactcagtgacgagagggcagagggagaatatgtccagcatctcagcctcattgttttccacttggcagccccctccagttcagccgcctctgtgaacaatggtctttgttcttcacactttccctatcaaagcctcacagcagggatggccttcagaggcgatgggcgatgtgataattcctgtgccagggctgaggaggggggcaggaaaggaggggtcaggtccaactttgacccagttagttactctggggtctgcggtcctgccctgattcttcggttacctggaaatatgactctggcatttctatgagattccccagataaaaatctgggcaataatcgtctttgcccctttaatgagctattaagtggctttgcttaaataatagagcaattattttttagaatgctggcctctggggccctccccggtcttggagctttcacatccctacttgctttaccagggtgacaaatggagacatctttctgcttcttcctcctccccagggatgagaggcaggatccttcctccgttttatgccacctttcttggtactttagattcttaggatattcatgctgaacaaatattcatttttattatcaatttttttaggacagggatatccaacctttaggatttagtgttaatcactaattgtcaactaactgtcaatcactaatgaatcaactaagattgtccactttggatatg

SEQ ID NO: 469041 - DNA, 2000 bp, Homo sapiens
cttcccaccttaatggaagaagacagtcggagctgctattggtggcctaatgtaaaaagtggccacggagccattcggcatgtcattcttactctggagatactcagtggtggacggccacgtttctgccagcatgggactttctgctagtctgtgcaatgggtgggcaaaagactccaactacatctttccggaaagaggacttaagctcgctaccacggattggctcagtgaagagaggctgtggtcacctctgcatggtttcctggtacaaacacaaatttcctttcctctggctgcattcctaaaattaattaaatcttggctcaagaaggcttcttcatgccagcaagatgagaagactgaatgcagagaagctcaaggtcaaaagcaaggatgtcagctccatgaggttggggaccttgcctgttgtattcacttctatctcctagaacagcggctggcacagagtctttccaactcaaatggttgcaaggagaaggaagaggaggtagagaagaggaacgctgtttctagtgcttaatgtgtcccagaccctattgtagaggcttcagacatctataatggcatcttcaagagacctgtgtgcaccttgtctgagttgaagtacacaccctgaagaggagccagttatgaaggaccaaatgcacatattaaaattaaacatcacacgattctcaaagtattggttattaatgcccagtggtctcacttgcgctgggatccacattatttctgtgcacatttggaagacacattatcatggcaaactgccaggctgagatgaactgtgggttcaaccaatcaccaaagggttcattcatttatccctgagacaatttcctcagagaggaaaaggcacttgcctaaggtcacactgctggtaagtggcaaagccgaggtgtaaactcaggcaacctgtctctaagcacctcacataggcggtgcttcagtctgtttgtgtgcactcagacactttcaatgaaattttggcatgaaaaggtacagcaattgcgaggtgagctaaaggcggttattttccctctgctgaaacacgaagattcattgctgattctatgagttggtctttgctgctcttgaaccttcctccaggagttgaaagagacatggaactaattctcccctggagcctcccgagggagtacggccctgccgacaccttgacttcagcccagtgctaccgatttcaaacttcctacgccctgaactaggagagaatacattcctgttgttttaagccaccaagttgttcgtaatttgttacagcagccattaagtgaacaaatatagatcattaaaaaaatccgatgcataaacagtaccgtgccaggtgctgtgcaaatgggactgaatgctcaacgggacttttcagaggcattccctgcatccagtggggctcttccgtaatggaaagtccaatgaccaggaaaggcttcacttcctggctccactttccttctgctgaaacacaaagattcatcgctgattctatgagttggcctttgctgctcttggtgtgctccctgtaagcacaatcccaaggcccgatggagccttctccctgcatcctgtttaagcccagcaacttccctcgccaattagaggcttccccttcagccggtctggctttccccacacctgccgagggaagcacgtgtcggccattagcgtctcttcatgccaccgcttcatgtcacttcattgttccccagttggcaacagctctgcagaaatgaccccatttggaaatgtttgtgggagtctgagcaaaagatctacacagccctcttctggggaaacacgagggttatcagaactaccttttctcaaatacccatttcatgccagagctccatctcctcactgctcaagatgtggcccgtgcacccccacataagcatccgctgggggctgaggaccacacctctcattccctgcccagacctgccaattctgac

SEQ ID NO: 469042 - DNA, 584 bp, Homo sapiens
tataaatgaaagatctggcatttctaggtgacttaatgttcgatgagtatttgttatttggtgggcactggtaatctaacccgaacaagcctcattgcctcctttaatcggatgaccccagacactgagctttccttgggattttcttgccagcgccttcagactcgttgcagccgttgcagccgacgccagccgtctctctcgccccggccctcagaggcaggcgcgcaagctaaaaggcactttgcgagagggggaaccgtccattgcaatttgtgctgcgaaattccatctcgtgaaattgatagcaaaaggacggatcttcaaggcagcttcatgagaaacttgaaggagtcagtccacaataatttctggagcatctactttgtactacctgctgttctaggcactgtggtttcactggtaacaaggacagaactactgtccccaaggagttatgttctaattggtggatgggaggacacagattaggaacacagaaacaaatgaggtaacttctgtcactggaggtcagaaagggaggtgtctctgtggaggtaacatttagttcaaatttgaataac

SEQ ID NO: 469043 - DNA, 670 bp, Homo sapiens
gtaggcgatacgacatgagccattggaagggtgacaactctagttttgatgggcatagggtcacacattccttgctgtctggccctggccttggcaaaacacggtctgtgaatcagaggtttaaaagctcttttcctgagctgaagattctgatttcgtggctgtgcacacaggaaataaaaccccgttcttctaagtggactgggagaagtatgaaattacgactaagttgggtagctggagaaggccttaatgagaaactggcacctgggcctagaactgaaggaggtgagggagtcagcaaaaagaacatccaggcagagggaaccactgtgcaaaggccccggggtgagtgtgtgcgggtgcatttgaggcacctcatggaggccacagtggctagaagggagtggccggggatggggagagtggtaggagttggtgtgagaaagatagcagggagcagatttctgagggcttgtacgaccctgtgagctagggtgaggactgtgactttcattaaaagtacgatgagaagctgtcagaaagttttgaaagcataagcatcatgtgaattgatctgtgattttaaaactgatctctagctgttgtgtttatcataggctgtgatgattaatattaggtgtcaacttgattggattgaaggatgcct

SEQ ID NO: 469044 - DNA, 751 bp, Homo sapiens
ctctctggcttcttttccctatgttttccctccccgagtgatgccttggggtctttgcactggccacttctactccctggaaccacctccccagcaatgcccatccccacaaatgggtgtgacaggcagaataaccaccctccaaagatgtccacaactcaatcctactttatctttctccataactctcatttccacggagcatgctaccttttgggctccaccaaaagcatatctgcagacaagaatttgggtgcaaacagttgattttggaagcagtcccagaaaacatgaaacagtagccacttggggcagatggtgtgaaatcctcggagacttaggaccttgcagacaatgtccagcatgggaattggagcctctatttaccaactcccatcccgccttggcagaaggttgctcctggggcatgaactctcagcactcaccacctgtcctgtggacagagccagcacagttcagcagccagagtgaccctcaggcagacacacaggaagccttggtgtgtgcaaaagcagtgtgcagctgacctccagtaccgactatggggaggcaccgacagcatcaactaccatctccattttagatacgcgttttctttgttgaaataaacaggtcatattttagtttcctatttctgctgcaacaagtgaccacaagtttaacggcttaagcaacgcaaatgtattatcttacagctctggagagcagaaatttgacacagatgtcaagg

SEQ ID NO: 469045 - DNA, 612 bp, Homo sapiens
cagctcccttttcattttccctcacacaagcatttccctctgtacaatccttctgaaatctgaaagatggagaagaagttgcccaggccaagggatgcaagggatggtggaggtggtggagcatgtggtagggagagaacattccaggcaaagagagaaaatcctgcacagcgtctgtggaaggagaaagtacgaagctttcaagaagggggagcagtgataccagccttccaaagacccccaaagctgctagttgggactgaggggcccccagccctggctgcctgtacccctatccttgggctgcagatgaaggcagcaatgaccccggcaaaggatgaggggtcaaacagaacaggggatgaggaagtatcggagaaggagtcagcccaaagcattttcactgggcttctaagaaatccatgtgtccaaggtgtcttggtgccactgcacttggccccgaatgtctattaacaaaaaatcaccaaataacagatgctggggaggatgcatagaaaaggggatgctttatacacccatcgggggaatgtaaattagtacaaattctatggaggatagtatggagatttcttaaagcactaaaaatcaaac

SEQ ID NO: 469046 - DNA, 549 bp, Homo sapiens
gctggctgccatgtgcagaagagcaaaactggacccctacatttcaccatataaaccaacgcaagctctggcattcttgaggtgcagaaagccttggatggcccacttcagacttattattcaggaaaatccaaccccatggctgaaggcactcatggtgaggtgtctgtctgcagctgaacacttcctaaccgttaggaccattcccaacctgctctttccctatttaaagacagaaggaagggcagacactcagggtgaatttcctaatgttcttctcattgatcttggagtaaaacctccaaggaactggaggcctgagtcttggccgtctcaccttccattggctaccatactcctggcaggacccagtgggagtaaacatgggagacaagaaccaacactaagtgagcacctaccaagtgtatgccaggttccaagtgaggaaggctggtcgtcgggctgagctgggcttgacccttgtctttgctccttaagtgctgtgtgttcctgggttgctgtgaatgccattaattcatttctttttat

SEQ ID NO: 469047 - DNA, 725 bp, Homo sapiens
atagagcctccaccaacagggctgacatccagaccttattggacaggcatggccatggttcagcagatgccagagaggtgctgtgatgctgtactggtggaacttgctggaaatccacccccagggtgctgggaaaagctgttactgggaggtgtcttactggaggcactctgctacaaaactgctggaaggtgggtgggtgaaggggattgctgggggaggctgctggatgcaacctgctgccatgcgctgccggagccagggctggggaagcctcctgagctacaggaacggggcattacgggagccctaaagaaacctagtgagctgccatcagctgcagaaagcaaaaccctttcatcccgcaatgtctctccaacgccatctattggcaaacttaatattgtaccatctggatctagaaaggcttaccaatcatcatgtctcctttttggtttttggtggtgtgaaatgcagcaacttgtctttcaccttggaggagaaattttgacattcttcatagcattgagcccccggcacttcactgaggagtatctggtttggggcaaaccatatcacttctgagtctcagtttcttcatctataaaatgaagatgttttagtcaatattttattcatttgcaaatacgtctttgctaggcatggggaattcagtgatgaacaagaaacatactgactgtttccttaacatacaaacttagtgt

SEQ ID NO: 469048 - DNA, 658 bp, Homo sapiens
agccattttgaggacagctgtctaactgctgaggccagaaacctcccgcagaagatccgatgacttttagaatggagaatctgagaatgacaaaacatggggatgaggggagaagagagagagatattcaagatgacacagacttcagggttgatgagcaggaggagaagaagagtttgaaggaagaggttcagggctatgtctggagtgaccctgagcttccaggtcgaggcatcttgtgggaagatggagatactgaatctacagctacagacgtgggagtcatgggggaagggctgattgtctctggaaactatagaagggccatgctgaattttaacacaataatggcagccggatgtcctgtctgctttaccacctgcctgcctatccacactgtcctagcagaagttaagctgacttggacagatgtttctcgaagtgtgggccaccagttcctggatccaagtcgcctggggagggagggaattaaatgcagatctgtgggccctgccccccaccaactggatcaggatctggggtagcctgggaatctgaacactaaccagctcccggagatcaaggattgagactttgccaagacagatgcagaataagcaatgggtgaggaattaaaggtgtcagcaagacagtagcc

SEQ ID NO: 469049 - DNA, 647 bp, Homo sapiens
caaagttctccagatggccgtgtgtgctctgattcagcatccaatatatggtactgtttcttccatagccaggattcacgggtccaggaatcaaggggtggaagtggaagtggcaccactcaccatcaaccctaatgatccactagcaaaatttttacttcctgttactgcgacattatgttctgctggcctagaggtcttagttccagagggaggaacactgccaccaggagacaacaatggttccattaaacttggagtcaatgggaaagtacagcagcccaatccaggcaggactacgaatgactcagaccattcaggaatgaaggaagtagatgactggagagatggcagcatggaaaggacttggcctgatgttgctggctttgaagatgaaggaagtaggactatgagctaagggatataagcagcctctaagaagattaaaggggtaaggaaatgaattctctcaccaaggcccccaggaaggaacatagtgctatctacccttgagtttagcttggtgaggtccatgtcagacttctgtcctaaagaactgtatgataatacatttgtgttgcttatattgctaaacttgtgctaatttagcaacttaaacaacacaaatgttttgcttgggataatac

SEQ ID NO: 469050 - DNA, 563 bp, Homo sapiens
ctcacccctttgacaggtcctgtttagaaaccagccacagcatttgggcactccacatgggattcccagctttccccctcttccgactcagcaactgtgtcttttccccatccacatttggtgttttctcatcacagatctgttcaaattatgttggtgtagtcaaaattttggtttctctctgcaaattcattgccataccaggaaatgagcttgacaaagtggtcattgacggcaatgccagccccagcttcaaaggtggaagggcgggtattgcttttaaattccaaagggacaacctggtgctcagtatagcccaggatgcccttgaggggtccttgggtgcctgcctcaccacctttttgatgtctgaagaaacctgtctagcaggtttctccagacaagaggtcagttccacaactgacacagtggtgctgggaacacagaagaccatgccagtgagcttcccattaagcttaggaatgaccttgccctctcattgcccatttacttggcagcaccagtagatgcaggaatggtgttctggaaagccccatggctgt

SEQ ID NO: 469051 - DNA, 690 bp, Homo sapiens
agccaattttctcacaaccctgatagtgtgcattagagggcctacggaaaaccagggccaaacctctcaattactctaaactgtccatgataaacagccagatgagaatcttgtagcctttatggaaaggctgagagaggcactaacagaacacccctccttatcccctgattcagtcgagggacagctcatcctaaaggacaagtttattagacaggcagctgccaatattaaaaggaaactacacaagcaagctataggaccagatagcaccttagagaacttcctgaaagtggccactttggtcttttgtaataggaaccaggaggaggcccaaaagaaagagacaatggtcagaaggacagagactctagcagcagctttgcaggcttgcaaagtccaggatcccggaggtgcatctgctagttgctatcagtgtggcaggccagagcatgttaagaaagaatgcccatacagcaagacaaagccacctcaaccctctccagcctgtggcagagacaacaggagatggaactgcccccagaggtggaggtcactgggttcagaaccagtcttactgatgatccagcagaactggatcccggggctcaaactccagctccagcggctcaaactgccattacagcacaggagctctgagtgattctggaaattaaaagaaggaaagta

SEQ ID NO: 469052 - DNA, 1542 bp, Homo sapiens
ctgaatttcagtttctcccaatttagaatatcttattatgtccagatgctggaatcctgtctatccagatgatccctggttccatggccaagtttctgctaggacttacttcctggcagctggcagagcagacagtcactgtggcttcaatctgatcaagttttttaaaggacttcagtaccacccaattgtctctgggcctctggataatgatttattattatgggaatacttctcattgcttgcactaggagctttcacaaatagcttccttagttccagatacagttggaagatcaattggaggagcaaatgctctagaagcaaaaacttccccaaatcttactattcacattcacgcttacctcctttcctcaaatctcagaaaaagcagtggcatttctcttttcaatacaagttctccacttgtgcttttaatcccatttctttcagccacctccagggccttattcgagttaatttttgatctctattttcttttgttttcattttcccttctattgaaatatatgacatatagtaaagcatacaattcaattatggatgactgacaccttttgtaaaagatagggacattttgtatatatttggagaactgacacatttttaagtctctagctttgatacatttctaaattgagcttgtcttcatttaatatgccactcttaaaacagtattcaagtattgagtgttgaaatagactagcattttctctcagctctaaaatttgcatttcattcataagaagaaagtggacagtctatcaaataaagtgtcctgaaaatgacctcaagatatatactcatcaaaagaacagcctgccacctcaacaagaaaataacggaccctctgcaaaaggccagcttgtaggagaatacttgggtatttgggaaacaacttcaggtaaaaggaaagaaattacttaatgtaatgtaaaatgacactcccacattatgtaaattcacccttagcttattttttaaaaagaattctgtacaactttactcagaaaatattttatgttaaactttactcagaaaatattttatgttaaacttttctatttattccaaaatcaactttaactcttctccaaagttctttggaagttcatttttatatatcttaattgtgatgttcttcttcaatctttatagcatctatatagcaagggtttttaagatcacatttttttttaacttgaggctagtacatgttactcagatatttacacttatattaaagagctgggttaattaataagataattatcaaaacctagggctaaataagattttgcatggtaatctttcaccttctcataagaccaaatttaaactctacagataattattatattttctacttctaatactacagcctctgattatgatccagctcaggcctaattttaccaggtcaaacatatatgatgtatgccttcagaaatattttgcatgcttgcttcatcatcacagagctaaagctaaaatcaaggaaatttttactgttctacaatt

SEQ ID NO: 469053 - DNA, 1343 bp, Homo sapiens
caatttagaatcttattttagttaagatggacccagcagtactccacgatcagatgaaaatggtagatttagaatttggtccaagaggaccagagggcatgaataagctacatgagcaggtggcccagaactctgtatcacttactaaggtctatgtcaacatctctgttccagatccacctctgaacctacaggagtcccatgtgatcagaaggaggaaaatgaaagaacttgatttggggatggaagcatcctacatcataggtcactggaaaagcctatggaaagaaaagctgaagcatcactttagagcaaatactgtgaatgagtccaaaaaccaaccattaaaatcaaatattaccgcaattactgtcactttcaatggtctattggaggaaattttgctacctgtccccacaactactgcccctcataagaggcacattattgtcaaaacatacagcctgacatgaaactaaaactatggctgctgccaaggcagtttgacctccttgtgcccagggaccaacggactaaaaggagaattaccatctttgcaagagaaattaagtgtgaacagcagaaaggcatgcagaaatgtgtataaaacccagactttatgtattcctcacatacatctttatataatacattatatgcatctttttataatttgtatccattaacaaactactatagctatagttggtttaaggaattgaacaatgagaacacatggacacagaaaggggaacatcacacaccggggactgttgtggggtggggggaggtgggagggatagcattaggagatatacctaatgctaaatgacgagttaatgggtgcagcacaccaacatggcacatgtatacatatgtaacaaacctgcacgttgtgcacatgtaccctaaaacttaaagtataataataaaataaataaatagttttgtcttttaaggttttactagagttataattgatttacatattgatttataacattagactgttttgaaagatattttaaccagtaattgttttactagtttgttcaaatagcatataacattctatttattctgctccttcctatacggcttattaaaagttttgtttgttttcttatgtgtttatattttactttttatatttacttattttacttttaatcattgactatacaaaatttatttttatagaaattgttctcatcaccattgactaaataatatgttttcttcaaaatgtattatgccatgtttattatatactaaattttcatgtgtattgagttcatttctaaaatatgtattctggttttaagacatgtgtactcattcat

SEQ ID NO: 469054 - DNA, 549 bp, Homo sapiens
cctcttttttctcctcctcttcagtctactcaatgtgaagacaatgaggatgaatacctttatggtgatccacttccacatgataaaactcccatccccctgggacagagcacctggggagaggggttgttgtgggctaagcttcagcagacttaaacattcctgcctgccagctctgaagagagaagtggatctcccagcacagtggttgagctctgctatgggacagactgcctgctcaagtgggtccctgacccctgtgcctcctgactgggagacacatcccagccagggtcgacagacacctcctacaggagagctctggctggcatctggcgggtgcccctctgggacaaagctttcagaggaagaagaaggcagcgatctttgctgttctgcagcccctgctggtgatacccaggcaaaaagggtctgcaatggatgtccagcaaactccaacagacctgcacaagagaagcctgactgttagaaggaaaactaacaaacagaaagcaataatatcaacatcaacaaaaaggacgcccatgc

SEQ ID NO: 469055 - DNA, 743 bp, Homo sapiens
cggcgtttctcctgcctctggtggccctgatgctgctgttgcctcttctaaaccccatcgttcctcatggcctatacgagtcctcagtcccacaagagccctctctctgtccttcaacagcctctgaaacatttcccatcctacagcacctgttcttgctatgctacatgtaagggacttatccacagctcccatattttacaacataagaagagtggtaggcaacagaaggaaaagtgggtgccgaagcccaaagcaggggccagccctgagtgctttcgagtggaaaaaggtccagtgcaactggagataagtcccggggggcctccagcactcatgatgcctagtcttccttcatctttcttaatgttcctcacattctttggtgaacttcatcgtctttctctttggtggtgtccactggacacgtctgatccccaagggaataggggtagttgtgttcatgctgtgtttgtagcacttggactactgtccatcccgcggcagaagctcagtaaccatgctggtgctggggaatgaatcagatggggccaattcagatacctggcctgaaagtctgtaactgagcagactttgggcaggcaccaaatggcaaaatgctgcatctgttaggaccttttcaaattcaaaccaaactggtttatgcagaaatcagaatgtattggtccactgtttaagactggattcgcttggttatgcgaacagtcagactgtgtccaatt

SEQ ID NO: 469056 - DNA, 796 bp, Homo sapiens
acagcatcagcagctggcccacagatcagggctggaaggaagaggcagggaagtccaaaatctgcagcacgagtctagctggcagtgttccctggagtttagccggcagcgttctgtagtgtctagccaacagtgttccatagtgtgtagccggcagtgttctgtagtgtgtagccggcagtgttccgtagcgtctagccagcagtgttccgtagtgtctagccagcagtgttccgtagtgtctagccagcagtgttccgtagtggtcgtcttctgtggaactacaaagaatcagtgttgcagcccttgcatccagtcacctgtcccctaaactcccacaggaagactgaaggtagccctctggaaagggtaaatgagagatgttctggcatcggggcacctgtcccagctgaaagactggaacaggagtccccaacccctaggctatggaccagtattggtccgtggctggttaggaaccgggccacacagcagaaggcaagtgatgggcaagcgagcgaagcttcatctgtatttacagctgctccccatggctcgcattactacccaagctctacctcctgtcagatcagtggcagcattagattctcatggaagcactaaccctactgtgaactgcacatgcgagggatctaggttgcacgctccttgtgagaatctaatgcctgatgatctgttactgtctccatcacccccagatgggaccatctcattgcaggaaaacaagctcagggctcccactccttctacattatggtgaattgtataattattt

SEQ ID NO: 469057 - DNA, 765 bp, Homo sapiens
gttttgttttggaggatttttttttccataagttattgggaaaagttcttaaggatgatgtccacctgaagtatggggctgcctgcaggacacaacaaagcagaatgttatgcagcaggattaggaacagcaagcagacttcccaccgtgaggtctgaagaagcaaaggtaaaggatgctctgacccagagagattgctctgtgaagtgcaccactggaggggagctctggcctttagacaaaggacacagccagcccacggtaaccctgcagagaataattgcttattcaattacggtcctttgccttgatcaagggtattaccataagaaattaactgacgtatattctgctttatcggtgcatccctttacaaatagaacacaagaaaccatcacaggcaggggcatccaagggcaggctctggatgcaaattttcagccaggggtttccagaaaaaagacccatccctctgtaggtgcccccaagcccatactctctcaatgatgcctccacttgacatttctccctctctcctgaatcatcgatttatccctttttattgtcaagaaaatatgttttagtatcctgttatgggctgaaaatgggtctcccctccaaattcattatgttaaaatactacccttcaggacttcagaacgtgactgtatttggacatagggactttaatgaggtaattaaacttaaatgaggtcatactggcatgccctaatccaatatgcttggtgtcctcgtaagcagaga

SEQ ID NO: 469058 - DNA, 907 bp, Homo sapiens
ccttgcatccaaaatgctaccccagcccagcagtgagcctacacaaggaggagttatgtgtcgcgacacaggctcaacaagccaccttcgtcatcagggcaaggcaggaaaaagccgccattgcacagtgggagacgtccaggaaaaggagagcattcccgctgcaaacccactcagcatccccggccagagtccccaggtgggtgatcagatccctggccagagcccccagctgggtgatcagatggaaggtgggtgtggctacaagtttcatgtggagcctgtcccactatcccattgtgaaaagagcaaagaatccctgcctgctcccctcaatactctcaagtcaactcttaaaattaaacttattcattctcagtgggacagcagagcatttgtgcctgcagttccttctccctggaattccctttgcctctacccattcttcattggggttcacatcccaagcatgtagctactcttgctcgcttttggtgtccattcgtatgacactcctttactttaagtttatgtgagtccttatgtgttagttatctaattccttgaatatttctcccttcacttcttgtatcattgtttggatttccttgcattgggctttgcctttctctggtccctcccttattagcttaataactaacctcctgaactctttttcagatatgtctatgtcttttgctgcattggcactgtatattcttactagtatagttccatgcttaaatcctggtggtgtaaaagcatcagtgctggagtcagacatccattttagtcatgtgacttccagtaagttattttctttccaccagccttaattttctcatctgcaaaatagccacgatggccatttctcttgatggtagagcattgatacaatgaccttttc

SEQ ID NO: 469059 - DNA, 987 bp, Homo sapiens
gctagcatctgctagtgtgcactgtatgcatgagagtcagagaaattattccagaagaaagacgaaaggggtgaaagctctatttaactgctcccattgcttgatccagacacttctgacagtctgtttttacagacatggcaaaacaacacttggaagtcatttgagaaaatattcctggtatcacagagcgaaggactctcgccatgttgcccagactcatctcaaactactggacccagacaatcctcacactttggcctcccaaaatgctgagattacagcttacctaaagttaacatctgatgacatgatcgcaactccatatcctgagttgatttcaacctatgatgttggaattttccacatggagataaacactgggaagcagctaatcattctctctggatttataaggaacaaatggataagtgaaacttgaaaacaatggccaaagtactaagaactaatgtttcttcaacaaaacaaatacttttactttaagaacagaagataaaaggccaaagttgtaatataagacaaattacggaaatatacacttatacatataaaaccactcctctttttaaaaaatcatgctttttaagaagaatcttctcatatcagtgagaaagaaagttatcttaacaaacaaaaagtattttgaaaaaaagcgttcacatgtataagaaagaaaatgaacaaataaataggaaaaaagatctctggttcaaccatatcaaagcttcttcatgtttgttattttactctaaaggacacctccctgatcttgaactgataatacagttaaaagaattaacagaaagagagagggatagaaatggtcacgtacagaatgaaaaataaaggaaatttttttcttattattttcctaatttgtcttaattcaaatgagcagaatagagtgctccaaatcagaactgtgactcactagaactaatatattttgtcaacatatttataatt

SEQ ID NO: 469060 - DNA, 686 bp, Homo sapiens
tttgctactctctgaaatttatttggaacccccaaatccatccttgcagtaccttcagtcgttcacagacatgtgcagagaagtgaaaagtttgagtcactcaaaccaagaaacagtctatggtctatgtctttctccaaagatgattttgaaggcttcaatatttaaaagggaaaagtgggatggagaggaaagaggagggtgtggtgatccatatgttgcaaggaaaaggagcagggcgaccaagacagctagagtggacggggcagaataccagataggagagaactgtacacagagagaaaaaagactcagcaacagcaaatccacagatcttcagagggccccccgtgagtatacagcagagtacttggcaggacatgaatgtgaggatactgccccaggctggggacagaaccacctgaaagatgtctatcctggttccacgctgtttacctgtcaaagagaatgaatagagcatccttagcgcttgctatttgcccagaaaaatatgttttcagtgatttaagagggtttttttccccccatatcttttggatattaatcttttgttatacagtctccagagtttttctggcagtttgtcacttgtgttttgttgaatagattatcaattttgatattgtcaaatattttcctttgtggctcttggattgctctttgaa

SEQ ID NO: 469061 - DNA, 1581 bp, Homo sapiens
gcttaagtctctctagaattcttaaatttgtgaacatcccaagaagtggaaccaaaaatgaggggattttcttttctatttcagtgtaaaacctgttctgagccaaaaaagataaccagttcctctgccatctatgacaatccaaatctcatcaaaccaattccagtgaaacccagtgaaaaccagcaacagcgtatacctcagcccaaccagaccttagaccctgaaccccaacacttatccttgacagctctgtttgggaagcaggacaaagctacatgtcaggaaactgtggagcctccgcagactctccaccagcagcagcagcagcagcagcagcagcaagagaagcttccaattaggcagggggttgtacgctccctgtcctatgaggaacccagaagacactcaccccccattgagaagcagctctgtccagccattcagaaactcatggtcaggagcgcagacctccacccattgtcagagctgcctgaaaaccggccttgtgaaaatggcagtacccattctgcgggagaattttttacaggacctgtccagccagggtctcctcacaacattggaacttctcgtggtgtacaaaatgcttccagaactcagaacctgttcgagaaacttcagagtaccccaggggcagcaaacaagtgtgaccctagtacaccagcacctgccagctcagctgccctgaaccgcagcagagctcccacttctgtcacccctgtggctccaggaaagggtctggctcagccaccacaggcctatttcaatggctcccttccacctcagacagtaggacatcaggctcatggaagagaacagtccacactcccaagacaaacactccccatctctggtagtcagactggcagctctggagtgatctcccctcaagagttactgaagaagcttcagattgtacagcaggagcagcagctgcatgcctctaaccggccagccttggccgctaagtttcctgtgctcgctcagagctctggaacagggaaacccttggaatcctggatcaacaagacacccaacacagaacagcagactcctcttttccagcgcatccctgctacagcagctccgtctctgcttatgtcccccatggtgttcgcacaacccacctccgtcccgccaaaggaaagggagagcggcctcttgcctgtgggaggccaggagccacctgctgctgccaccagcctcctcctgcccatacagagcccggagccctccgtgatcaccagcagcccactcaccaagctccagctccaggaggcactgctgtacctcattcagaatgatgacaacttcttaaatataatctatgaagcctatctcttcagcatgactcaagcagccatgaaaaagactatgtgacagcaaggccttttaaaactgattttcaaggtccttctagaactccggcacaaggttctttcatgttgagtgttgtttccttcaatgtttctgccttttttaaaaaaaaagtatgtgtaatatgaagtaaaatgtttcagacttttttttatactcaagtgttttttaattattattata

SEQ ID NO: 469062 - DNA, 3270 bp, Homo sapiens
gagaagtggagggggctgatggggctttttgtctctacctgtccttgactccgcggctgcctgtctccactctgcctcggccgtgtcaacacacgctgcaccaagttggggactgaggcagcggtcaggacaactgtcatcaaacgtcggcctcacgcctctccgcgccggcctcctggatatttttgtcccgaatcgccctgatcagtgcccagcgcgccgccgcgggtgcttgtgtagactctgatggccgcccggccccggccctctcgtcctctcacctgcgccttcgactattacaactcggtcctgatcaacgagagggacgagaagggcaacttcgtggagctgggcgccgagttcctcctggagtccaatgctcacttcagcaacctgccggtgaacacctccatcagcagcgtgcagctgcccaccaacgtgtacaacaaagacccagatattttaaatggagtctacatgtctgaagccttgaatgctgtcttcgtggagaacttccagagagacccaacgttgacctggcaatattttggcagtgcaactggattcttcaggatctatccaggactttatgtcccaattggaaaaatgaggcgcactcgccaagagtgttcaacagcaatctggaaaatggcacaggccacactctgtggctagtggccaacttaatagagtccatcaataaaaatagaaaacacagagcacaaagtttccaagagttctacctctttttgattcccatttaaaataagtcagctctccatttcaccccaacccatttttatagtttagcacacagtccaggaagtcttaaagttatcccacttttctgaaacaggaaaccagaaaggcccgagaggactccactgtgtccacaggctggaaagtcaatctctctcttggagtgccaagggaactcagagctcctgcagttcccatagttggcattgtgttcctctgccagaattcacagctagctattgtggctgtttcggttctctggagcttcaatgaataggtttatccttcttccatgcagcagttcacgtgcccctcttgtctactccagggtggaattcctgtaaatattcctgccacatcagggcttccagagacaccaacttatatgtaaacaacacagtccagatgtgaacgcatcagtcagtagagagaggccatttctcactattttgaattgcactatttttattgttgttgagttttaggagttatctgtatattctgaatattgatcccttatcagatatgtgatttgcaaataatttctcccattctgtgggctgcctttttactctgttcatattgtcttttgatgaacaaacttttaaattttttctgaaatccaatttggttattttatcttttgttttctttgcctttggtgtcatacccaaggaatgactgccaactctaatgtcataaagtgtttcccctatgttttctaacaggagttttatagttttaggtcttacatttccgtttttagttaatttttgtatatggtatttggtaagagttcaacttccgttttttcatgtggatatacagttgccccagcaccttttgttgaaaagactgcctttcttccattgaatggtcttggtactcttgtcaaaaatcatttaatcatatatgtgggggtttatttctgggatttttgtcctattttattggtctatatacctttctttatgccagtaccatgctgttttgattactgtagcttttcagtaacttaaaaatcaggaagtgtgcctccatcagtttttctttccccccaaattgtttaggctatttggggtttcttgagttccatataaattttagaatgagtttctcttgctcgttgtgattgtaatagggattgcaatgaatcagtagaccaccttgggcagtactgacatcttaacaatattaagtatttcagtccatgaatatggaatgtgtttccattatttctgtccttaatttctttcagcagtgtttcatagttttcactgtacaggtctttcacctcattggttaagttaattcctaagtattttattctttttgatgttatcataaataggatttttaaaaataatttctcagattgttcactgttaatgtatagaaatgcaactgatttttgtgtgttgagtttgtcccctgatactttgctgcatttatttattagaactaacagttttttgtggaatctttagggcattctacatatgagatcatctgtgaacagacataattttacttctttctttccagtttgaatgtcatttatttcttttttatgcctaattgctctagctaaaatttccaatattatgttgagtagaaggggcaaaagtggacatcctggtcttgtttttgattatagagaaaaagcttctagtctttcaccatagagtatgatatttgggatgtgattttccatatatgatttttatatcagtttcattctattgctagtttttttaatgtttttgtcatcaaaggatgtagaattttgtgaaatgctttttatgcatccattgggatggccatggaattttttcccttcattatgttaatgtgtatattaccttgatcaattttcatatgttgaaccatccttgcattccaggaataagtcctatttggttatggtgtgtaatccttttaatatgctcctgagatttgcttgctagttttatgttttatccatgctgccaatctctgtgttttgatgggaaagtttaatccatttatatttaaagtaattactgttgagggacttatttccatcattttgctatttgttttctataagccttaagcttttttgtccatcattttctgcattactgtcttcttttatgtttagctgattttttatagggaaacatttaaatttctttctcatttccttttatatgtattctatagttattttatttctggttaccagagggattacatttcacatcttaaaattataacattctaatttggatttataacagcttaacttcaataacatacaaaaactcagctcctttacagctccttatctacccactttggttgttgatgtcacaaaattccttctttatacattgtggtgcccaaaaccacaaactaataattctgtttttttaatttttaatttttgtgggtatatagtatgtgtatatatatttatggggtatatgagatattttgatataggcatacaatgtgtaataatcatat

SEQ ID NO: 469063 - DNA, 1624 bp, Homo sapiens
cctggcctgttaggtggcacatccccaaccactgccaccccagatggcttcagcactgtgtcaagtggttatggaacatgtgaaacctggcatagatgggttgccctgaactttgggtgggctcgagccagcatctgaacagaaataactgcagaccccttggtcaggtacattcaagctgctacttctcccaaggacatagtgattttggtggacgtgagcggcagtatgaaggggctgaggatgactattgccaagcacaccatcaccaccatcttggacaccctgggggagaatgacttcattaatatcatagcggcggaccgagacaatcgagagcatttcaaactgctggtggaggagttgatggtcaaaggtgtgggggtcgtggaccaagccctgagagaagccttccagatcctgaagcagttccaagaggccaagcaaggaagcctctgcaaccaggccatcatgctcatcagcgacggcgccgtggaggactacgagccggtgtttgagaagtataactggccagactgtaaggtccgagttttcacttacctcattgggagagaagtgtcttttgctgaccgcatgaagtggattgcatgcaacaacaaagtttccagagagtattcggctatgagccatctgcagctggggagggtgcaggccctggcgaggggttcccagggaagccctgccttccacacccacgcggccttccccaccgcaggctactacacgcagatctcaacgctggcggacacccaggagaacgtgatggaatacctgcacgtgctcagccgccccatggtcatcaaccacgaccacgacatcatctggacagaggcctacatggacagcaagctcctcagctcgcaggctcagagcctgacactgctcaccactgtggccatgccagtcttcagcaagaagaacgaaacgcgatcccatggcattctcctgggtgtggtgggctcagatgtggccctgagagagctgatgaagctggcgccccggtacaagtccggtttggaaaggactcctcaatcaatgatggaagcatggcactggctcagttacgttcctattgaaaacactcactgctgtgagctgccatctttgaccgtcctgtggcccccaaacccctgcccaactccagatgcccagcacaaacagcaggcctaatgcgcctccaccctggactctggcagcttggagtgcacggatacgcctttctgaacaccaacaatggctacatcctctcccatcccgacctccggcccctggtaggtacagatcttctttgccttgggatccttactgtatgggatttgggggtaattcacaaaaacgattaaaacaacaaacacacattgggctccatttaggaacccagtgggtaatatgagaaaaaaaatgtattcgagtcatggtccctgttttcaagttgtttagattctatcagaagagacaaggcaaaaacatgtgaaatgactgatgagtgggccagagagcacgtaacgaagtgtgcagttttgaggctaaagagcccgcagggccattattcacatctgcttggagtctctcagaactctgggggcctgcgaagttgggtgaa

SEQ ID NO: 469064 - DNA, 862 bp, Homo sapiens
cctgggccttccaagcttgtagagacaaatgattggattcagaatcagagagctggttaccaccagcagcaggaggcgatgtggcaggtgagaagtgtgcagggagcacctccaatgaatgtttgtgactggaatggccgttatgagtctgtttctcatgataaccgacttggagaagtcaggctggggaggtggactggcccttgggtgctccagaggccatcgtgtcacagatacaacttgggaccgagtttctgccacctacaatcagaaacacccccaaaacatgtctccccatggaaggttccgggaactcttggccactccattctgtgtgaccaaaattctccaaagggaaaagtgcttcctgtggatgaatgacatctgtatgaaaagccagccagccggccgatttctgtcctttgaagacgcttgtcagcgagtgctgcgattttctttacagcagttttaggttcacaacaaaatcgagagttgccgtatcctctctgccccaatatgtgcatagcctcccccattatcagcatctcccaccagaatcgtacatttgttacaaatcaatgtacattgacacatcattacccagagtctgtagtttacattaggattcattcttggtgtggtatgttctatgggcttggacaagtgtataatgacatatatctgccatcatagtatcatacctaggatttttgctgccctaaaaatcatccgtgctctactacttcatccctccctgctccctccaacctctggacaccagtgaccctcttactgtctccatagttttgccttttccagaattccatatagttggaatcatacagtatgtagccttttcaga

SEQ ID NO: 469065 - DNA, 1321 bp, Homo sapiens
gaaggctaagggagtgtggcgggcggctccgggagccaacatgcctcggtatgcgcagctggtcatgggccccgcgggcagcgggaagagcacctactgtgccaccatggtccagcactgtgaagccctcaaccggtctgtccaagttgtaaacctggatccagcagcagaacacttcaactactccgtgatggctgtatgggacattccttattcctttggcccagacagctttgttgagcctggtatcaatgcgcacatctggagttcccatctccttcatggcaaatttctgaatctctttgagtgcctgaggggcacgcttcttgaagcccactccatagatgtgcttgtgaatgttgatggtgtattctcgggttaccacttcgttgatggcagaatggccctttttcttctcgccacccttctttgcaggagccattctgctgggtccaagttggaaaacatccgggaactgatcgaggtggatgatgtaatggaggatgattctctgcgattcggtcccaacggaggattggtattttgcatggagtactttgccaataattttgactggctggagaactgtcttggccatgtagaggacgactatatcctttttgattgtccaggtcagattgagttgtacactcacctgcctgtgatgaaacagctggtccagcagctcgagcagtgggagttccgagtctgtggagtttttcttgttgattctcagttcatggtggagtcattcaagtttatttctggcatcttggcagccctgagtgccatgatctctctagaaattccgcaagtcaacatcatgacaaaaatggatctgctgagtaaaaaagcaaaaaaggaaattgagaaatttttagatccagacatgtattctttattagaagattctacaagtgacttaagaagcaaaaaattcaagaaactgactaaagctatatgtggactgattgatgactacagcatggttcgatttttaccttacgatcagtcagatgaagaaagcatgaacattgtattgcagcatattgattttgccattcaatatggagaagacctagaatttaaagaaccaaagcttctagagagtatggtatgtgcctgtggagaaaaagtgaaggacccgattccagtgccttccccactggacactggggtttcaaagatgaatctgacaattccagtcctcgaggatttcactgtctcataggcagggctgacagaaattcagtaaatttacacaaatttactgaagttccgtggatgccagacactggggatagaacagggatgcacagtg

SEQ ID NO: 469066 - DNA, 1976 bp, Homo sapiens
gtcatggtctccattttgcagattcgggaaaaggtggttcagttattatccgtcctctaattgggactccgagccagggctatttctcgcgctggcgcggttccaagaagcatcccagccatcactctttcacctgctccttagagaagggaagatgagcgagtcgagctcgaagtccagccagcccttggcctccaagcaggaaaaggagggcactgagaagcggggccggggcaggccgcgcaagcagcctccgatgagtcctgggacagcgcttgtagggagtcagaaggagcccagcgaagtgccaacacctaagagacctcggggccaaccaaagggaagcaaaaacaagggtgccgccaagacccggaaaaccaccataactccaggaaggaaaccaaggggcagacccaaaaaactggagaaagtcctcggaggaggagcagtgaaccgtgcgtgccgcctgctcctcactggaggagcagctgccttctgggactggacagctttgctccgctcccaccgccctcgccccttccgcaggcccaccatcaccaccgcctctggccgccacccccatcttccacctgtgcccacaccaccacactacgcagcacaccagccactgcagggctcccatgggctgagtggggagcagttttcccctggcctcagttcccagctccccccgcccacccacgcatacacacatgccctcctggacaaggctagcatctcacttagccgcaccctgcacctgctgcgtccccactcctccctgcactaggttggacagcccccttcggctacaggaaggcaggaggggtgagtcccctactccctcttcactgtggccgcagcccccttgccctccgcctgggatcgagtacatattgtggtgatggagatgcagtcacttattgtccagcctctggctgatgtccacaaactcattaccaatctgtttggtactagtccacgttgatgtacactctggtgtacacactttctctcagccagcctggcccgtgggccacgtttagaggatatgaggcggtattgtgcatattgatatgttgctgcacttggcttcactgttcaggatttatttaggttgataacgtagttctagcttatttcatagctgagcatcatctgaatatgcctgaatgtactcacccattttcctgctggtggtttcatttttctccaaaaactctgctgtggctcttccccatgtgtgagattctctaggagtggacctgcttggggcgggggcaggggtaagggtgttgagaacacctctaggctgagtgatttcggtcattccctagagttcatcctcgcaagctgctccatccttggcatcagaagacccacttctcgagacgttacctcgtgattttaatttgccagtggagttgagcatcttttcacatgagctatttgttttctctcgtttacaccatttaaccatgtttcttttgggggtatagttgcattttccaagtattttgatccgtttgcaatttattgggtgtaagggatacagctttatttttctcaagatgaccccccacataataatccaactattacctactaagctgaaacaccacccttctcaagtgatgcactgaattaccatagctttaagaggtttggtgtgcttccttggtttttgtctgcctgatgtttgttaggattggcctaaggccaccattggtattctcatatatcagtatgaattatatgtcactcccattcagctgtcaattttccctgaatcattaaacatttctaactaggaacaaaatagttcctgtctaggaacattgacccagtatgacccctgatcgctttttgttcattccaaggcattttttccttctcgtgcccgattgtactgactagcacctctagaacagtgtttggtagtgggcaagagtggacttggaatgcaactctaaagc

SEQ ID NO: 469067 - DNA, 1640 bp, Homo sapiens
gtggccgaatgggaacagctccagtctacagctcccagcgtgagcaacgcagaagactagtgatttctgcatttccaatggaggtactgggttcatctcactggggcttgctggacagtgggtgcaggacagtgggtgcagcacactaagtgtgagacaaagcagggcaaggcatcgcctcacctgggaagtgcaaggggtcagggaattccctttcctagccaaacaaatctgtgacagatggcacgtggaaaatcaggtcactcccactctaatactgtgcttttccaatggtcttagcaaacggcacaccaagagattatatcctgtgcctggcttggagggtcccacgcccacggagcctcgctcattcctagcacagcagtctgagatggaattgcaaggtggcagcgtgactgggggaggggcgcccaccattaccctggggaggggtgccactcattacctactgaggcttcagtaggtaaacaaagtggccaggaagctcaatctgggtggagcccactgcagcacaaggaggcctgcctgcctctgtaggctccacctctgggggcagggcataggtgaacaaaaggcagcagaaacctttgcagacttaaatgtccctgtctgacagctttgaagaaagtagtggttctcctagcacggactttgagatctgagaatggacagactgcctcctcaagtaggtccctgacccctgagtagcctaactgggaggcacccccaagtaggggcagactgacatttcacatgactgggtacccctctgagacgaaacttccagaggaacaatcaggcagcaatatttgctgttcagcaatattcgctgttctgcagcctccactgctgatacccaggcaaacagggtctggagtgaacctccagcaaactccaacagacatgcagctgagggtcctgactgttagaaggaaaactaacagacagaaaggacatccacaccaaaatcccatctgtacatcaacatcatcaaagaccaaaggtagataaaaccacaaagatggggaaaaaacagagcagaaaatatgaaaattctaaaaataagagtgcctctccccctccaaaggaacaactacatgatgaatgcacaagcttcagtagccaagtcaatcaactggaagaaagggtatcagtgattgaagatcaaatgaatgaaatgaagcaagaagagaagtttagagaaaaaagagtaaaaagaaatgaacaaagcctccaagaaatatgggactatgtgaaaagaccaaatctgtgtctgattggtgtacatgaaaatgatggggagaatggaaccaagttggaaaacactttgcaggatgttattcaggaagacgtcctgaacctagcaaggcaggccaacattcaaattcaggaaatacagagaacgccacaaagatactcggcgagaagagcaactctaagatacataattgtcagactggccaaagttgaaatgaaggaaaaaatgttaaaggcagccagagagaaagaatttcatatccagccaaactaagcttcataagtgaaggagaaataaaatactttacaaacaagcaaatgctgagagattttgtcaccaccaggcctgccctacaagagct

SEQ ID NO: 469068 - DNA, 833 bp, Homo sapiens
acttagcaaaattccaaagaaagttaaattctcaacataggccatgactgatgatacaagaagaagttacaaaactgggctcattgctatgaaaggaaatcctactaatggacaaagctgcagtcagtgtgccttgtcatatatgttgtgtggaaaagagaagtgggcagcagcatatggcttggtcagttggcaaacagctgattgcaaaaaatttgaaggatcagagaacctccagaggaaaaggtatgtggatatacttagaggaatgggcatgaagtgtaaatatatttgcattattaatgccctccaaagagcattcaacacaggaaagacaattcaacaaccaaacagaatcagtcaaccagctggtatcagccagagtctgtcactggtcagcccagtattgaattatgggtgtataaatgtagtagcaatagtagaagaagactatgaaggccccaacaggatgcctcccactcaccaagaggctgcctgcatcaatgatagatcaacatggctttataacagactggcccactcacctcaacacaagatatctgcaagacacccaccccgaccattggcctgtgttgagaatgcatcacaacctaatcactcttttttgcacaatccttcttccttctcttccaccgcaggtgttaatcctgagagtactctccagtcaacttcctgcttacaaatttctatctcagagttttgctgtctgggagacctggcctaaaatatatataattataccataatagaaaccaattgcagatgacactgcatttcagctcatcacttaattctgctaagttgtgttttaa

SEQ ID NO: 469069 - DNA, 949 bp, Homo sapiens
tgcctgctggcagatgatagcctggtggatggcaggcagtttacaatacctagcccactgcctgggcaccagtgccttactgggaaggattgacttgtgatgggattttagggatggtgacaggcagccagagggaactccacattggtcaacctatttcatccttatcagaagcttaaatggtaaaaccaccttgtcttcagaaacgaagaaatgctgggtcagctgaaattcgagccctcactgtcagagaagctaagcagaaacatcttagaggtagggacaggggacaaatttcagacaaagatcatggtcagggcaagcctgccaagaaggctgcacatgaagcctcagatcagaaacctgatggagtggatgtatccaggcacattctactacaactttgaaaacagacccatcctctcaggttggaacaccacctggctgtgctacaaaatgaaaacaaagaaggacccctcaaagccccctttggacgcaaggatctttggaggccaggtctattccaagcctgaacaccacccagagatgagattcgtagattggttctgcaactcgaggctgcatcgtgaccaggactacctggtcatctggtacatctcctggagtccctgctcagagtatgcagggaacgtggcagagttcctggccaaggatggcaaggtcaccctgaccatcttcgttgcccacctctactacttctgggaagcagattaccaagaggagcttcacagatggtgtcagaaaaaacagtccacatgccagcatgaagatcatgaactatgatgaatttcaacactgttgggacaaatttgtgtacaaccaaagaatgctatttgatccttggaagcaactgaatacaaattatgcattactgcacagcatgctgggggagattctcagacacattcacttacaattttaccaatga

SEQ ID NO: 469070 - DNA, 734 bp, Homo sapiens
actacttacccccagccgctgcacacaaatacacccaagggatgtttagcaatgtctggagccatttttggttgttacaacttggggaggggcatttagtggataatgctgaacgtgtcatcatttgggaggggcagtctgagagggttgcagaagatgcgatgactgaaaatcttcctccagccagcccctgctcagcagtccccaggagcccgcaatggtccccgattgctggctgctcttggctggtttccaggacagccgtgccctgctctgagctgctctatggagtggcctatgtggcaggaactgaagataatcttcaatgccagccagcaaaaaacggaggtcctcagtgccctgctctgagctgctctatggagtggcctatgtggcaggaactgaagataatcttcaatgccagccagcaaaaaacggaggtcctcagtccaacatcccacaaggaaatgaattctgccaacaaccgtgtgaatgagactgcagtcttggtcagaaatgcgattgcagctttcagaagagactctggaatagaggacccaacaaacggatgcctggactcctgacccaaacccacagtaatggtaagatattaaatgcgtgctgttctaagctgctaaatttgtagtcatctgttatccatcaataggtaactaatacaatcgtcatactcaaaataaatgggtcatttattctaatatgtattgagagatccc

SEQ ID NO: 469071 - DNA, 1713 bp, Homo sapiens
ccttgagctagatacagaagcagctagatacagagtgttgattggtgcactcacaaaccttgagctaaacacagggtgctgattggtgtatttacaatccctgagctagatataaagactctccaagtccccaccagactcaggagcccagctggcttcacctagtggatcccgcaccggggctgcaggtggagctgcctgccagtcctgcgccgtgggctcgcattcctcagcccttgggtggtcgatgggactgggcgccgtggagcaggggtgatgctcgtcagggaggctcgggccgcacaggagcccatggagtgggtgggaggctcaggcatggcgggctgcaggtcccgagccctgccccgtgggaaggcagctaaggcccggcgagaaatcgagcacagcgctggtgggccagcactgctgggggactcagtacaccctccgcagccactggcccgcgtgctaagtcccccattgcccggggccagcagggctggccggctgctccgagtgcggggcctgctaagcccacgcccacccggaactccaggtggcccgcaagcgccgcacgcagcccctgttcccgctcacgcctctccctccacacctcactgcaagctgaaggagtgggctccagccttggccagcccagaaaagggctcccacagtgcagtaggggggctgaagggctcctcaaatgccaccaaagtgggagcccaggcagaggagatgccgagagcaagcgagggctctgaggactgccagcatgctgtcacctctcatgatgacaacaatgtgcaatgttacccttaaccttccagtgaggggcattttgagttgctttatattgactacagcaaagcctcattcattcaggctctattaaactgaaattagtgatcacttggagagttaatctttacttctcaaatcatttcttaccaagtttggtaatgcagttgtgattataaagatgatcgaaacacttaaaaagatttcaaatcaacttacatggcttttaaaaacacccatttatatgtaaataattatcgactctttacaaataattttgtaatttcctaaaaactctaatagacaacgctgctgatctacttccaggctgaaaggaaacaacaacaataagagcgacagcaaacatttattgagagctgtaaaatgtgtttcacccaattgtaatgtaaagaatcgaaaattttaaaaaatttccaaaaaaattacatgattgtagttggtaaaaatgcacccatttcaggaaggcccctgtgcctgtgtataaatgatgtgtcttgaacgctgctgggaagctctattgctgagattgagaagaccttagaaacggaaggacactcttcatcagaggacattaattcatttgacaagcatctagaaaatgaactacttggggaaaggaaatactatttgcttaacagaaggctatattttagcttcattggggcgtatcacttagatttctttcgatccctcaatgttcactaaatatagtttaaaaactgagatgtgaaatacagacacaaaatggaaattttaagccaagcctacttttccccacaaaggcatttttgtgataccccaccatattaatctacagaatatttgtaaccaatatttgtgaactaattggatgttttgtgattttaatcacaataggtttacctgtttatatgt

SEQ ID NO: 469072 - DNA, 2109 bp, Homo sapiens
gtgacccactggctggccgggcggtcagctctggtaggtgatagtggcattccagacagcattcttccagtaagatgtggcctgtggcagaaaactcagcttacgcagtgagggaatgcaatgaaccgtgcatctgtgaagtccatgagcagcgtcagcttcaagtatggatgcatccagaggctaccggtgtcctccgcatcaccatcattatcagtaccatcatcaccattgccatcatcaccatcaccatcaccatcaccatcatcaccatcatcaccatcaccatcaccatcatcaccatcagcatcaccatcaccatcatcaccatcagcatcaccatcaccatcaccatcatcaccatcaccatcatcaccatcatcaccatcacagtcaccatcatcatcatcaccatcaccatcatcaccatcatcataagcatcatcaccatcatcaccatcagcatcaccatcatcaccatcatcatcactatcatcaccatcaccatcatcaccatcaccaccatcaccatcaccatcatcaccatcatcatcaccaccaccatcaccatcatcaccatcacagtcaccatcatcaccatcatcaccatcaccatcatcatcaccatcagcatcaccatcatcaccatcatcaccaccatcaccatcaccaccatcaccatcacagtcaccatcaccatcaccatcatcaccaccatcaccatcatcaccatcacagtcactatcatcaccatcatcaccatcaccatcatcatcatcaccatcagcatcaccatcatcaccatcatcatcatcatcatcaccaccatcatcaccaccaccaccatcagcatcaccatcaccatcatcaccatcatcaccgtcaccatcatcatcaccgtcaccatcaccatcagcatcaccatcatcatcagcaccatcaccaccgtcaccatcatcaccatcatcaccatcaccatcaccaccgtcaccatcatcatcaccatcatcaccaccatcaccatcatcatcaccatcataatcatctccatcgccatcatcaccagtgtcaccattatcctgtgctctgggacacctgtgaccggggacacctgtgacctgggacgcctgtgcctggagacacctgtgcctgggacacctgtgcctggggacatctgtgaccagggacacctgtgcctggggacgcctgtgacctgggacacctgtgactggggacacctgtgcctggagacacctgtgactgggacacctgtgcctgggttacctatgatcaggaacaccctgtgcctggggtcacctattaccaggaacactgtgaccagtgacatccgttctggggacacctggactcagtcgtgaacaaccccaggccagccgtgcagggaggtcgggcttcctccatggcacggtggaaggagaaagctgggtgaggaccaggcctcaaggactgaggccgggattggagctttgccagagcccggagcagctccaggtccaggctcctccctaagagctgaaggccttgagcaactggcaattcattctcacctcggggtaatgggattacaaaaacaaaatccttccatgtaggggctgtcatcgtagtaaatgaaataaaaagacaagcaacccagtcaaatgtggacaaaggacttgaataagcatttcccaaagtagatatacgaatccccatgagcacatggagagagactcagacatcatgagccataaaagcaacgcaaacccaaaccagagggacagtctgctccacatccacttagatggctatgtttcttttttcttttttttaaaggaaaatgttggggatgtagagaaattggaattctcacacattgttggcaggaatgtgaaatggtgcagtcactgtgttaaaacgcctggcggctcctcagaacgttaaacgtaaagtcaccatttgacccagcagttccactcctaggcgtatgcccaagagtgcacaggaacgtttattccagcactgttcataataagcgaatagcagaagcaacccacatgaccatcaactgatgagtgggtttctagcggtggattcacacagcagactatt

SEQ ID NO: 469073 - DNA, 1277 bp, Homo sapiens
atttcacagtcacaggaggagaggaagcttttaatccacacgtctacagcccgataggcggcagtgtgtgaacaactcagttctgtgattctgctctggcctgcagctccatggctggcttggccctgcctctgcttgccattattgtttcccatcgtgtggggtggctgccctctgctggaaagggccacagtgttacaaccttctttgtacctgagtttggagtagaagttgctgaagaccagactactgtgaatcctgctgctcctctgagtctagccacccagtggagctgccacacttgggctggtcctggggcatgtctgcaaggaaatggctgggccgtggagctcccaaacgtccctgtcttttgtgttatgctaccagggcagcagatacttgggcatgtgagggggagacaaaagagtgttccttttccctcttccatccttgcatacccgagtcctggaaaccttggcaggcatgaccatgagtgtcaaagcgacttgcacccgtgaagcagggaggacctagaaaataggaattatctgctctgacctattcctctatcccctcaactgtcagtagccttagagttcccttgacctcatttatgccatggatattaatgtggcttttatctgtgaaacgggaagcttgggttttctatttcttcctgatacactcttggtaggttgtatgtgttcagacatttattcatttcctctaggttttccagttttttgatggttttctgtatttgtatcatttgagtcatttttctcatttgtgtgttctttgtaccagtgggttttatagttttgtgtgttttcatgatgcacattaaatatatcatcttattatccgttgacctgtaaagtgtctgctgaagaattcattgttcattttatggcagttctgctacaagtaactacaaggctttctcttgctgtttttagaattctttatttgtctttgacctttcacagtttgaccatactgtgctatggagaagaccttaaattgtatctatctggagatctttgagctttcttatctgtatgtctaaatctcttgctagaatttttttctagtgattattttgttaaattgctttctattactttgatatttctcttcactttctgggacaccacaaatgcaaatatttgtttgctttatggtgacccaaatgtcaaataggcttttctcattatttttgattcatttttctatatttttgtctgactggttttttagacctttctttctttgct

SEQ ID NO: 469074 - DNA, 3088 bp, Homo sapiens
gactaatgaagtatcaggggttggatcctggaccagaagagaaacattggtggaaaaattgatgaaatgcacataaaagtctgggtaataaaagccatctgtgacaaacctacagccaacattatactgaaagggaaaaagttgaaagcattccccctgagaatgggaacaacaaaaggatgcccacttttaccacttctattcaacgcagtactggaagtcctagccagagaaatcagacaagagaaagaaatcaagggcatccaaatcagtaaagaggaagtcaaactgtcactgtccatcgttgatcctcatctctcaccctacacaaaaatgaacccaagatggatcaaagctttgagtctaagacctgaaaccataaaaattctaaaagataccatcggaaaaacacttctagacatgggcttaggcaaagactttattaccaagaacccaaaatcaaatgaaacaaaaacaaagataaatagatgggagttaagtgaactaaaaatcttctgcaaagcaaaaggaaaatcagtaaacagacaacccacagagtgggagaaaatatttgcatactatgcatctgacaaaggactaatatccagaatctacaatgaactcagactaaccagtggcatcatactcttcctaacaagctcatatttctccttgaaggctcagataagtgacatctctctataccacccatcccatacagctttcattttgggtatccatatcagagtatagatgctccttgacttatgttgcggttatgtcctgataaactcattgcaagttgaaaatatataagatgaaaatgcatcgaatacacctaacctagcaaacatcataatttagcctaccctaccttaaatgtgttcagaacacttatattggcctacatttgggcaaaatcatataacatcaagcctattttctaataaagtgttgaatatctcctgtaatttattgaatagttcactgaaagtgaaaaacagaatggttgtataagtattggaagtctagtttctcctgaatgtgtattgcttttgaaccaccataaagtaaaaaaaaaaaaaatcatttaattcagggactgtctgtagttcattaagaaggttaatgtatctaaatacagtctatccaggcttatcttcatgggacttggttatctttgtttttcatatgaagaggtataattggccagtttcctgtaaagctgaaaaagcccagtatctcttgaaataaaatactttgcttttgtacagtgtaagttgattaaattgttgccttttttccctatgtatctttcttataaacttgctttgttaaaaatgttaattttttcacattttccttgtatttttcattttgagtttcttttacaaggcttctctttattgacagtatatttacttaactctttttgttgatcagcacaagtcattttgggaagctgcccattatagagggcagctaagcacactcttcaaattaatacaaaaatctgtggccaagtgaatatttgatgtaaatgtgaaattcttcatgcttgccaatgaaaatctgtctttttaatcaaactacttttcttcttggttaatagaatcataatagtaaactcctttcattttttttctcagtctcctcgatttgaatgttgttaccttattattctttatctcatgattttcttttgtttcttaaatgtcagaatatacctgtaattccagttccctggtgtggctggcagcctctaacagaactctcaatgatttctgtttcctggagttcccctccttttgagtgtgggttgaatttagtgactcacttctaatgaatagaatgtggcagaaacatatgaattattaaagaataataataatgtgaatattaagaaataggaccctgttaatagtatggaaactctgatgtgctcctctcaatcatactttccgctctcacttgccagagatttattgcatgttaatgtaatctcagaacaacacattactgaaattgggctactttaaactttatattaaaattgtaatgcatacatttctattttatcttttatcttgctcaattctatagattttaaagtcattcatgtgacagcaacaaaaaagcaatccaggcactgttatcttggtggtatttgtgtcatagcataactagcctatcctgactctggaataacatattaacatttattatgacttatggtgggatatggattttattatattatttaatatacttttccatatgtttggacaatttcaatatttaaaattaaattaaaaatagtattttaaaatgttttcatagctacatatatttggtctattttaaagcataggaaattttaggcttgggttaaacaacttgtttctgagccaaatggcaaagtgaatccctaagtatttaattcaaaattcttatgattatagcccattaaacagacctttattttctttacttgaattcaaattctttgtgtcccttaacacagaagtttactaattagtggcctttcctggtttctggtctcagaatcctggccctggatcaaatactgagagagacactattaacctgctataatccctgcaataaaacatgtgggaaaggatcagggatcactgctctgaactacatttcatattatattcatctgatagttgattttcaaggccatcagaaagcttagaagtcagcacgctacagaccttcggcagtattatctgtgcatttcacagcctcattcactctagactggtttttatgttattctctaagctttgagaatttccatggtaagtaggtgctagaaatgctagaaatgtggactgacagaaattcctcacagaaagctttcccaaagtccaatcagaaataagcttatcagaaacaatcagaaattcttgtgtcttttctgaactagtaggtagagttttagaggtcatttctttttttgacccatttgctaagaatcatcttttgtagagcacaggctttatgtagtactttatgttttttgtgaaataggaaaacaccagtgtctagatcccagatc

SEQ ID NO: 469075 - DNA, 597 bp, Homo sapiens
gctggcttcaagaaccagacctccaggaaggcattagagcagttcgctgagaggatccccaatggaactatcaggcagattccacagggcagcttacaaagctgttaattatgacaagcttaaagaaactacccaaggtaaagacgaaaacccagcccagttcatggcccgcttagcagcaacccttagacgctttaccgccctagacccagaagggccagaaggcggtcttattcttaatatgcattttatcacccaatccactcctgacattgggaaaaaacttcaaaagttagaatctcgccctcaaaccccacaacaggaattaacctcgccttcaaggtgtacaataatggagaggaggatgtgccctgtctgtgcgggcccccactggaggtcagactgtctgactcacatcgccgccactcctaaagcccctggagcccaaacccaacgttccttggctgactccttcccagatctccttggctttgtggctgaagactgacgctgcccgatcgccttggaagccccctggaccatcacggacaccgagcttcaggtaactcttacagtggagggtaagtctgtcccctg

SEQ ID NO: 469076 - DNA, 1506 bp, Homo sapiens
gttgcttccctatttaaatggccttatggggtcagagcctccacacagagtccctactggggcaccaccaggtgcagctgtgagaagaggaccaccatccttcagacctcagaacagtagatctatcgacagcttgcaccctatgcctgaagaagctgcagacactcaacaccagcccatgaaaacagcagggagggaggctgtcccctgcaaagccacaagagtggagctgcccaagagcatgagcacccaacttttccatcagtgtgacatgaatgctggattcaaaaaagacatggattcaataaagatcattttgaagcttcaagatttgactgctctgctggatttcagactggcatggggcctactgtacctacgttgttctggccaatttctcccatatggaaagacagtatttacccaatacctgtacccccattgtatctagagttttttgcagaatattaaatgagtgcatttagttgtaataatatttattaactagtaggtgacaaatgtttatctgaaattaagaaaaagaatcctcttcctgctttttaaaggcaagggaatgtttattctggactctaaggtatggaactgtggaatgtttctgttggtagaaaaagattagtctggattcactgaaatatagttgttgaaattaggacacataaaagaatctagaaatagtcattctgtaccactataaagaaaatgtctgttgaggatgtcagggtgttagccttgaaaaagcttgttaaaatccagatgaatgtggaggtgacataatagccctagattgcctaatccagttttgcctacaaaaagaaataaacttgtatcttatttagcctccttgaatttgctctgtatgttacaaaagtgatcagatatccttattaattaaaaggagaaaattagagaaaaaaataactggttgattctagaaaatgtcaatgtttggtctttgtatctatttttaaaacagtaattttttatattatattttattgtgtattttaatatatttatgttgaatttttaatttataaatttccttggatatttttaccattttactcttccaaaggagctttaaaatcattttgttcagttttcattgtattaaattgggatttatatagagttgaccttagtttttaaatattatcttcctacattgaagttatatattttgttaggaaaaatatacaacttcctattatatattaatatattaatgtattgctgtatatatattagtaatgtataaatgtattattactacattaatacttaatgtattgctgtatatatattagtaatgtataaaatttcttattgtttagttgtgaaagttatatctaagctattttctaaatgttttctggagtatacatgtgtacactcatatttgtttaacatttatccaacacaaatagtttttaaattgttttaaacaatctgagaaaataatttgtttgtaaatatggatatttc

SEQ ID NO: 469077 - DNA, 1787 bp, Homo sapiens
cgctgattcaagtttaatgagaccctgagaagagaatccagtcaaggtgctttagacttcagactttcagaagttcagaccttcagaactgtgagattataaacaggtgttgcgggaagtcagggaccccaaatggagggaccggctgaagccatggcagaagaatgtagattattgggacctttcggcaaaagctgttctaaccccatctcagcatttacaattccatacctggtggtcagaggaggccctttctctgatgcttatgcccaattaaactttgatgcccttaccacagaacaagtaacaaaggtgtgcatgagagcttgggataaattatgtgctccaggccaaactcctgtttcttttaccacagttaaacaaggtcaccctgaattataccctgattttttggctaaattacaagatgctgttaaaaaatctgtctctgatgagtgcgctcaaggcattctccttcctatgttagcttttgaaaatgcaaaccatgaatgtaaaatggccatgcgttctgtccaacgacaaaatttacctgatcatgaggtgttgcctgcatatattaaagcttgtgaaggcattggatcagatgcccacaaaactattctgtgggcatgggccatgaaggacaccaaccacactggtcccattaattcttctcttggagcctgctatgattgtgaacaacttgaccaaatagccatattaattggacaggctcagtgcagaatacttcaaatttctggatttgatccaaacttaattgtaattcctttaaatcggctcgaagttcaagctgcctttcaacattctgtaccatggcaaattcacttggctgattttattggtgttattgacaatcattatccaaaaaacaaattgtttgattttataaaaatgatgtcttgggtggttcctctattaaccaaagatcaacccattcctgaggctgttacagtgttcaatgatggctccagtaatggcaatgccagttacgtaggtcctacagacaaacttatttctacctcttatacttctgctcaaaatgtggagttaattgctgtgattactgctatacaggatttccccaaacctttaaatattgtctcagcttctgcttatgttgtacatgccactaaaaatatagaaactgctactatcaaacatattgataattctgaattggcttctttattttcaaggttacaacaggcggttcaccaacatagacaccctttctatattacacatactaggtttcataccactttaccaggacccatgtctgccagtaaccataaagtcgactctttggtctattttgcaacccaagaagctcaggagttccataatctcgctcacgtcaatgccgctggattaaaagataagtttgctcttacctggaaacaggctaagtttattgttcacagctgccctcagtgccaggtcttcgtacttccaaatcaggaatctggcattaatcctagaggcctaactcctaatgctttatggcaaatggatgtgactcatgttagctcctttggcagactgtcatatgtgcatgtctctgtagataccttctcaggttttatctgggctacttgccaaagaggggaaggcacagcccatgttaaaaaaaaatctatattcttgctttgcagttatgaggcttccatatcaaataaagatagacaatgcccctagaattgttagtaaggtttttgattcatttatgcaacagtgggaaatttcccatattactggaatccctt

SEQ ID NO: 469078 - DNA, 618 bp, Homo sapiens
ccagccacatagtcagttctgatgatggaacctgggtacctcgttcgctttgcaccttataggcctccagatatctccttgaagcctctgctctttgaagtgcccagcatcactacagagtcagtgtttgttggccgagattgggttttccacgaaatagatgctcaacttcaaagttcaaatgccagcgtgaaccaaggagtagtgattgtgggaaacattggattcggcaaaactgccatcatctccagactggtggccctcagctgccatggtacaaggatgagacagatcgcctcagacagcccacatgcctcccccaaacatgtggatgccaacagagagctgccactcacacagccaccttcagcccactcatctatcaccagtggaagctgcccaggaactccggaaatgcgcaggcggcaggaggaggctatgcgaagactagcctcgcagtccaggactgaagataaatcagtgaacaaaacagacacaattcctgctgttatacagtccacattctcatgagagaaagacaataaacaaatacatatatagtatgtcagaagatgataagtgctaagatcacagagaattaattctcctcactttctt

SEQ ID NO: 469079 - DNA, 1944 bp, Homo sapiens
tttcaattttattgttttaacagcagcatgattaatgagtgcctgtcagttcaatgaactggtgtcaccccatctcaggaaatcattagcaaataacttgataaataacttccccaacttgatggccagtggaaggctcaagagtcccagcacaggatctagagtggacctatggctacagccatggtgccctgtgaggaaactggtttccggtgcagagcaggtacctgggcagatgcaaagagctgagccggcaagtttgcctcaccaggaggaagctgatgcccctgaggccctgttcttggagaacccggtccctgaaatgtccattgtgaatgtgataatggtaatagctataataatgatggtggtggtgatgatgatgatggtgagggtgatgatggtgatgagtgatgatgatggtgataatgatggtggtggtgatgatggtgatggtgatgatggtgatggtgatgatgatggtaatggtgatgatgatggtgatggtgatgatggtgatggtgatggtggtggtgatggtgatgatgatggtgatgatggtgatagtagtagtgattatggtggtgatgatggtgctaatgatgatgctggtgatgatggtggtggtgatgatagttttggtaatgatgctggtgatgatggtggtggtggtgatgatagctttggtaatgatgatggtggtggtgatgtcggtgatgattatcatgatagtgaagatgatgatagtggtggtgatgatggtgatgatggtggtggtgatggtaatgatggtggtgatggtgatcatggtggtgatggtgatcatggtgatggtgatgatggtgacggtggtgatgatgctgatggtggtgatgttggtgatgactatcatgataggatgatgatagtggtgatgatggtaatggtggtggtgacaatggtgatgatggtggtggtgatggtaatggtggtgacaatggtgatggtggtgatgatggtgatggtgatggtgatgatggtggtggtggtagcgatgatgatggtagtgatggtgatgatggtgatgatgctgatggtggatgatgatagtggtggtgatggtaatggtggtggtgacaatggtgatgatggtggtggtgatggtaatggtggtgacaatggtgatgatggtggtggtgatggtaatggtggtgacaatggtgatgatgatggtggtgatggtgatgatggtgatgatggtggtgatggtggtgatgatggtgatggtgatggtgatgatggtggtggtggtggcgatgatgatggtagtgatggtgatgatggtaatggtggtggtggtggtgatgttggtgatggtgatcatgatagtgaggatgatgacggtggtggtgataatggtgattatgatggtggtgatgttggtgatggtgatgatgacggtgatggtgatgacgtggttgaggaggatgacagataagaatgaggagaatccaatagatacatctaaaataagtaattatctgtgtgaccctgctaatcacagctggatttagataaatttgtccatattcatcaagaactcactaagaaccaggtgctgtgctaggaattttttcaacagagaggcccccacatgtgcacaataactcaggtataaaagtattctctgtggccttgatggtagcagcaaaatagcagaactgtccaaatgcccatcagtaggcaagtggtggggactgggaggctcttctgcattcatagctgccgcattccatcagatcccaaaggcaacaccagaagctcctctgacatttcttcccctgcatctccccctgtgtccagtgaggctgggccatgggcagggaccagagggtctgcctaagaatagggtgggccccactgtctgctttctctgaaaaaagctacaggagccacaaagtctgg

SEQ ID NO: 469080 - DNA, 911 bp, Homo sapiens
atttaattaatcctgaaaagacgagtgaatgagcgaacctaagtgtgggtgcacagagtgtcaccatattctggaactcaagttgtgtttgggtctgtttttctctgcttttctgattgacttttccttgctctcggctgtgccaggcagagctaatgtccatgcatttcacaaacacgggaaaattcagaagctgttcttgctaggagatgtgcccggagaggaagatgccagccaggaaacaaagccaagtgttaaagcctcctatttgtctaactgcataagtaatgcacattcattactcataaaggcaggaaggggagggggtcaggaaataatgacaggcaaagaaaataaaccctataaatttgtattatcagggacaaatcactgtgaacaattaggattgaattgaatttttaccatcttttacagtctcacttctaaaaaggcacacatagaatgtaataggcgtaaccttgtttatacctagatgggaccactttataaacaatattttgtcatctaccaatttcactagattgcagacaccattgcttctaattaacgcagatctgtgagacccgctgatttctgcagagcactcgtctgcctccatcctaaagttgagacagttccctgtgttcagttcttaggttttcccagtgtttttgctatcttgcactgggatgtaagcagtgtccctggatggctcatgaaccctcagcacagtccctggcagtggagtgggcactgtgcctgatgacactatgaccatcctccccaggtggcccctgtttccatcacagggctgagaggggctctggaaagttccctggacccccttctctgcccacgagcttctctgccacatctggttagatctaagagggaaatgggacaggagccct

SEQ ID NO: 469081 - DNA, 2612 bp, Homo sapiens
ggggaaagctgactctggtgtggcctttccctggtggctggtgtccaggagcaaggacacaggggatgctgggtcacaggggagaggacacagagaaagccagggacacaggggacaggatgcgggggatgccgggacacaggggagaggatgcaggggacacaggggatgccgggacacaggggagaggacgcgggggatgccgggacacaggggagaggacgcgggggatgccgggacacaggggagaggacgcgggggatgccgggacacaggggagaggacgcgggggatgccgggacacaggggagaggacgcgggggatgccgggacacaggggagaggacgcgggggatgccgggacacaggggagaggacgcgggggatgccgggacacaggggagaggacgcgggggatgccgggacacaggggagaggacgcgggggatgccgggacacaggggagaggacgcgggggatgccgggacacaggggagaggatgcgggggacacaggggatgcccggacacaggggagaggacgcgggggatgccgggacacaggggagaggacgcgggggatgccgggacacaggggagaggacgcgggggatgccgggacacaggggagaggacgcgggggatgccgggacacaggggagaggacgcgggggatgccgggacacaggggagaggacgcgggggatgccgggacacaggggagaggacgcgggggatgccgggacacaggggagaggacgcgggggatgccgggacacaggggagaggacgcgggggatgccgggacacaggggagaggacgcgggggatgccgggacacaggggagaggacgcgggggatgccgggacacaggggagaggacgcgggggatgccgggacacaggggagaggacgcgggggatgccgggacacaggggagaggacgcgggggatgccgggacacaggggagaggacgcgggggatgccgggacacaggggagaggatgcgggggacacaggggatgcccggacacaggggagaggacgcgggggatgccgggacacaggggagaggacgcgggggatgccgggacacaggggagaggatgcgggggatgccgggacacaggggagaggacgcgggggatgccgggacacaggggagaggacgcgggggatgccgggacacaggggagaggacgcgggggatgccgggacacaggggagaggacgcgggggatgctgggacacaggggagaggacgcgggggatgccgggacacaggggagaggatgcgggggacacagggcagaggatgcgggggacacagggcagacgatgccgggacacaggggaggtgatgcaggggacacatgcgggggatgccgggacacagggcagaggatgcgggggatgccgggacacagggcagaggatgcgggggatgccgggacacaggggagaggacgcaggggacgcaggggatgcccggacacagaggagaggacgcgggggatgctgggacatgggggaggggacccaggggatgttggggggtactacagggtagagttgggccagaaaacgtcttccataaagacccagatgggaaataccttaatcttcaagggccatgggggctctcccacagctactgaaacctgctattgtgtgaaagccgccaggcagcgcagagaccaatgagccgtgacaggctcccaccggccttccccacagaggacgaaactgggcaatgagagcccacagatacctcctgctcccttcctcctcttcctcctacttccctcctcctcctcttcctcttcttccttcagttccttctcctcctctcttcctcctcctcccccccttcctccccaactcctcctcctcattctcttcctcctcctttttgcccttctcctcctcctcctcctgtccctggtggacgaggaacctgagggtctgagacacaggaagctgctcgatcctccagccaggatgaggctgagggagagcccaggccaactggctctcagagtttggactttcaaccacgaattttccacaactgtgcggaaatcaagtggcatcagccccaacgtgggagcgatagggcgtggtggggactgtggcgcagagagggtgcagtcccaaggggagcagcggcttcacccacagatgctgcagcaaggagagccccgtgccagctgcccaggctgttggatccgttcagggatccggcttgcactcagccaggaggagctgccccgcacagctgtccaccagtctaggacccaggccacaccaccctgcacctggttacctgcagctcatcgtgctctgagctcaacccaccagacacaaccccttctcacggtcatacgggcccccgggctcccctgtgggaaaggccagtggaaatggcagcatggacggaggcatccgtggccctgtgatgcatggctgtgtcaatggctgatctgagaattcacccggtcctcagtgccccatccctgccgccccatcctgctgctcttctccttctctctcacaaacttctgcccctctgggctcctcactgaggaccaccaggactgttcctaacacc

SEQ ID NO: 469082 - DNA, 891 bp, Homo sapiens
gtgacagcatttcaattagaatattaatgacaattaataagaagcacgacagtcttttccctcagcagtcaatgactgagtcagcattttgaggcagcgccgcctctcaggctccaggacacaggacgccttgagactacatttcccacaggccacagcccagcctcccgtcttctaacagtcttcctagaaaggtgcgcatgttccgaccattagcacacggctggtgcgctcggtgcaggctatcggagcccgggacagggccgatccagccaggcttcagggtgcgggaaacggaagccgccgcattgccatggcaacagtacagggactgaatctctggtttatttcaatttcatatctacccggtagaggcccaccaaatacgatccagcccctgctctcaaggagaagtaaggaggacagcattcctggaaccaggagctcgagagaccacccttttcgggaatctagtgtacgtttgtatacgacttggaccaggatgtctaagagcagctatgtggaacaaaggcagggcagcaggccctgtaatgaccctggttggtgtgtactcaaaactggggaaaggagacctcatattgtgggctcgtgcaaagacctaactattagtaatgcttggatgaggggcttaatttatgtagcacacttgtgtttgggtaagaaaaagaacttgggtaggaatttgataacactaaaagccaacacttctcccttgctgtcatttgggggttggggtacaggtatagattttatgtatgtttatgttatgtggggtatttagagatccttagtattcttcaatggaaagggccagggagaccagatcttcatattttcaggctacttgctgagagattttcctgctcctct

SEQ ID NO: 469083 - DNA, 1489 bp, Homo sapiens
ggctctggaaacgatttttttggtctatgcggttttttgtttgtttgttttttaagaatgagggaggtgtatacatgtcttgtacctgctgtaataaattaccacaaacttggtgtcttacaaacaaaagaaatttttttccctcacagttctggaagctaggagttcaaaaccaaggtaaccacagggttgtgttccctctgaagactctgtggaaggattcattctatgcctgttcccaagcttctggtggttgctggcagtcatttgcattccatggcttgcagctccaatcactccagtctctgcctctgtcttcacgttgctttctcctctgtgtgcctgagttttctcctctttcttctgtcgtaaggacatgtgtcattgggtttagagcttactggataatccaggatgatctcaaaaaccttaattatcaatttaaaaagccatttgccggtaacattcacaggttccagggatttgagcatagacatatcttttggggggccactacaggtatatgaaaatctcccagttcatttatggttttgttacctttttcttataattatgtccatttttgctttatatattttaaggttatattaggctgatacatgttttgatgaaacaacttctctgtgaaataaaacttaccattttacagtaatgctttgtgccctaagctttaacggctatagtctatttggtttgacattaattagcttttattttgttaatatttgtatgtatatccttttttataattttatttttaacttttctttgtcataatgttcaaggcatgttttgtgtatagtatataaattgaagtttaaaaattaatcctccctgaaaatatttgtctttacatggagattttagtttatttacttttttgttattatggatattttggaatttttctgtccttttattttgtgctacatatttgacttgttctctctaagttgatttatttttttctctttatgccttcgtttggattgagtggtataattatcatcccctcactaattctgatatacagcctatttttattactgtaattgtaacctagaaattttagaatgcatatctgactttacaaacctaaaagttaatcagcacctcccttattttttaaaaaaagctccagatccaatacccttactggtgaattcttttttttaaatatgaacttgtttaggatgaattctattaaatgttttagaaatatcagtgcaaaatgacctcttagaaaatagaggagaaattacgcttctaaacttgttttatgagacacatattaccttaataccaaaatctgagaagaatattacaacaaatgaaagttacagaccaatacactcattaatacagatgcaaaagttataaacaaaatattagtaaataatgctcagcaatatatgaaaaggacaatacagcatgaccaagtaaggtttatctcaggaatgcaaggttc

SEQ ID NO: 469084 - DNA, 1120 bp, Homo sapiens
aaacggaaaaaaacggaattatcgaatggaatcgaagagaatcttcgaacggacccgaacggaatcatctaatggaatggaatgcaataatccatggactggaaggcaatcatcatcgaatggaatcgaatggaatcatcgaatggactcgaatggaataatcattgaacggaatcgaatggaatcatcatcggatggaaacgaatggaatcatcatcgaatggaaatgaaaggaaatcgaatggaattatcatcgaatggaatcgaatggtatcaacaccaaacggaaaaaaacggaattttcgaatggaatcgaagagaatcttcgaacggacgcgaatggaatcatctaatggaatggaatggaataatccatggactggaaggcaatcatcatcgaatggaatcgaatggaatcatcgaatggactcgaatggaatcaacatcaacatgcaatcatcgaatggactggaatggaatcattgaatggactcgaaagggatcattattgaatggaattgaatggaatcatcgaatggtctcgattggaatcattatcaaatggaatcgaatggaatcaccgaatagaatcgaatggaacaatcatcgaatggactcaaatggaattatcctcaaatggaatcgaatggaattatcgaatgcaatcgaatggaattatcgaatgcaatcgaatagaatcatcgaatggactcgaatggaatcatcgaatggaatggaatggaacaaatcgaatggaattatcatcgaatggaatcgaatggaatcaacatcaaacggaaaaaaacggaattatcgaatggaatcgaagagaatcatcgaacggacccgaatggaatcatctaatggaatggaatggaataatccatggactcgaatggaatcatcatcgaatggaatcgaaaagaatcattgaatggactcgaatggaataatcattgaacggaatcgaatggaatcatcatcggatggaaacgaatggaatcatcatcgaatggaaatgaaaggagtcatcatctaatggaattgtatggaatcattataaaatggaatcgaatggaatcaacatcaaagaaaattgatgacctgctgcccgaagtcg

SEQ ID NO: 469085 - DNA, 995 bp, Homo sapiens
tggaattaccatgaaattgaaatggatggactcatcatcgaatggattcgaatggaatcttcgaaaaaaattgattgaaatcatcatcgaatggaatcgaatggtatcattgaatggaatcgaatggaatcatcatcagatggaaatgaatggaatcgtcatagaatggaatcgaatggattcattgaatggaatcagatggtatcatcgaatggactggaatggaatcattgaatggactcgaaagggatcattattgaatggaattgaatggaatcatcgaatggtctcgattggaatcattatcaaatggaatcgaatggaatcaccgaatagaatcgaatggaacaatcatcgaatggactcaaatggaattatcctcaaatggaatggaatggaattatcgaatgcaatcgaatggaattatcgaatgcaatcgaatagaatcatcgaatggactcgaatggaatcatcgaatggaatggaatggaacaaatcgaatggaattatcatcgaatggaatcgaatggaatcaacatcaaacggaaaaaaacggaattatcgaatggaatcgaagagaatcatcgaatggacccgaagggaatcatctgatggaatggaatggaataatccatggactcgaatgcaatcatcatcgaatggaatcgaatggaatcatcgaatggactcgaatggaataatcattgaacggaatcgaatggaatcatcatcggatggaaatgaatggaatcatcatcgaatggaatcgaatagaattatggaatgaaatccagtgtgatcatcatcgaatggacccgaatggaatcatcatccaacggaagctaatggaatcaacatcgaatgaatcgaatggaaacaccatcgaattgaaacgaatggaattaccatgaaattgaaatggatggactcatcatcgaatggattcgaatggaatcatcgaataaaattgattgaaatcatcatcaaatggaatc

SEQ ID NO: 469086 - DNA, 1461 bp, Homo sapiens
caaacggaaaaaaacggaattttcgaatggaatcgaagagaatcttcgaacggacccgaatggaatcatctaatggaatggaatggaataaaaacatggactcgaatgcaatcatcatcgaatggaatcgaatggaatcatcgaatggacccgaatggaataatcattgaacggaatcgaatggaatcatcatcggatggaaacgaatggaatcatcatcgaatggaaatgaaaggaaatcatcgaatggactcgaatggaatcatcgaatggaatggaatggaacagtcaatgaactcgaatggaatcatcattgaatggaatcgaatggaatcatcgagtggaatcgaatggaattatgatcaaatggaatcgaatgaatggaatcatcgcatagaatcgaatggaattatcatcgaatggaatcgaatggcatcaacaccaaacggaaaaaaacggaattatcgaatggaatcgaagagaatcttcgaacggacccgaatggaatcatctaatggaatggaacggaataatccatggactcgaatgcaatcatcatcgaatggaatcgaatggaatcatcgaatggactcgaatggaataaacattgaacggaatcgaatggaatcatcatcggatggaaatgaatggaatcatcatcgaatggaaatgaaaggaaatcgaatggaattatcatcgaatggaatcgaatggaatcaacatcaaacggaaaaaaacggaattatcgaatggaatcgaagagaatcatcgaatggacccgaatggaatcatctaatggaatggaatggaataatccgtggactcgaatgcaatcatcatcgaatggaatcgaatggaatcatcgaatggactcgaatggaataatcattgaacggaatcgaatggaatcatcatcggatggaaatgaatggaatcatcatcgaatggaatcgaatagaattatggaatgaaatccagtgtgatcatcatcgaatggacccgaatggaatcatcatccaacggaagctaatggaatcaacatcgaatgaatcaaatggaaacaccatcgaattgaaacgaatggaattaccatgaaattgaaatggatggactcatcatcgaatggattcgaatggaatcatcgaataaaattgattgaaatcatcatcgaatggaatcgaatggtatcattgaatggaatcgaatggaatcatcatcagatggaaatgaatggaatcatcatagaatggaatcgaatggattcattgaatggaatcagatggaatcatcgaatggactggaatggaatcattgaatggactcgaaagggatcatcattgaatggaattgaatggaatcatcgaatggtctcgattggaatcattatcaaatggaatctgatggcatgtccaaacagtgagttctgctgtagtatccatcagtgctgcaatagagtgataa

SEQ ID NO: 469087 - DNA, 832 bp, Homo sapiens
caaacggaaaaaaacggaattatcgaatggaatcgaagagaatcttcgaacggacccgaatgaaatcatctaatggaatggaatggaataatccatggactggaaggcaagcatcttcgaatggaatcgaatggaatcatcgaatggactcgaatggaataatcattgaacggaatcgaatggaatcatcatcggatggaaacgaatggaatcatcatcgaatggaaatgaaaggaggaaaaaaacggaattatcgaatggaatcgaagagaatcatcgaatggacccgaatggaatcatctaatggaatggaatggaataatccatggactcgaatgcaatcatcatcgaatggaatcgaatggaatcatcgaatggactcgaatggaataatcattgaacggaatcgaatggaatcatcatcggatggaaatgaatggaatcatcatcgaatggcatcgaatagaattatggaatgaaatccagtgtgatcatcatcgaatggacccgaatggaatcatcatccaacggaagctaatggaatcaacatcgaatgaatcgaatggaaacaccatcgaattgaaacgaatggaattaccatgaaattgaaatggatggactcatcatcgaatcaatgaggacgagttgttcgtcaaatgctgtcggatgtcatcatcgaatgcaatcgaatggtatcattgaatggactcgaatggaatcatcatcagatggaaatgaatggaatcgtcatagaatggaatcgaatggattcattgaatggaatcagatggtatcatcgaatggactggaatggaatcattgaatggataaa

SEQ ID NO: 469088 - DNA, 2261 bp, Homo sapiens
gaacggaattgaatggaatcgtcatcgaatgaattgaatggaatcatcgaatggtctcgaatggaatcatcttcaaatggaatggaatggaatcatcgcatagaatcgaatggaattatcttcgaatggaatcgaatggtatcaacatcaaacagaaaaaaacggaattatcgaatggaatcgaagagaatcatcgaacggacccgaatggaatcatctaatggaatggaatggaataatccatggactcgaatgcaatcatcatcgaatggaatcgaatggaatcttcgaatggactcgaatggaataatcattgaacagaatcgaatggaatcatcatcggatggaaacgaatggaatcatcatcgaatggaaatgaaaggaaatcgaatggaattatcatcgaatggaatcgaatggaatcaacatcaaacggaaaaaaacggaattatcgaatggaatcgaagagaatcatcgaatggacccgaatggaatcatctaatggaatggaatggaataatccatggactcgaatgcaatcatcatcgaatggaatcgaatggaatcatcgaatggtctcgaatggaatcatcttctaatggaaaggaatggaatcatcgcatagaatcgaatggaattatcatcgaatggaatcgaatggtatcaacaccaaacggaaaaaaacggaattatcgaatggaatcgaagagaatcttcgaacggacccgaatggaatcatctaatggaatggaatggaataatccatggagtggaaggcaagcatcatcgaatggaatcgaatggaatcatcgaatggactcgaatggaataatcattgaacggaaacgaatggaatcatcatcggatggaaacgaatggaatcatcatcaaatggaaatgaaaggaatggaaatgaatggaatcatcatagaatggaatcgaatggattcattgaatggaatcagatggaatcatcgaatggactggaatggaatcattgaatggactcgaaagggatcatcattgaatggaattgaatggaatcatcgaatggtctcgattggaatcattatcaaatggaatcgaatggaatcaccgaatagaatcgaatggaacaatcatcgaatggactcaaatggaattatcctcaaatggaatcgaatggaattatcgaatgcaatcgcatggaattatcgaatgcaatcgaatagaatcatcgaatggactcgaatggaatcatcgaatggaatggaatggaacaaatcgaatggaattatcatcgaatggaatcgaatggaatcaacatcaaacggaaaaaaacggaattatcgaatggaatcgaagagaatcatcgaacggacccgaatggaatcagctaatggaatggaatggaataatccatggactcgaatgcaatcatcatcgaatggaatcgaatggaatcatcgaatggactcgaatggaataatcattgaacggaatcgaatggaatcatcggatggaaacgaatggaatcatcatcgaatggaaatgaaaggaaatcgaatgcaattatcatcgaatggaatcgaatggtatcaacatcaaacggaaaaaaacggaattatcgaatggaatcgaagagaatcatcgaacggacccgaatggaatcatctaatggaatggaatggaataatccacggactcgaatgcaatcatcaatcgtcatcgaatgaattgaatgcaatcatcgaatggtctcgaatggaatcaacttcaaatggaatggaatggaatcatcgcatagaatcgaatggaattatcatcgaatggaatcgagtggaatcaacatcaaacggaaaaaaacggaattatcgaacggaatcgaagagaatcatcgaatggacccgaatggaatcatctaatggaatggaatggaataatccatggactcgaatgcaatcatcatcgaatggaatcgaatggaatcatcgaatggactcgaatggaataatcattgaacggaatcgaatggaatcatcatcggatggaaatgaatggaatcatcatcgaatggaatcgaatagaattatggaatgaaatccagtgtgatcatcatcgaatggacccgaatggaatcatcatccaacggaagctaatggaatcaacatcgaatgaatcaaatggaaactccatcgaattgaaacgaatggaaccatcaaaaaattgaaatggatggactcatcatggagtggagttgaagcgatgaaatctgcgtactt

SEQ ID NO: 469089 - DNA, 678 bp, Homo sapiens
tcgaacggacccgaatggaatcatctaatggaatggaatggaataatccacggactcgaatgcaatcttcgtcgaatggaatcgaatggaaatcgtcatcgaatgaattgaatgcaatcatcgaatggtctcgaatggaatcaacttcaaatggaatggaatggaatcatcgcatagaatcgaatggaattatcatcgaatggaatcgagtggaatcaacatcaaacggaaaaaaacggaattatcgaacggaatcgaagagaatcatcgaatggacccgaatggaatcatctaatggaatggaatggaataatccatggactcgaatgcaatcatcatcgaatggaatcgaatggaatcatcgaatggactcgaatggaataatcattgaacggaatcgaatggaatcatcatcggatggaaatgaatggaatcatcatcgaatggaatcgaatagaattatggaatgaaatccagtgtgatcatcatcgaatggacccgaatggaatcatcatccaacggaagctaatggaatcaacatcgaatgaatcaaatggaaactccatcgaattgaaacgaatggaattatcatgaaattgaaatggatggactcatcatcgaatggattcgaatggaatcatcgaataaaattgattgaaatcatcatcgaatggaatc

SEQ ID NO: 469090 - DNA, 612 bp, Homo sapiens
gaagagaatcttcgaacggacccgaacggaatcatctaatggaatggaatggaataatccatggactggaaggcaatcatcatcgaatggaatcgaatggaatcatcgaatggactcgaatggaataatcattgaacggaatcgaatggaatcatcatcggatggaaacgaatggaatcatcatcgaatggaaatgaaaggaatggaaatgaatggaatcgtcatagaatggaatcgaatggattcattgaatggaatcagatggtatcatcgaatggactggaatggaatcattgaatggactcgaaagggatcattattgaatggaattgaatggaatcatcgaatggtctcgattggaatcattatcaaatggaatcgaatggaatcaccgaatagaatcgaatggaacaatcatcgaatggactcaaatggaattatcctcaaatggaatggaatggaattatcgaatgcaatcgaatggaattatcgaatgcaatcgaatagaatcatcgaatggactcgaatggaatcatcgaatggaatggaatggaacagtcaatgaactccaatggatcatcattgaatggaatcgaatggaatcatcgagtg

SEQ ID NO: 469091 - DNA, 1775 bp, Homo sapiens
gaaatgaaacgtatggaattatcatgaaattgaaatggatggactcatcatcggatggattcgaatggaatcatcgaataaaattgattgaaatcatcatcaaatggaatcgaatggtatcattgaatggaatcgaatggaatcatcatcagatggaaatgaatggaatcgtcatagaatggaatcgaatggattcattgaatggaatcagatggtatcatcgaatggactggaatggaatcattgaatggactcgaaagggatcattattgaatggaattgaatggaatcatcgaatgaatcatcgaatggactcgaatggaatcatcgaatggaatggaatggaacagtcaatgaactcgaatggaaccatcattgaatggaatcgaatggaatcatcgagtggaatcgaaaggaattatgatcaaatggaatcgaatggaattaccatgaaattgaaatggatggagtcatcatcgaatggattcgaatggaatcatcgaataaaattgattgaaatcatcatcgaatggaatcgaatggtatcattgaatggaatcgaatggaatcatcgtcagatggaaatgaatggaatcgtcatagaatggaatcgaatggattcattgaatggaatcagatggaatcatcgaatggactggaatggaatcattgaatggactcgaaagggatcattattgaatggaattgaatggaatcatcgaatgaatcatcgaatggactcgaatggaatcatcgaatggaatggaatggaacagtcaatgaactcgaatggaatcatcattgaatggaatcgaatggaatcatcgagtggaatcgaatggaattatgatcaaatggaatcgaatgaatggaaccatcgcatagaatcgaatggaattatcatcgaatggaatcgaatggtatcaacaccaaacggaaaaaaacggaattttcgaatggaatcgaagagaatcttcgaacggacccgaatggaatcatctaatggaatggaatggaataatccatggactcgaatgcaatcatcatcgaatggaatcgaatggaaacatcgaatggactcgaaaggaataatcattgaacggaatcgaatggaatcatcatcggatggaaatgaatggaatcatcaacgaatggaaatgaaaggaagaatcatcgaacggacccgaatggaatcatctaatggaatggaatggaataatccgtggactcgaatgcaatcatcatcgaatggaatcgaatggaatcatcgaatggactcgaatggaataatcattgaacggaatcgaatggaatcatcatcggatggaaatgaatggaatcatcatcgaatggaatcgaatagaattatggaatgaaatccagtgtgatcatcatcgaatggacccgaatggaatcatcatccaacggaagctaatggaatcaacatcgaatgaatcgaatggaaacaccatcgaattgaaacgaatggaattatcatgaaattgaaatggatggactcatcatcgaatagattcgaatggaatcatcgaataaaattgattgaaatcatcatcaaatggaatcgaatggtatcattgaatggaatcgaatggaatcatcatcagatggaaatgaatggaatcgtcatagaatggaatcgaatggattcattgaatggaatcagatggaatcatcgaatggactggaatggaatcattgaatcgactcgaaagggatcatgattgaatggaattgaatggaatcatctaatggtc

SEQ ID NO: 469092 - DNA, 3430 bp, Homo sapiens
tggaattaccatgaaattgaaatggatggactcatcatcgaatggattcgaatggaatcatcgaataaaattgcttgaaatcatcatcgaatggaatcgaacggtatcattgaatggaatcgaatggaatcatcatcagatggaaatgaatggaatcgtcatagaatggaatcgaatggattcattgaatggaatcagatggaatcatcgaatggactggaatggaatcattgaatggactcgaaagggatcattattgaatggaattgaatggaatcatcgaatggtctcgattggaatcattatcaaatggaatcgaatggaatcaccgaatagaatcgaatggaacaatcatcgaatggactcaagtggaattatcctcaaatggaatcgaatggaattattgaaggcaatcgaatggaattatcgaatgcaatcgaatagaatcatcgaatggactcgaatggaatcatcgaatggaatggaatggaacagaatggaatcatcgcatagaatcgaatggaattatcatcgaatggaatcgaatggaatcaacatcaaacggaaaaaaacggaattatcgaatggaatcgaagagaatcttgaacggacccgaatggaatcatctaatggaatggaatggaataatccatggactggaaggcaatcatcatcgaatggaatcgaatggaatcatcgaatggactcgaatggaataatcattgaacggaatcgaatggaatcatcatcggatggaaacgaatggaatcatcatcgaatggaaatgaaaggagaatggaatcatcgcatagaatcgagtgtaattaacattgaatggactcgaatggaatcaacatcaaacggaatcaagcggaattatcgaatggaatcgaagagaatcatcgaatggactcgaatggaatcatccaatggaatggaatggaataatccatgtacacgaatgcaatcatcatcgtatacaatcgaatggaatcatcgaatggacccgaatggaataatcattgaacggaatcgaatggaatcatcatcggatggaaacgaatggaatcatcatcgaatggaaatgaaaggaagaatcatcgaacggacccgaatggaatcatctaatggaatggaatggaataatccatggactcgaatgcaatcatcatcgaatggaatcgaatggaatcatcgaatggactcgaatggaataatcattgaacggaatcgaatggaatcatcatcggatggaaacgaatggaatcatcatcgaaaggaaatgaaaggatgtgatcatcatcgaatggacccgaatggaatcatcatccaacggaagctaatggaatcaacatcgaatgaatcgaatggtgtaaaccagcggccagtgactgcaagtagttcatcaaatggaatcgaaaggaatcatcgagaatggaatcatcgcatagaatcgaatggaattatcatcgaatggaatcgaatggtatcaacaccaaacggaaaaaaacggaattatcgaatggaatcgaagagaatcttcgaacggacccgaatggaatcatctaatagaatggaatggaataatccatggactcgaatgcaatcatcttctagtggaatcaaatggaatcatcgaatggactcgaatggaataatcattgaacggaatcgaatggaatcatcatcggatggaaatgaatggaatcatcatcgaatggaaatgaaaggaatggaaatgaatggaatcgtcatagaatggaatcgaatggattcattgaatggaatcagatggaatcatcgaatggactggaatggaatcattgaatggactcgaaagggatcattattgaatggaattgaatggaatcatcgaatggtctcgattggaatcattatcaaatggaatcgaatggaatcaccgaatagaatcgaatggaacaatcatcgaatggactcaaatggaattatcctccaatggaatcgaatggaattatcgaatgcaatcgcatggaattatcgaatgcaatcgaatagaatcatcgaatggactcgaatggaatcatcgaatggaatggaatggaacaaatcgaatggaattatcatcgaatggaatcgaatggtatcaacaccaaacggaaaaaaacggaattttcgaatggaatcgaagagaatcttcgaacggacccgaatggaatcatctaatggaatggaatggaataatccatggactcgaatgcaatcatcatcgaatggaatcgaatggaatcatcgaatggactcgaatggaataatcattgaacggaatcgaatggaatcatcatcggatggaaacgaatggaatcatcatcgaatggaaatgaaaggaatggaaatgaatggaatcgtcatagaatggaatcgaatggattcattgaatggaatcagatggaatcatcgaatggactggaatggaatcattgaatggactcgaaagggatcattattgaatggaattgaatggaatcatcgaatgaatcatcgaatggactcgaatggaatcatcgaatggaatggaatggaacagtcaatgaactcgaatggaatcatcattgaatggaatcgaatggaatcatcgagtggaatcgaatggaattatgatcaaatggaatcgaatgggtcatcatctaatggaatcgcatggaatcatcatcaaatggaatcgaatggaatcatcatcaaatggaatctaattgaatcattgaaaagaattgaatggaatcaatcgaatggaagtatcgtcgaatggaatcgaatggtatcaacaccaaacggaaaaaaacggaattatcgaatggaatcgaagagaatcttcgaacggacccgaatggaatcatctaatggaatggaatggattaatccatggactcaaatgcaatcatcatcgaatggaatcgaatggaatcatcgaaaggactcgaatggaataatcattgaacggaatcgaatggaatcatcatcggacggaaacgaatggaatcatcatcgaatggaaatgaaaggacaaatggaatcgaatggtatcattgaatggaatcgaatggaatcatcatcagatggaaatgaatggaatcgtcatagaatggaatcgaatggattcattgaatggaatcagatggaatcatcgaatggactgaaatggaatcattgaatggactcgaaagggatcattattgaatggaattgaatggaatcatcgaatggtctcgattggaatcattatcaaatggaatcgaatggaatcaccgaatagaatcgaatggaacaatcatcgaatggactcaaatggaattatcctcaaatggaatcgaatggaattatcgaatgcaatcgaatggaattatcgaatgcaatcgaatagaatcatcgaatggactcgaatggaatcatc

SEQ ID NO: 469093 - DNA, 550 bp, Homo sapiens
tcatcgaatggtctcgaatggaatcatcttcaaatggaatggaatggaatcatcgcataggatcgaatggaattatcatcgaatggaatcgaatggaatcaacatcaaacggaaaaaaacggaattatcgaatggaatcgaagagaatcatcgaacggactcgaatggaataatcattgaacggaatcgaatggaatcatcatcggatggaaacgaatggaatcatcaatcgaatggaattatcatcgaatggaatcgaatggaatcaacatcaaacggaaaaaaacggaattatcgaatggaatcgaagagaatcatcgaatggacccgaatggaatcatctaatggaatggaatggaataatccatggactcgaatgcaatcatcatcgaatggaatcgaatggaatcatcgaatggactcgaatggaataatcattgaacggaatcgaatggaatcatcatcggatggaaatgaatggaatcatcatcgaatggaatcgaatagaattatggaatgaaatccagtgtgatcatcatcgaatggaccc

SEQ ID NO: 469094 - DNA, 1717 bp, Homo sapiens
gaagagaatattcaaacggacccgaatggaatcatctaatggaatggaatggaataatccatggactggaaggcaagcatcatcgaatggaatcgaatggaatcatcgaatggactcgaatggaataatcattgaacggaatcaaatggaatcatcatcggatggaaacgaatggaatcatcatcgaatggaaatgaaaggaatggaaatgaatggaatcgtcatagaatggaatcgaatggattcattgaatggaatcagatggaatcatcgaatggactggaatggaatcattgaatggactcgaaagggatcattattgaatggaattgaatggaatcatcgaatggtctcgattggaatcattatcaaatggaatcgaatggaatcaccgaatagaatcgaatggaacaatcatcgaatggactcaaatggaattatcctcaaatggaatcgaatggaattatcgaatgcaatcgaatggaattatcgaatgcaatcgaatagaatcatcgaatggactagaatggaatcatcgaatggaatggaatggaacaaatcgaatggaattatcatcgaatggaatcgaatggtatcaacaccaaacggaaaaaaacggaattttcgaatggaatcgaagagaatcttcgaacggacccgaatggaatcatctaatggaatggaatggaataatccatggacccgaatgcaatcatcatcgaatggaatcgaatggaatcatcgaatggactcgaatggaataatcattgaacggaatcgaatggaatcaaaaaaacggaattatcgaatggaatcgaagagaatcatcgaacggacccgaatggaatcatctaatggaatggaatggaataatccatggactcgaatgcaatcatcatcgaatggaatcgaatggaatcttcgaatggactcgaatggaataatcattgaacagaatcgaatggaatcatcatcggatggaaacgaatggaatcatcatcgaatggaaatgaaaggaagaatcatcgaatggacccgaatggaatcatctaatggaatggaatggaataatccatggactcgaatgcaatcatcatcgaatggaatcgaatggaatcatcgaatggactcgaatggaataatcattgaacggaatcgaatggaatcatcatcggatggaaatgaatggaatcatcatcgaatggaaatgaaaggaaatcgaatggaattatcatcgaatggaatcgaatggaatcaacatcaaacggaaaaaaacggaattatcgaatggaatcgaagagaatcatcaaatggacccgaatggaatcatctaatggaatggaatggaataatccatggactcgaatgcaatcatcatcgaatggaatcgaatggaatcatcgaatggactcgaatggaagaatcattgaacggaatcaaatggaatcatcatcggatggaaatgaatggaatcatcatcgaatggaatcgaatagaattatggaatgaaatccagtgtgatcatcatcgaatggacccgaatggaatcatcatccaacggaagctaatggaatcaacattgaatgaatcgaatggaaacaccatcgaattgaaacgaatggaattatcatgaaattgaaatggatggactcatcatcgtatagattcgaatggaatcatcgaataaaattgattgaaatcatcatcaaatggaatc

SEQ ID NO: 469095 - DNA, 3530 bp, Homo sapiens
caaacggaaaaaaacggaattttcgaatggaatcgaagagaatcttcgaacggacccgaatggaatcatctaatggaatggaatggaataatccatggactcgaatgcaatcatcatcgaatggaatcgaatggaaacatcgaatggactcgaaaggaataatcattgaacggaatcgaatggaatcatcatcggatggaaatgaatggaatcatcaacgaatggaaatgaaaggagaatggaatcatcgcatagaatcgagtgtaattaacattgaatggactcgaatggaatcaacatcaaacggaatcaagcggaattatcgaatggaatcgaagagaatcatcgaatggactcgaatggaatcatctaatggaatggaatggaataatccatgtacacgaatgcaatcatcatcgtataaaatcgaatggaatcatcgaatggactcgaatggaataatcattgaacggaatcgaatggaatcatcatcggatgaaaacgaatggaatcatcatcgaatggaaatgaaaggaatggaaatgaatggaatcgtcatagaatggaatcgaatggattcattgaatggaatcagatggtatcatcgaatggactggaatggaatcattgaatggactcgaaagggatcattattgaatggaattgaatggaatcatcgaatggtctcgattggaatcattatcaaatggaatcgaatggaatcaccgaatagaatcgaatggaacaatcatcgaatggactccaatggaattatcctcaaatggaatagaatggaattatcgaatgcaatcgaatggaattatcgaatgcaatcgaatagaatcatcgaatggactcgaatggaatcatcgaatggaatggaatggaacaaatcgaatggaattatcatcgaatggaatcgaatggtatcaacaccaaacggaaaaaaacggaattttcgaatggaatcgaagagaatcttcgaacggacccgaatggaatcatctaatggaaaggaatggaataatccatggactcgaatgcaatcatcatcgaatggaatcgaatggaatcatcgaatggactcgaatggaataatcattgaatggaatcgaatggaatcatcatcggatggaaatgaatggaatcatcatcgaatggaaatgaaaggaatggaaatgaatggaatcgtcatagaatggaatcgaatggattcattgaatggaatcagatggaatcatcgaatggactggaatggaatcattgaatggactcaaaacggatcattattgaatggaattgaatggaatcatcgaatggtctcgattggaatcattatcaaatggaatcgaatggaatcaccgaatagaatcgaatggaacaatcatcgaatggactcaaatggaattatcctcaaatggaatcgaatggaattatcgaatgcaatcgcatggaattatcgaatgcaatcgaatagaatcatcgaatggactcgaatggaatcatcgaatggaatggaatggaacaaatcgaatggaattatcatcgaatggaatcgaatggtatcaacaccaaacggaaaaaaacggaattttcgaatggaatcgaagagaatcttcgaacggacccgaatggaatcatctaatggaatggaatggaataatccatggactcgaatgcaatcatcatcgaatggaatcgaatggaatcatcgaatggactcgaatggaataatcattgaacggaatcgaatggaatcatcatcggatggaaatgaatggaatcatcatcgaatggaaatgaaaggaatggaaatgaatggaatcgtcatagaatggaatcgaatggattcattgaatggaatcagatggaatcatcgaatggactggaatggaatcattgaatggactcgaaagggatcattattgaatggaattgaatggaatcatcgaatggtctcgattggaatcattatcaaatggaatcgaatggaatcaccgaatagaatcgaatggaacaatcatcgaatggactcaaatggaattatcctccaatggaatcgaatggaattatcgaatgcaatcgaatggaattatcgaatgcaatcgaatagaatcatcgaatggactcgaatggaatcatcgaatggaatggaatggaacagaatggaatcatcgcatagaatcgaatggaattatcatcgaatggaatcgaatggtatcaacaccaaaccgaaaaaaacggaattatcgaatggaatcgaagagaatcttcgaacggaccgaatggaatcatctaatggaatggaatggaataatccatggactcgaatgcaatcatcatcgaatggaatcgaatggtatcatcgaatggactcgaatggaataatcattgaacggaatcgaatggaatcatcatcggatggaaatgaatggaatcatcatcgaatggaaatgaaaggaatggaaatgaatggaatcgtcatagaatggaatcgaatggattcattgaatggaatcagatggtatcatcgaatggactggaatggaatcattgaatggactcgaaagggatcattattgaatggaattgaatggaatcatcgaatggtctcgattggaatcattatcaaatggaatcgaatggaatcaccgaatagaatcgaatggaacaatcatcgaatggactcaaatggaattatcctcaaatggaatggaatggaattatcgaatgcaatcgaatggaattatcgaatgcaatcgaatagaatcatggaatgtactcgaatggaattatcgaatggaatggaatggaacaaatcgaatggaattatcatcgaatggaatcgaatggtatcaacatcaaacggaaaaaaacggaattatcgaatggaatcgaagagaatcttcgaacggacccgaatggaatcatctaatggaatggaatggaataatccatggactggaaggcaatcatcatcgaatggaatcgaatggaatcatcgaatggactcgaatggaataatcattgaacggaatcgaatggaatcatcatcggatggaaacgaatggaatcatcaatcgaatggaattatcatcgaatggaatcgaatggaatcaacatcaaacggaaaaaaaccgaattatcgaatggaatcgaagagaatcatcgaatggacccgaatggaatcatctaatggaatggaatggaataatccatggactcgaatgcaatcatcatcgaatggaatcgaatggaatcatcgaatggactcgaatggaataatcattgaacggaatcgaatggaatcatcatcggatggaaatgaatggaatcatcatcgaatggaatcgaatagaattatggaatgaaatccagtgtgatcattatcgaatggacccgaatggaatcatcatccaacggaagctaatggaatcaacatcgaatgaatcgaatggaaacaccatcgaattgaaacgaatggaattaccatgaaattgaaatggatggactcatcatcgaatggattc

SEQ ID NO: 469096 - DNA, 1675 bp, Homo sapiens
caaacggaaaaaaacggaattttcgaatggaatcgaagagaatcttcgaacggacccgaatggaatcatctaatggaatggaatggaataatccatggactcgaatgcaatcatcatcgaatggaatcgaatggaatcatcgaatggactcgaatggaataatcattgaacggaatcgaatggaatcatcatcggatggaaacgaatggaatcatcatcgaatggaaatgaaaggaatggaaatgaatggaatcgtcatagaatggaatcgaatggattcattgaatggaatcagatggaatcatcgaatggactggaatggaatcattgaatggactcgaaagggatcattattgaatggaattgaatggaatcatcgaatgaatcatcgaatggactctaatggaatcatcgaatggaatggaatggaacagtcaatgaactcgaatggaatcatcattgaatggaatcgaatggaatcatcgagtgcaatcgaatggaattatgatcaaatggaatcgaatatggaaatgaatggaatcgtcatagaatggaatcgaatggattcattgaatggaatcagatggaatcatcgaatggactggaatggaatcattgaatggactcgaaagggatcattattgaatggaattgaatggaatcatcgaatggtctcgattggaatcattatcaaatggaatcgaatggaatcaccgaatagaatcgaatggaacaatcatcgaatggactcaaatggaattatcctccaatggaatcgaatggaattatcgaatgcaatcgaatggaattatcgaatgcaatcgaatagaatcatcgaatggactcgaatggaatcatcgaatggaatggaatggaacaaatcgagtggaattaacattgaatggactcgaatggaatcaacatcaaacggaatcaagcggaattatcgaatggaatcgaagagaatcatcgaatggactcgaatggaatcatctaatggaatggagtggaataatccatggacccgaatgcaatcatcatcgtataaaatcgaatggaatcatcgaatggactcgaatggaataatcattgaacggaatcgaatggaatcatcatcggatggaaccgaatggaatcatcatcgaatggaaatgaaaggagaatggaatcatcgcatagaatcgagtgtaattaacattgaatggactcgaatggaatcaacatcaaacggaatcaagcggaattatcgaatggaatcgaagagaatcatcgaatggactcgaatggaatcatctaatggaatggaatggaataatccatgtacacgaatgcaatcatcatcatggtatcatcgaatggactggaatggaatcattgaatggactcgaaagggatcattattgaatggaattgaatggaatcatcgaaggtctcgattggaatcattatcaaatggaatcgaatggaatcaccgaatagaatcgaatggaacaatcatcaaatggactcaaatggaattatcctcaaatggaatcgaatggaattatcgaatgcaatcgaatggaattatcgaatgcaatcgaatagaatcatcgaatggactcgaatggaatcatcgaatggaatggaatggaacagtcaatgaactcgaatggaaccatcattgaatggaatc

SEQ ID NO: 469097 - DNA, 2135 bp, Homo sapiens
caaacggaaaaaaacggaattttcgaatggaatcgaagagaatcttcgaacggacccgaatggaatcatctaatggaatggaatggaataatccatggactcgaatgcaatcatcatcgaatggaatcgaatggaatcatcgaatggactcgaatggaataatcattgaatggaatcgaatggaatcatcatcgaatggaaatgaatggaatcatcatcgaatggaaatgaaaggaaatcatcgaatggactcgaatggaatcatcgaatggaatggaatggaacagtcaatgaactcgaatggaatcatcattgaatggaatcgaatggaatcatcgagtggaatcgaatggaattatgatcaaatggaatcgaataatcgaatggaattatcatcgaatggaatcgaatggtatcaacaccaaacggaaaaaaacggaattatcgaatggaatggaagagaatcttcgaacggacccgaatggaatcatctaatggaatggaatggaataatccatggactcgaattcgaatggaatcatcgaataaaattgattgaaatcataatcgaatggaatcgaatggtatcattgaatggaatcgaatggaatcatcatcagatggaaatgaatggaatcgtcatagaatggaatcgaatggattcattgaatggaatcagatgcaatcatcgaatggactggaatggaatcattgaatggactcgaaagggatcattattgaatggaattgaatggaatcatcgaatggtctcgattggaatcattatcaaatggaatcgaatggaatcaccgaatagaatcgaatggaacaatcatcgaatggactcaaatggaattatcctcaaatggaatcgaatggaattatcgaatgcaatcgaatggaattatcgaatgcaatcgaatagaatcatggaatgtactcgaaatggaattatcgaatggaatggaatggaacagtcaatgaactcgaatggaatcatcattgaatggaatcgaatggaatcatcgagtggaatcgaatggaattatgatcaaatggaatcgaatgaatggaatcatcgcatagaatcgaatggaattatcatcgaatggaatcgaatggtatcaacaccaaaccgaaaaaaacggaattatcgaatggaatcgaagagaatcttcgaacggacccgaatggaatcatctaatggaatggaatggaataatccatggactcgaatgcaatcatcatcgaatggaatcgaatggtatcatcgaatggactcgaatggaataatcattgaacggaatcgaatggaatcatcatcggatggaaatgaatggaatcatcatcgaatggaatcgaatagaattatgatgaatgaaatccaatggaatcatcgaatggactggaatggaatcattgaatggactcgaaagggatcattattgaatggaattgaatggaatcatcgaatggtctcgattggaatcattatcaaatggaatcgaatggaatcaccgaatagaatcgaatggaacaatcatcgaatggactcaaatggaattatcctcaaatggaatggaatggaattatcgaatgcaatcgaatggaattatcgaatgcagtcgaatagaatcatcgaatggactcgaatggaatcatcgaatggaatggaatggaacaaatcgaatggaattatcatcgaatggaatcgaatggtatcaacatcaaacggaaaaatacggaattatcgaatggaatcgaagagaatcatcgaacggacccgaatggaatcatctaatggaatggaatggaataatccatggactcgaatgcaatcatcatcgaatggaatcgaatggaatcatcgaatggactcgaatggaataatcattgaacggaatcgaatggaatcatcatcggatggaaatgaatggaatcatcatcgaatggaatcgaatagaattatggaatgaaatccagtgtgatcatcatcgaatggacccgaatggaatcatcatccaacggaagctaatggaatcaacatcgaatgaatcgaatggaaacaccatcgaattgaaacgaatggaattatcatgaaattgaaatggatggactcatcatcgaatggattc

SEQ ID NO: 469098 - DNA, 2041 bp, Homo sapiens
tggaatcaacatcaaacggaaaaaaacggaattatcgaatggaatcgaagagaatcatcgaacggacccgaatggaatcatctaatggattggaatggaataatccatggactcgaatgcaatcatcatcgaatggaatcgaatggaatcatcgaatggactcgaatggaataatcattgaacggaatcgaatggaatcatcatcggatggaaacgaatggaatcatcatcgaatggaaatgaaaggaatggaaatgaatggaatcgtcatagaatggaatcgaatggattcattgaatggaatcagatggaatcatcgaatggactggaatggaatcattgaatggactcgaaagggatcattattgaatggaattgaatggaatcatcgaatggtctcgattggaatcattatcaaatggaatcgaatggaatcaccgaatagaatcgaatggaacaatcatcgaatggactcaaatggaattatcctcaaatggaatcgaatggaattatcgaatgcaatcgcatggaattatcgaatgcaatcgaatagaatcatcgaatggactcgaatggaatcatcgaatggaatggaatggaacaaatcgaatggaattatcatcgaatggaatcgaatggtatcaacaccaaacggaaaaaaacggaattttcgaatggaatcgaagagaatcttcgaacggacccgaatggaatcatctaatggaatggaatggaataatccagggactcgaatgcaatcatcatcgaatggaatcgaatggaataatcgaatggactcgaatggaataatcattgaacggaatcgaatggaatcatcatcggatggaaacgaatggaatcatcatcgaatggaaatgaaaggaagaatcatcgaacggacccgaatggaatcatctaatggaatggaatggaataatccatggactcgaatgcaatcatcatcgaatggaatcgaatggaatcatcgaaaggactcgaatggagtaatcattgaacggaatcgaatggaatcatcatcggacggaaatgaatggaatcatcatcgaatggaaatgaaaggaatggaaatgaatggaatcgtcatagaatggaatcgaatggattcattgaatggaatcagatggaatcatcgaatggactggaatggaatcattgaatggactcgaaagggatcattattgaatggaattgaatggaatcatcgaatggtctcgattggaatcattatcaaatggaatcgaatggaatcaccgaatagaatcgaatggaacaatcatcgaatggactcaaatggaattatcctcaaatggaatggaatggaattatcgaatgcaatcgaatggaattatcgaatgcaatcgaatagaatcatcgaatggactcgaatggaatcatcgaatggaatggaatggaacaaatcgaatggaattatcatcgaatggaatcgaatggaatcaacaccaaacggaaaaaaacggaattatcgaatggaatcgaagagaatcatcgaacggacccgaatggaatcatctaatggaatggaatggaataatccatggacccgaatgcaatcatcatcgaatggaatcgaatggaatcatcgaatggactcgaatggaataatcattgaacggaatcgaatggaatcgtcatcggatggaaacgaatggaatcatcatcgaatggaaatgaaaggaaatcgaatggaattatcatcgaatggaatcgaatggaatcaacatcaaacggaaaaaaacggaattatcgaatggaatcgaagagaatcatcgaacggacccgaatggaatcatctaatggattggaatggaataatccatggactcgaatgcaatcatcatcgaatggaatcgaatggaatcatcgaatggactcgaatggaataatcattgaacggaatcgaatggaatcatcattggatggaaatgaatggaatcatcatcgaatagattcgaatagaattatggaatgaaatccagtgtgatcatcatcgaatggaccc

SEQ ID NO: 469099 - DNA, 726 bp, Homo sapiens
catcaaacggaaaaaaacggaattatcgaatggaatcgaagagaatcatcgaacggacccgaatggaatcatctaatggaatggaatggaataatccacggactcgaatgcaatcatcgtcgaatggaatcgaatggaaatcgtcatcgaatgaattgaatgcaatcatcgaatggtctcgaatggaatcaacttcaaatggaatggaatggaatcatcgcatagaatcgaatggaattatcatcgaatggaatcgagtggaatcaacatcaaacggaaaaaaacggaattatcgaacggaatcgaagagaatcatcgaatggacccgaatggaatcatctaatggaatggaatggaataatccatggactcgaatgcaatcatcattgaatggaatcgaatggaatcatcgaatggactcgaatggaataatcattgaacggaatcgaatggaatcatcatcggatggaaatgaatggaatcatcatcgaatggaatcgaatagaattatggaatgaaatccagtgtgatcatcatcgaatggacccgaatggaatcatcatccaacggaagctaatggaatcaacatcgaatgaatcaaatggaaactccatcgaattgaaacgaatggaattatcatgaaattgaaatggatggactcatcatcgaatggattcgaatggaatcatcgaataaaattgattgaaatcatcatcgaatggaatc

SEQ ID NO: 469100 - DNA, 598 bp, Homo sapiens
caaacggaaaaaaacggaattttcgaatggaatcgaagagaatcttcgaacggacgcgaatggaatcatctaatggaatggaatggaataatccatggactggaaggcaatcatcatcgaatggaatcgaatggaatcatcgaatggactcgaatggaataatcattgaacggaatcgaatggaatcatcatcggatggaaacgaatggaatcatcatcgaatggaactgaaaggaaatcgaatggaattatcatcgaatggaatcgaatggtatcaacaccaaacggaaaaaaacggaattttcgaatggaatcgaagagaatcttcgaacggacgcgaatggaatcatctaatggaatggaatggaataatccatggactggaaggcaatcatcatcgaatggaatcgaatggaatcatcgaatggactcgaatggaatcaacatcaaacggaatcaagcggaattatcaaatggaatcgaagagaatcatcgaatggactcgaatggaataatctaatggaattgaatggaataatccacggactagaatgcaatcatcatcgtgtagaatcgaatggaatcatcgaatggactc

SEQ ID NO: 469101 - DNA, 2180 bp, Homo sapiens
gaagagaatcttcgaacggacccgaatggaatcatctaatggaatggaacggaataatccatggactcgaatgcaatcatcatcgaatggaatcgaatggaatcatcgaatggactcgaatggaataaacattgaacggaatcgaatggaatcatcatcggatggaaatgaatggaatcatcatcgaatggaaatgaaaggaagaatcatcgaacggacccgaatggaatcagctaatggaatggaatggaataatccatggactcgaatgcaatcatcatcgaatggaatcgaatggaatcatcgaatggactcgaatggaataatcattgaacggaatcgaatggaatcatcggatggaaacgaatggaatcatcatcgaatggaaatgaaaggaatggaaatgaatggaatcgtcatagaatggaatcgaatggattcattgaatggaatcagatggaatcatcgaatggactggaatggaatcattgaatggactcgaaagggatcattattgaatggaattgaatggaatcatcgaatggtctcgattggaatcattatcaaatggaatcgaatggaatcaccgaatagaatcgaatggaacaatcatcgaatggactcaaatggaattatcctcaaatggaatgggatggaattatcgaatgcaatcgaatggaattatcgaatgcaatcgaatagaatcatcgaatggactcgaatggaatcatcgaatggaatggaatggaacaaatcgaatggaattatcatcgaatggaatcgaaaggcaatcatcatcgaatggaatcgaatggaatcatcgaatggactcgaatggaataatcatttaacggaatcgaatggaatcatcatcggatggaaacgaatggaatcatcatcgaatggaaatgaaaggagtcatcatctaatggaattgcatggaatcatcatcaaatggaatcgaatggaatcaacatcaaatggaatcaaatggaatcatttaacggaattgaatggaatcatggaaatgaatggaatcatcatagaatggaatcgaatggattcattgaatggaatcagatggaatcatcgaatggactggaatggaatcattgaatcgactcgaaagggatcattattgaatggaattgaatggaatcatcgaatggtctcgattggaatcattatcaaatggaatcgaatggaatcaccgaatagaatcgaatggaacaatcatcgaatggactcaaatggaattatcctcaaatggaatcgaatggaattatcgaatgcaatcgcatggaattatcgaatgcaatcgaatagaatcatcgaatggactcgaatggaatcatcgaatggaatggaatggaacaaatcgtcatcgaatgaattgaatgcaatcatcgaatggtctcgaatggaatcaacttcaaatggaatggaatggaatcatcgcatagaatcgaatggaattatcatcgaatggaatcgagtggaatcaacatcaaacggaaaaaaacgggattatcgaatggaatcgaagagaatcatcgaatggacccgaatggaatcatctaatggaatggaatggaataatccatggactcgaatgcaatcatcattgaatggaatcgaatggaatcatcgaatggactcgaatggaataatcattgaacggaatcgaatggaatcatcatcggatggaaatgaatggaatcatcatcgaatggaatcgaatagaattatggaatgaaatccagtgtgatcatcatcgaatggacccgaatggaatcatcatccaacggaagctaatggaatcaacatcgaatgaatcaaatggaaacaccatcgaattgaaacgaatggaattatcatgaaattgaaatggatggactcatcatcgaatggattcgaatggaatcatcgaataaaattgattgaaatcatcatcaaatggaatcgaatggtatcattgaatggaatcgaatgtaatcatcatcagatggaaatgaatggaatcgtcatagaatagaatcgaatggattcattgaatggaatcagatggaatcatcgaatggactggaatggaatcaacatcaaatggaatcaaatggaatcattgaacggaattgaatggaatcgtcatcgaatgaatttgatgaactagtgtccgcatg

SEQ ID NO: 469102 - DNA, 2569 bp, Homo sapiens
cgcacctccggttcctgctcacctctctggttcctctcgccctttcaggtggggacccatcgtgaagatggcgtggccctgagaggcagccattctcttctgccaaaccaggttccggttccacagcttcctgtccagcatgccaccaggactacaggggcagagtgtctcctctggcagctctgagatcaaatccgatgacgagggtgatgagaacctgcaagacacgaaatcttcggaggacaagaaattagatgacgacaagaaggatatcaaatcaattactaggtcaagatctagaaaaccaaatatcttgtgtattgtgaactgtcaaagccatctaaaccaatcccaaggtcaagtggatataaaaattctgccaaaaacatggcataagatggaaaagttccctgaaaactctggaagaaaacaaagtaatgtagacaccttctttttccccacaccattagaaaatgttgcatcccttttgtcccacagcaataatgacgatgaggacctgacaccagagcagaaggcagagcgtgagaaggagcggaggatggccaacaatgcccgagagcgtctgcgggtccgtgacatcaacgaggctttcaaagagctcggccgcatggtgcagctccacctcaagagtgacaagccccagaccaagctcctgatcctccaccaggcggtggccgtcatcctcagtctggagcagcaagtccgagagactgaacggcaatctttccacactgtggaacaatgcatttgtgcctaaacttcttttggaaaaaaaaaatataattaatttttgtaggtcgcagcggggaaattttttgcgactgtacacatagctgcagcattaaaaacttaaaaaaattgttaaaaaaaaaaaaagggaaaacatttcaaaaaaaaaaaaaaagataaacagttacaccttgttttcaatgtgtggctgagtgcctcgattttttcatgtttttggtgtatttctgatttgtagaagtgtccaaacaggttgtgtgctggagttccttcaagacaaaaacaaacccagcttggtcaaggccattacctgtttcccatctgtagttattcgatgaagtcatgtacatgaccgttctgtagcaataaatgtgccatttttataaactgtttctgacacttgtttcatttcattttgcattgtccatatagctatgattctcttctgtaagtaaaacgcatctatatttcattttccaagtgttggaggtattgacagcttaacaaacaaaacatacaaaaaaaatcacaaaaacaaattgaaaagcaaagcacatgattgatcaaggaagagatgcccttaatgaaaatggaacgggatgcatgcaaaacaaaaagaaaactgtctagaggattaactaattgaaggaatataattaatgtgtgtgtaacactgaagctatgcatttgaagagctctgaactgcaccagtgttttcggttgtgctgcaggttgctaagtcaagtcagccttaaccttttgcaccagttggtcggctgtttggcagaacattctcagatcttttcagtcaaaaatctaagatgatttattttgtatcactttgttaaaagctgaatattgttaactacagttaatattaacactgtatttatactttctcaaactacatccgccccaccacttctggttgcctctgttgactattaatccagatgtaaacaaccagatgtttttttctaacttgtacaaactgacgtgtgtcaactatcatggaaggaaaaaaatgtacagattaaaattattcagtgttatgtactgtaagttaatatttttgtagaatggacatcaatctactttgcaaaatttggaggctatttcaacattgcactgtagaaatgtaaagtaatgtatgcaatgtaaaggaaagcccgcggtagctgagcgcttcataacagaatgttctaatcaagtacgtggtatttggggatgtctccaatattgctcttgtattctttctaattgggtttagtgactagttgaaggaaaatgttataacgccatttggttcacatgtgaagtgccctccatagccaaatgttgggatttttttttttttcgtttttggttggactgtttgcagatatttaaattttatgaaatttccaaagattttggttgataacccccttttaccttctaaatgatttgagatgttcttatgttcttactgtgtgttttaaatatatataaaagagccacaagcatttagtcttttagtattatatttgatcatataactactactgaaaaggggtgggggggaatgtgcctgtgcacccctacagtatcttgtgtagtgtctattaacattgttctcttttagaggaccacattaaaaggtacattaatcttacattttggttcattttcaaagggaagttaaattgctggagaacctaaagtattatccagaagttaagatcacagtaattttagaaatgaagaagggaggagtatccaaaggggctgaaatagggaatcatttttagcctcataattc

SEQ ID NO: 469103 - DNA, 924 bp, Homo sapiens
gtgactccctagtgccctgggaataaatacagagccccgcaacatcaaggggcctaatcatggatagaacccaaggtgattatgtgctgaagacgaaagaccaggtctttaaagactgtccatccaggcccccacattacccacctccaggagcatggggcgtgtttagcattctgtgttgtgctctggagtacagtgacacagaccacaaggtgaatgagcatgaacaagatggcaacgagcttcagaccacccctgaattccgagcccacgtagccaagaagctgggagccctgctggacagcttcattaccatctcagaagcagcaaaggagccagcaaaagctaaggtacagaaagtcgctttggaggatgatggtttccgccttttcttcacatctgtccctggaggccgtgagaaggaagagtctccccaaccccgccgaaagcgacagccctccagctccagcagtgaggacagtgacgaggagtggcggcggtgccgggaggcagctgtgtcggcgtccgacatcctacaggagtcagccatccacagccctggaacagtggagaaggaggcaaagaagaaaaggaagttgaaaaagaaagccaagaaggtggccagtgtcgactcggctgtcgctgccaccacccccaccagcatggccacagtccagaagcagaagtcaggtgagctcaacggggaccaggtgtcgcttgggaccaaaaagaagaaaaaggcaaagaaggccagcgagacctctccattcccaccagcaaagagtgctacagctatacctgcaaactgaacccagccatgggcacagggctcagccagctccaaggacaaggtgtcccccccaccctggggacaaggcatttccaagccccacctccctctccaagttcaaggactgggctggc

SEQ ID NO: 469104 - DNA, 996 bp, Homo sapiens
ctctcccgacaaagtgtgcgaccacagggcaaggctaagtgtgcaatgcggcagctgtcattgtcatcactgtcattatcatcatcattgtcatcatcatcatcattattcccattgtcatcatcatcattcattgtcactatcctcatcaccattgttatcgtcaccatcattattattatcattaccattactaccatcaccatcatcactatcatcatcaccatcaccaccatcatcatcatcgccaccatcaccaccatcatcagcaccatcatcaccatcaccaccaccaccatcatcattaccaccatcatcatcaccatcaccaccatcatcatcatcatcaccatcatcgctaccatcatcatcactactaccatcatcatcaccaccaccatcatcaacatcatcatcatcatcaccatcaccatcatcaccgttatcatcaccatcatcatcaccatcatcgctatcatcatcaccaccatcatcaccatcatcattaccaccatcatcatcaccatcaccaccatcatcaacatcaccatcatcaccatcttcatcatcaccatcatcaccatcatcatcaccatcatcgctaccatcatcatcatcattaccactatcatcatcaccatcaccaccatcatcaacatcatcatcatcatcatcaccatcatcaccattatcatcaccatcatcatcaccatcattgctaccattatcaccatcattaccaccatcatcatcaccatcaccaccatcatcatcaccatcagcaccatcatcatcaccatcatcaccatcatcatcaccatcatcatcattactgtcatcatcaccatcattatcatcatcatcatcatcctcaccatcattaccatcataatcgtcatcatcatcatccagtccagatcccatgctgatgcaataagtagttattaatatcagaaaattattaattttttttactttgctcatttttttaaataa

SEQ ID NO: 469105 - DNA, 1028 bp, Homo sapiens
gtgagataaggagattaatcagtccattacgcaggggctgttttacccgcagattgaacagagaccatgggatctggactggatgatgatgatgacgattatgatggtaatgatggtgaggatgatgatgatgatgataatgatggtgatgatgacagtaatgatgatgatggtgatgatgatggtgatgatggtgatgatgatggtgctgatggtgatgatgatggtggtgatggtgatgatgatggtggtaatgatggtgataatggtagcaatgatggtgatgatgatggtgatgataatggtgatgatggtgatgatgatgatgatgatgttgatgatggtggtgatggtgatgatgatagtggtaatgatgatgatgatggtagcgatgatggtgatgatgatggtgatgatggtgatgatgaagatggtgatgatggtgatgttgatgatggtggtgatggtgatgatgatggtggtaatgatgatggtgatgatggtggtgatgatgatagcgatgatggtgatgatgatggtgatgataacggtgatgatggtgatggtgatgatgatgatgatgttgatgatggtggtggtgatgatgatggtagtagtgatgatgatggtagcgatgatggtgatgatgatgatgatggtggtgatggtgatgatgatggtggtaatgatgatggtggtggtggtgatggtgatgatggtgctgatgatggtggtgatggtggcgatgatgatgatggtggtgatggtgatgatgatagtgatgatggtgatggtagtaatgacacaggatgcctgggctcctccctgccattcacatggctttgtctcttcaggcaagttactctcctctctctgcttcagttcctcatctgcgaattaagtctttgaacttctcatatattaaaatgatatcaaagttgtaaagtaagaaatgtaataaaagcgtttgaggagaaagaagtaagggctggtcacactgaatagaaaatttattttgggaagttgtc

SEQ ID NO: 469106 - DNA, 733 bp, Homo sapiens
aagaaagggatgggacgcacaagccgatggggaagagatggtagaggttcacctctgctccctgtctcagagggccagatctctcccactcaggggctgaagacaagacttgggaaaacgaccactttcttctccttttctgactggggttacccacatgactttctctgcctcagccatcagagttgccttctaaaagcttggcatcaagagcaaggctttgatctctgcacatctgggtctaatttagttttgcttcttgccagctgtgtgaccttgggccaactacttcacctctctgaggcttggagttcttctgtgcaaaatggaaatcacagcaatacctactcaccggagtttaaactacacattttgtaccctccagatcgattaaaactaaaaacagtgtggtaatatcacattttggcaaagatatctgggaatacgtacactcatacattgctgttaggagtgtaaactgttgcagccttttgggaatatgatatttcagcatttatcaaaaattttaaaaaatctgcctactccatgaccagctcttgatgtcaacactaaaggaaaaaggagatgatctagtcagaaaaatctgaaatgctgaaaacctcaggaccattaagacaacgtttgcaaatcaagagatgtctaagactttggaaattaaaaaaataaaataaaagccacattggtttgtgtctcctgccttcccatgggtttg

SEQ ID NO: 469107 - DNA, 484 bp, Homo sapiens
ctcttttgttcttttgtttactgcctgtctctttccactagacttcttccctatggaagcgtaagctatgtatggaggacccatgtctgcttgttcgctgatgtatccctggtgcttagaagaggacttggaatatggaggtattccagaagaaagcattgttatcataggagatgacagttccatgcatgttattccccctgaagaccttccagtaggacacgatatgggggtggaaaacaatgatgttgagaatcctgaccctccagaagtgaccacacctgtgctcctagatgtgctccagctgcctgttgctcacccatgccccctaatgagaaactcctcacctacaaccctgctgatgggaccccatcccctgacagaaggaccagggagatctctgtcccagagggatcccagccatgagctggcaagggcctgtgatttgggtgggatgagtcaatcagattattcctcttagcaa

SEQ ID NO: 469108 - DNA, 892 bp, Homo sapiens
gcaacaagggacatggatttggggctctgcaaagaggggagccgaatgtgagacttgaataaagtgaggtctctcaaagggaacagaagcagaaaggtttcccactagcacagatgagtctgggctctcgaactcagccagaaaagctcctatgaaacccaagagagctcctacacagagaaggagaagcaagcacttaaggtaggctgaagccagcagttaatgcctgcaagttggtcaccatggaaacaacacaagaaaatctccctccactacctcattctttaatatctgaaattttaaatttacaaaattaagatacaaagaatcaatcatgaagttgaagtttatatgagtgctttctgctgttgcatgttgctcaaggtacagtaaaaccttaacatcggtctatgctagcacttttcatgcaggccattatcaaatcagcacaactacctcctgaggaaaaactgcagagctgccgggctgggtggaagaggggtggggatttacaaaagagaaaaagaaaaggactgaaggtagagaataacagagacgtatgcatcacaaacacacaggctcagatgcacagagagatgcacagcagggcaagaccagagaaaggcaagagatgccagagtcaggccaagagagacagggcagagaccgcagcacacaagaacaacttgagaaaaagaagaaatgagagagatgtagagaggcagcatttcagagacatcaaccagagagatgacacaagtatacagagacagacgagagagacagagaatatgtgtgcacatgaaagacagacaaaagaagggaccaacacagagagtgacagaaatacaaagacacaaaacaagagatatacagaatgagagagaaaaac

SEQ ID NO: 469109 - DNA, 1041 bp, Homo sapiens
tctttggagatgtagctggttaacatgaagtcatactggataagggtgggtcctaaattcaattattggtctcctaataagaaggtgcaaagacacacagaaagaagacagccatttgaagacagaggtggagactggaatgatgtagccacaagcccaggagtgataggatttgtcagcagccacgagaagctagaaaggagcaagccaagattcttccctagagcctctgagggaacatggtgggaattgaacaatgagaactcttggacacaggatgtggaacatcacacaccggggcctgtcgtggggtcgggggaggggggagggatagcattaggagatatacctaatgtaaatgacaagttaattggtgcagcacaccaacatgtcacatgtatacatatgtaacaaacctgcgcattgtgcacacgtaccctggaacttaaagcataataattaaaaaaaccaaaaatgtgtttcttgaaaagacagtgtatatagaagcaccttaaaaaactacaaattgtcatttgaatttgtttctatttttattttccaagttttacatgatcacaacatataaaataaacatttctattataattttaaaaaaagtaagtgtggctgcttttatttctgggaaatatttgtgggaacgaaaggtggttgaatgaaacctgcgctaagagacagacctaggcttgcattcccactttgctgcttacttgcttggtattctgggcttagctaatttaactctgtgagcctccatctcttcatctttaaaacggaaacaataatccctaactctcaaagttgtttggcggagatgagataatatttataaactgctttgcacttagcaggggctctgtaactgcttgactctaccacttactttgtgcaaatgacattccctctgctgacttagtttccccatctggaaaatggggacaataatagtactacctcataagcttgctgtgatgattaaaaaatgtactttaagcaaagctcttaaaatgtgctggcattatt

SEQ ID NO: 469110 - DNA, 976 bp, Homo sapiens
tcacagaggtagcaggggctaaacagatgtgcgcacagctgttccacctccttcctgcaggcagagagcaggcagatgctgacaagagtttgagaaacattgccatcaccaactcacacaagtattgcctgcaatggcttccctccccttctctttctgtgtttcttctcaaggaggtcatgggagaaagacggggtgtggaaatatttgtcctatgtgctcaacaggtttactgcaaggatgaagtgacccaatggatgttcaaacacatccaaaaatggaatttggcctctgaaatcctgaagcctgaaattcctctgtttctggagcctggatctccggaagtggaggactgccctagccacaaagctccaccctcctctgatgacatcacacagagtagaaccaatcactgcaattttcttaaagttcctcccactggcaaatttattaatacccaaatagctgagccaagacagtccaactccttgaggacatattacaaactgccacccactctctgtcccacctcctcatactcagggccctatgaggaaacagaaaaatgggagtttagagaaaatttaatgaagcttgcgaattctcagggtctttcgagagccttttgtgaggatcatccatattcctatctggattcagctggctgctctccatccacgaaaaatttgatatttggcttcctgtttgtgcttgaaaaacagggctgactctggagctatattttatttaagccaataaataaaattttagaggagtgagttttggaggggtggagtgagaaatcagtgattgtaatcactggattacctgcttgctcagatcagggttgttgaatgaggggctatttgcaaggctagtttaaaacaactcccattcttgtgttaatgcacctgtttcttgtatttgtcctgatttaaactcttgcaatgtggctactgacctgccttagtgtgag

SEQ ID NO: 469111 - DNA, 1382 bp, Homo sapiens
tctgtcactgcctaggacctgcccagactttttgccacaggacctttaaacttgctgttccttctgcttggaaggctctttccttgtcatgtaaagcttagctcaaatgcagcctcctcagagggctaatgcagagtttggggatggtgatgttgatggtgatggtgatggtggtgatggtgatggtgttgatggtggtggtggtgacgatggtgatggcaatggcgatggtggtggtgatggcaatggtggtggtggtgatggcaatggtggtggtggtgatggtgatggtggcagtgatggtgataacgatggtgatggtggtggtgatggtggtggtggtggtggtgatggtggtggtggtggtgatggtgatggtgatggtggtggtggtgatggtggtggtgatgatgatggtggtggtgatggtggtggtggtgatggtgatggtggtggtgatgtggtggtgatggtgatggtgatggtggcagtgatggtgatagtgatggtgatggtgatggcagtggtgatggtgatggtggtggtgatggtggtggtggtggtgatggtgatggtggcggtgatggtgatggtgatggtggtggtgatggtggtggtgatggtggtggtggtggtgatggtgatggtgatggtggcggtgatggtgatggtggtggtgatggtggtggtgatggtggtggtggtggtgatggtgatggtgatggtggtggtggtggcagtgatggtgatggtggtggtggcagtgatggtgatggtggtggtggcggtgttggtgatagtggtgatggtgatggtggtgatggtggtggtgatggtgatggtgatgatggtgatggtggtgatgttggtggtggtggtgatggtgatggtggtggtgatggtgatggtggtggtggtggtgatggtggtggtgatggtgatgatggtgatggtggtggtgatggtggtggtggtggtggtgatggtgatggtggtggtgatggtaatggtgatggtggtaggcattgcagcaggagataggactcaccttcctttgctccttttttcatatctcaggttcgccctgtgtctcctcaccatgtgtacagccccattcatccagggccccaaccttgggcaggtgacagttttagctctacatgtgtctacagctgaaacttctcccctcttcccccagaaactttgttttgttttgctgatgttctgctatgcagttttcatttaggacctgtttaaatggaagacaactgagcatggcacttcccttctcagtgagtccagtgtagggcaggcaagaaggagcttggtgctccttatagtgggctgtagtgcatattcaagggttgggggtcacctggagt

SEQ ID NO: 469112 - DNA, 1049 bp, Homo sapiens
gcttagctcaaatgcagcctcctcagagggctaatgcagagtttggggatggtgatgttgatggtgatggtgatggtggtgatggtgatggtgttgatggtggtggtggtgacgatggtgatggcaatggcgatggtggtggtgatggcaatggtggtggtggtgatggcaatggtggtggtggtgatggtgatggtggcagtgatggtgataacgatggtgatggtggtggtgatggtggtggtggtggtggtgatggtggtggtggtggtgatggtgatggtgatggtggtggtggtgatggtggtggtgatgatgatggtggtggtgatggtggtggtggtgatggtgatggtggtggtgatgtggtggtgatggtgatggtgatggtggcagtgatggtgatagtgatggtgatggtgatggcagtggtgatggtgatggtggtggtgatggtggtggtggtggtgatggtgatggtggcggtgatggtgatggtgatggtggtggtgatggtggtggtgatggtggtggtggtggtgatggtgatggtgatggtggcggtgatggtgatggtggtggtgatggtggtggtgatggtggtggtggtggtgatggtgatggtgatggtggtggtggtggcagtgatggtgatggtggtggtggcagtgatggtgatggtggtggtggcggtgttggtgatagtggtgatggtgatggtggtgatggtggtggtgatggtgatggtgatgatggtgatggtggtgatgttggtggtggtggtgatggtgatggtggtggtgatggtgatggtggtggtggtggtgatggtggtggtgatggtgatgatggtgatggtggtggtgatggtggtggtggtggtggtgatggtgatggtggtggtgatggtaatggtgatggtgacaggatacagcaatatctgtatctgtttctgtatttgatactgcaagagcagtatcatgtctaaaccaaatagacaacatttctgctgtcttagttcatttgtgtgttgctacaaaatagtaccc

SEQ ID NO: 469113 - DNA, 503 bp, Homo sapiens
gccaagctggatgagtttcacatatgaacacactcatagtatcaccacatagatcaagagatagagcatttctcagaccgcagcaggctgtcttgcgtcctctctcagtcggtattaccccaagggacttgaacccaggtctggctgaccctagagcccatgcagacgccagtgggaagcctcaatgtgagaatgaattgagatccgaggttcttgctcggatcaggtactgggagtacttcagtgcaccagaagagaaaacctctgatcatagagtaccatctggatttgtcttataccaccaggattatgtgaaatacatagtgccctttggaaaaccttcaagcagccccaggaaggtggatcaggtgggaataccctttatttttactgagcaagaaacaggttctgagaagtgcggtgattttaccaggcttacgtagccagaaggtgctagaattgggccctctgattccgtctcctgcctccgtcattttctaaat

SEQ ID NO: 469114 - DNA, 832 bp, Homo sapiens
ggacttgatgtttgaacatctcatgtggttctgtgtgataacagctgtccctttttctgtctggcaggctgcttcctggggtccttcaactgtggtgcaaatggggcatatacagataagattccatctgccctgggtggcgttcctgaaccttgggggcctggctcaccatgaatcctcagcttctgttgtcccttgctgcctatcttggagcaaaaacaagccctttttcctctttgcttggctgctgcgttttccttgtattcagggcgacctgaatgatgagaagcagcaagtcacgtatagatctggaggaataatgttccaggcagagggaacagccagtgtagagcctgagatgggaatgagcctggggatgcgttctcacatggaggatgggaagaaccctggtatctgcagcccctataagggcactaattccattatgaggaccccactctcatgatctaatcacttcccaaaggccccaccaactagtgccatcacactgaagattaggtttcaacacaggagtttttgggaagcacaaatattcaaagcagttagatgaagtgatttacctgaaagaaataataaagaagagaagctgaccacttattcctatcatctcaaaaacaaaatgacacgctttttattttgaagtgaaagaattggatggatcaaactagattggcatctgaacgtgtttccctcaaatggcccagtgtcggggggagggacattaatttctttaatgaacattgacttaacttcaatcatgaagagttttacccctttctgacatagcacattatatgcctagggtgaggat

SEQ ID NO: 469115 - DNA, 474 bp, Homo sapiens
tgtgcagtgtttgtcatcatcttttcttgctgtgattttttaaaaatgatctttcccggaaaaccgtgtctttcctgcctttgcgtcagtaaaactccaaagtctttggtgatgtttggcagcacctcctgcgtcttgggggctctattttcaatgcatttttccaaagctcatggctcagagatacaacaagaacagatcatggaagattcaaatccagactatgccagaaaagtgatctgggctgaagaaaacctcctggccattcccagaagcatcccgtcggcatctgggcaaaggcaggaggagcctcagacatcaccacctgccagctcctccactgaaggcgtcctggacctgaagctatcaggagattggaatcattgctgtggtttgtacagcagggcctgagtcttggttatatcatttgttgccatacaattgttcatggtattataatctttttatgttttc

SEQ ID NO: 469116 - DNA, 1343 bp, Homo sapiens
gaagtggaagtcttacaagaaaatctccgtagatgttctacttgtcacttattacaagagacagcatttcagcgccctcagttaatgcgactgaaggtgaaggacctgcggcagtatctcattctgagaaatatacccatagatacttgtcgtgagaaagaagacttggtggatctagtactgtgccatcatggactaggctctgaggacgacatggacacaagcaggagagcttatggatggagaccaaacatccagatctggagtgccggcacagcaaacacagaagatgatgatgacgacgatgatgaggatgatgatgatgaagaagaaaacgcagaggatcggaaccccgggctctccaaggagagagtgagagcttcactgtctgacttgtcaagccttgatgatgtggaaggaatgagcgtgcgccagctgaaggaaattctggctcggaattttgtcaactattctggctgttgtgaaaaatgggaactggtagagaaagtaaaccggttatacaaagagaatgaagaaaaccaaaagtcctatggcgagcggctgcagctgcaggatgaggaagacgacagcctgtgtcgcatctgcatggatgccgtcatcgactgtgtcctactggagtgtgggcacatggttacctgcaccaagtgcggcaagcgcatgagtgagtgtcccatctgccggcagtatgtggtgcgagccgtgcacgtgttcaagtcctgaaacaggctcccctcaccaggacagtcacccccaaacttgacccccaacatttcaatgcacagaagggactggaaagttatgttcaaaggctgaagctattttaaaacattattttgactactaagtggggacagaaagatccatcctgagttgtggaaacattggtccatgccgtgagcctgtctgcctgtggacacgtgagcttcccgggctcagctgggctttatcacacatcccgtgaacactcattgaagtcagcctgtttgcgccatgtgggcatcagccactgctgtcttgggaggacacttatcctgttctcttatttccccttcatcctatttttaacttaaactgctcagatgtttgaaacttctgtcctctttggatgagatcagtgtccacaagtggccgacatggaacatgctgagcagtggctcctctgaatgttcactttattagtcatgtatattttaaatgctaacatttgatgaatgtaagtttccacattgttgctgtttctgcatttaaacataattgggaacaactgacattctctagtcgactgccagggccttagactccacatgtccatttttgttcag

SEQ ID NO: 469117 - DNA, 423 bp, Homo sapiens
taatgaacagaaatgtattggctcaaaatggagactgggaagtccaagattgaggggctggcgtggcatcttgtgggaaccttcttgctgtgtcatcccatggtggaaggtggaagggcaagagagggtggtgaccaagtgaagaaagatgaggctgaagaacctgccatgggccagatcatgcagagacttttaaacttcattaaagatattcgtcttcattttcaggacaatagagggtcattgaattgttttaacaaggggaatgacagtatcacacttgcattgaaagataatgggtcagatggaagccactatgaaacccctgacaatgctgaacctatcccagaatctgtcccagttgtataatctccccgcttagtgaaatccagaaaccccgaggcatttccaagcttgcaagcc

SEQ ID NO: 469118 - DNA, 2071 bp, Homo sapiens
tgctgagtcaggagctcataatatatttggcaagccaagtttcctatacttgaagagtaaaagaatacaagagtgaaatcataggataagatggcaaacaaaagaaaatcactaataagagtacttagttcatgaatggaagatgcaaaaaccatcaccaacaccatcatcatcatcaccatcatcctcatcaccatcatcaccatcaccatcatcatcatcatcaccatcaccatcattatcaccatcatcatcaccagcatcatcatcatcaccatcatcctcaccaccattatcatcaccatcatcctcaccaccaccatcatcaccaccatcatcatcaccatcatcctcaccatcatcatcatcaccatcatcatcaccatcatcatcaccaccatcgtcaccatcatcctcaccaccatcatcaccaccatcatcctcaccaccatcatcactgtcatcatcaccatcaccatcatcatcaccaccatcatcaccaccatcctcaccatcaccatcatcatcaccatcatcatcaccaccatcatcaccatcatcaccatcaccatcattatcaccatcatcatcaccagcatcatcatcatcaccatcatcctcaccaccatcatcatcatcaccatcatcctcaccaccatcatcatcatcaccatcatcatcatcaccatcatcatcatcacattgtgttggacacatccttatccctccctaatatttcagtcattaatgagccctatcccactccatcccatcccactgtccccctacctctctttgattggtattatgattataatattccagctggcagcctaagcttgatgttcttaaagcatctccttgcaaaaataggccttgcaatttctcatgatgtctcttcagtacacttgcacttctgcccatctctcccatggacaagacttctgaaaccaattggaatagaaccagtgggctttcacttgcatctgaatcgtctgggggtgggggagagcagggaggaaatgtttctgagaatgcatattcctgagcccaatccacaatttatttggtctgagccattgaggcttacttaaatcagctatgaagagagtttcttacccatcttctgtcaatgtcagatgggaaaactaaagcccagaaagggggaagaacctgccaaaagtctcacaacaggaatcttttttttttaatttttttatttccataggtttttggggaacaggtggtgtttggttacatcatttctttagtggtgatttgtgagattttggtgcacccatcacctgggccatatacactgcagccaatttgtagtcttttatccctcacctccttcccacccctttcccttgagtccccaaagtccactgtgtcattcttatgcctttgcatcatcataccttagctctacttatgagtgagaacacagtatgtttggttttccattcctgagttacttcacttagaataatagtcttcaacctcatccaaattgctgcaaataccataaattcactcctttatatggatgagcagtattccatcatatatatatagcatatatatgtatatatatatgtatatatagtatatatatgtatatatgtgtgtatatatatgtatatatatgtgtgtatatatatgatggaatactactcatccatatatatatatatatacacatatatacacacatatatatacatatatatacacatatatatacacacacacacacatacacacacacacacacacacacatatatatatgccacagcttctttatccactcattgattgatggccatttgggttggttccacatttttgcaattgcaaattcacaacaggaatcttgatctcctgacagctaagtcagatctttacaccagctgactatttcttcctggtgggcattttagtttagggtcaatgacaatgctggtaaatgttttaacaaccagttctctaggaggtgaagaacaatgatttgtgacaatgccaatttccacggtgtaaatactcccaccgtggctgatttcaatctt

SEQ ID NO: 469119 - DNA, 492 bp, Homo sapiens
gatttgtgacaaaagaccaagaaattcaaaattcccacaatgcgagtcaccaaccgcaaaccaagccggcgaggctccacactcagtctgagtcgggccagtggggggtcctctccccagagcagcatgatctctgtgaaccctggctcggatgagcccccaagtgtgaacacccaggtgaccagcagcaaggacattgaggacaatgagtcatcttcaaccaagccagatgaagaacctctgtatatgaatctgcagaagctcctggagatggttcgggaagatgcccggaggacagtcacaatagaaaatgggatgcaaagaaaagcacccagccgcactaattgtgacatcaacatccactacaagagtggggtgtgtaacaccatgagggccaagttttacagcgtagcccaggaggctggcttctgcctgcaggacaagatggaaatcctcatgaagtaagcgcacatatatatccattcattcaaa

SEQ ID NO: 469120 - DNA, 873 bp, Homo sapiens
gttgtaagctccatgaggttagagattattattattattattattattattattattattattatatctgttcactgctgtatctctagctcctaggacagagcctggcacatatggccgccgccgacagcggcatcagccctcgggccgtgtggcagttccgcaaaatgatcaagtgcgtgatcccggggagtgaccccttcttggaatacaacaactacggctgctactgtggcttggggggctcaggcacccccgtggatgaactggacaagtgctgccagacacatgacaactgctatgaccaggccaagaagctggacagctgtaaatttctgctggacaacccgtacacccacacctattcatactcgtgctctggctcggcaatcacctgtagcagcaaaaacaaagagtgtgaggccttcatttgcaactgcgaccgcaacgctgccatctgcttttcaaaagctccatataacaaggcacacaagaacctggacaccaagaagtacagctgctgttaccccaccgggtttctacagcagaaagtccgagagcgaactcagaactggacagactggccttcattcctggcctagtcaccctcttggtgaccttgggcaggtgagataaaaaggaaatgaatgcagctgcttctttgaaaaagtctttgttctggggcaaatctcctcagcctagaccttaactctttggctgggaaagctgccgggttgagaaatgggctggcagagaggtgttgatttgttgccccctacaggctgcactcagcgagctttgattagtttgagaaaaaacggatgctccttagggatctgtaaagaaatgaaacaagtgaatgcaaagataaac

SEQ ID NO: 469121 - DNA, 771 bp, Homo sapiens
gtctgttcttgtgccagtgccagaatattgtggttactgtgagtgagtgctccaaatgccaggagatctgcctgggtgtgaagtagaactccccctcctcccattcccccataacccacacaggatccctgcacaggaagggtgggagactgagactgctagtccatgcaagcagttgctccacatatctggagatctgcctacacgtggagtggagagggcttcactgcagcacaatctatgcacaggaaggctggaggggttcaggtggctgatccaggtgagagggtggtctgaatacctggagatttgcctgggtgtggatcagagaggactccactgtactgtaatctcagaagagcaggctggggcacccaacaatagcacatggagactggttccatgttaccaagctggctgtagctgcaagtcttattgtccaggagaaactgcagctgtagcagctctcctgccccaggcctgccacagtggagagtacagttctaatgccttctgctgaggtgattttcacagttctggctgtggaggcccctaccccacttcagagcaggcactccaatctctggcctgagaccaaaatacctgttcatcccatggtgaccttctctctccttgatcttcaaattgctgccatcttgtatggatctttgctggtgtctccttacctgaaatctgggttcagtttttcacaaacctagagcctcctttcgcagtcctagatatgtttcctttcctattccaggatgatcc

SEQ ID NO: 469122 - DNA, 638 bp, Homo sapiens
tggatgatatccatgctatctgtagccttcttaaagactttcttcgaaacttcaaagaacctcttctgacctttcgcctaaacaaagcctttatggaagcagcagaaatcacagatgaagacaacagcatatctgccatgtaccaggctgttggtgaactgccccaggccaacagggacacattggttttcctcatgattcacttgcagagagtggctcagagtccatatactaaaatgaatgttgccaatctggctgaagtctttggctctacaatagtggcccatgctgtgcccaatccagaaccagtgacgatgttacaggacatcaagtgtcaacccaaggtggtcgagcgcctgccttccttgcccctggagtactggagtcagttctcaatagtggagcagagaacattgaccccctacatgtcactgaaaactcaaatgccttttcaacaccagatattaaaaatgtttgacttcatattgacccttatctgtaaaacacctatttagaataatatttggaaaaaagtaaatagctttttcaaaatagaaaaaaaaaaaaaaaaaaaagatgtgcctcttcccctcctgccatgattgttgttaagtttcctgtaagttacaaagtttccc

SEQ ID NO: 469123 - DNA, 723 bp, Homo sapiens
ctctctctcctctcctctctctctctctctctctctctctctcgctctctcgctctctcgctcgctctctctcgctctctcttctctcctttcccctgaacccatgaagagtctccaaggctccgggcttgttcccgcatccagtattcctatatccaccaaacacttgaacttaccactgaacacacttgaactcgccactgaacacttgaactcatctctcccaaaccttccaggcttggtcaaattctccaggctgctgcacaagcttctcctgactaactccaaattccctgaggaaaaagaccctaatgttcgtaatgataagtactattggaggaagcacaagagagaggactggaatttcagatatcagaagaagatcataattggaggccaaaaaacacgattgattaactcgttggctactggtgatcgaacccaatctctaacacctctggaggtggggctcagggaggggctgaaagctccaaacctcgaatcatatgggtaagccctctggcaaccagctccccattcttagggactttctaaaagtcatctcattaacataaactcatggtatatttttaatgattgtggtttatagtaacctaatttggctctgggtgctttcagggatgaagactctgtatgagttccttgtttatagagagtctttatattatggccttttcagctgctggttgtagtgacaatgtg

SEQ ID NO: 469124 - DNA, 1022 bp, Homo sapiens
ccttgcatttccatgcagaatgtacaacagcagtagaatctgcagcaaagaagtatgcctattcccgcaattatgatcaaggtcacaagaagaaaaagaagaaagaaagagaaagaaagaaagagagaaagaaagaaagaaggaaggaaggagagagggagagaaggaaggaaggaagaagaagaagaaagaaagaagaacggaaagaagaaagaaagaaagaaggaaggaaggagagagggagagaaggaaggaaggaagaagaagaagaaagaaagaagaacagaaagaagaaagaaagaaagaaagaaagaaagaaagaaagaaagaaagaaagaagaaagaaaagaaagaaagaaagagaaagaaagaaagaaagaaagaaagaaagaaagaaagaaagaaagaaagaaagaaagaaagaaagaaggaaagaaatggttaaaaatagggtacttgattacaatatttcaagcctgggtgcctaggagaaactgatgcaagggcagaaatagagatgcctggagaagacttcacttgtgggacagttgacgatatgaggtgctgcttgcagagtgcccatgacatgttcagcaagtgcttggtaacacaggcccaaagccctgaattgtggaatcagtaaatgaatgaatgaagcactcagatcaaacaaatattcatattataaacaaatcatgtttacatttactgctaatactgggatcactttgtatgtcacagatactttatctcaccttgaagattagctaataactttgtactatttttactttccagagctgagcatgtaaaaatgtgaaatctttcagtacaaattatgatgataaatccaatatgtgattaaccaattgctttggattgcatagtctggcacctctcaaattttaaagtatgggaagtgttggagaaatagatttgaggctgtactttattaaaaaaaaaaaaaccatcactgttgctgttgccatgaggcagtaaaagccagggagtcaccttcactt

SEQ ID NO: 469125 - DNA, 583 bp, Homo sapiens
tcgatgggactgggcgccgtggcgcagtgggtggcgctcattggggaggctccggccgcacaagagcccagggaggggtgggaggctcaggcatggcgggctgcaggtcccgagccctgccccgcaggaaggcagctaaggcctgtacaccctccgcagccgctggaccaggtgctaagcccctcattgcccagggcggcagggccagcccgctgctccgagtgcggaccggccaagcccacgcccacccggaactccagctggcccgcaaacacccgcgcagcccctgttcccgctggcgcctctccctccacacctccctgcaagctgagggagccggctccggccttggccagcccagaaagggactcccacggtgcagcagtgggctgaagggctcctcaagtgccgccaaagtgggagcccaggcagaggaggcgctgagagtgagcgaaggctgtgaggactgccagcacgctgtcacctctcaatatgattgtatacctagaaaaccctaaagactcatccctcatccaaaagattactaggcctaataaataaattcagcaaagtctaaggttac

SEQ ID NO: 469126 - DNA, 678 bp, Homo sapiens
ccaacagctccaaagagacagcgaccatcgagaacgggccatgatgacgatggtggttttccaatttgtgtcagtaacacttgaagagctggtgactgagaaagacttccttgttcttcagataaagctactaaaagtgtgctctcttcctgtttggatgatgagagtgagggggccaagtccttcatcaccaaattcttcccaggttgtagctgctgcacttttccatggaccatgtaaattgggcaagcaaaaaccaagagaaaaacaaatgggtcacttgggtatcaaacatattatttcctatcccttttgtggaacagctgccctactgaaatcagaatcaattaccgttgccagaatggtgactcctttccttgtttcttggaatgagaagactaaaatgaccaggcagcagctagagtttaatgggactcttcctgtgtctgctagtggaaacattttctctctcgtagccaaaatctctaacttacggagaaagaagaatggctgtcactggttggtacttccaggcaaatttatgaaccaggtgccccaggttggttccatatcttttcaattgtgaattgtgctgctattaacatacttgtgcatgtgtctttttcatataatcttctttacttttgggtaggtacccagtagtgggattgctagatc

SEQ ID NO: 469127 - DNA, 1054 bp, Homo sapiens
gacagtggataggcttctgttggttaaaggcactcagagctacagtgcttgtgtgcatcgctgatctactgcctcaccttgctggctacagggctgcagctgagcctaaggcttcttcagctgtggccacatctcctcctttagcttctctaaatcttggactactgcatgtgtagttccatggtgaaagccaccagctcctcctactacaggtctctagccttgaccaggctgcagatggtcagatgcagatgtgggttccattttgttctttgggttccagttgtccttgtgggttctggtgtgtccttgtcctcccccagttcacatccagcttttcttctcaatatcagtcttgctgagaaatctcaggcccactatcagatgctgaagcaacagccttccatagatttctttaccaacttccataattggaggacccagacacacaactggtaccaggagtggtctgaggacgaaggcagtaggatgggttgggggttggataattcgctggtggcaaggagcaccccaccccatgatacatggggtttaacgccggcgaggaccccaggggatggggcaaacttgctgctagggtcgctcttagaaatctgggctggggccagtgacccagctggctggtcagaggactggggaaaaggatggacactgtttctcaaggacaccaccagcatcttggtagcagctcagctacaaagggtcacgtccatcctggaagggccagtggagcttgccaaatgcctgatctgcaggtgtggaatcccatacagcatagcatctgaccatgggacccacttcacaggagcccagtgccaagaccagccctctgtccttcgtactttgttcctcaacctgctgcccttggcttctcagggcccccaacggttccagcctccactgagtgaaagttgacatctcatgtttctctgaattttgtcttccttcacttaaattaccagtcctagtagccagaggctttgaggctctgttctttgatagttaaactaataaattgccaatgttactaatc

SEQ ID NO: 469128 - DNA, 574 bp, Homo sapiens
ggaaaagagacaaggcaataaggccagcaaaggaggagagacaatggaacaatatgtgtgtgatggcagaactggggatgggcctacaatcagtgccatttatggaggtgggaacaatgaacctcctgggccctgtagtgctcctccttgcaatgagagagtacttctaactaagaacatagactgtaagggactgagactgcagagacaatcccacagccacaggattttagagaccgccaaagggaccttagaaaccactttccgccatgatcgaaagttttctgaggaccccccagaagcagatgctgctggaccaggccaagggccttactgccctgcgcagccttgggacatttttcccggcatcctggctgctccagctccagccttggctcaaagggccccagatgcagctcagaatgctgctccagagggtaaaaaccataagccttgggggcttccctgtggtgttaagcctgtgggtgcaagagtacaagagttgagtcttgggagcctctgcccagatttcagaggataaatggaaaagcttcggtgtccatgcagaagcctg

SEQ ID NO: 469129 - DNA, 711 bp, Homo sapiens
agcagcagatgggagctgtttaatacgcagtcagggtggagactcactgaagtagagagtgaagagagccagaatgaaatcctgcagaccctgcagcaggcagcctgaaatgcaggaggcagtcttgggatgcacctgtaaggagcaagaatccaacactccccaatggcaaagacaactgaacatgtttaaaagcactcacttcctagcagtgtttgttttgactactacttttccagactctatgaatcagtatgaacaggtgggctgccttgtcctgaaaggatggacatttttaagcctacttgaagatgagacaccatgtggagcagagaagccttcccagccgagccccacagaccaaaccgggtttctagttgcaagatcatctatccccagtggagctgccagcttactggagagtcagctgagccaacccatgcctgaagaactctcagctgacccagagaatgatgagaaataataaacatgagaaataaagtttgttgttttaagccactatattttgatgcagattttaatatagtaaaagttaactgataaatgccctcagttataaatggaattctaggggagttgaagcctgggcaatacaagatcctaaaagtgggttactttgatagcctacataaaactgtgtaatactatcaaattgagtgcatgaaaaaaaaaaaaaaaacttaccccata

SEQ ID NO: 469130 - DNA, 580 bp, Homo sapiens
cctgccttctgcgtcgatctcgctgggagctgcagacctgagctcttcctgtttgaccatcttgccagcaacccccaagtactgcggtatgaccgcatgtttaagagtcctaaaaccctatgtaagaagtcagtccctaactgaacccatacccaaatcaacaggctcattcctgcggcagcaccatggtgccaccaagtggacagcttttgaacaattaaactcactttgggaagctattgtgacaatgccagctgaggaagcaaagtgcctgaaggactacaattcacatccccaatgtgacagccttcctacagctgtgtgctgtgaattgaaagtttgtgaggaaagaagaggagtattaactcacacgatcacaaggtcccacaaggtgtgcaagctcaggagtaaggaagccagtctgaaccccaaagctgaaaaacttggagtccgatgttcgatggcaggaagcatccagcatgggagaaagatgtaggctaggagactaagccagtccggtcttttcgtgttcttctgcctgatttttattctggcctcactagaagctgattagattgtg

SEQ ID NO: 469131 - DNA, 588 bp, Homo sapiens
gactaaatgatacctttgccctttctttcaaacaaaatctgtgatgatgttcgccatgcgtttgtcatatatggcctttattatgttaaggttaataccaatgacttgtgcaagcactggtctggatgagagtccaggggcattcctcagtcccctggagaaatgcccggtcaaggagcagagcaaccactgctgcaatgatgtcccggcacaggaagtgaggggtggcccccatgccaagaacttgctatataggccaaaaccatacctctcaggcaaatcttcttgtgctcggtcctgtgaaggggagaagcccaattctggcacccatggctggagctcacgctacactttatctgaagtttcctttaacttttctgttgaattctcattttccttcttggataaaagttcactgtgtgaatctctgcatgatagtttgcttcttccaaattggccaggccataaaatctactttcaaaggatgcctcctacataaattttctgctttggaagaaatcacctgggcatgataatcaggggctgtcacattttggagatggtaaggaggaaatttggctagagtat

SEQ ID NO: 469132 - DNA, 1332 bp, Homo sapiens
ctgtaacaccacgaggggctccaccggcggacctgtgcccactgacctaggtgaggacagtcatttctgtttttgtgcccaaatgttgaattttccaagaccaccctggcccaccatgcccccatcctgtgcctataaaaaccctgagaccctagcgggcatgtccacaagcagctggacatcaagaggcacacaccagtggaagaacacacaagcagctggacgtcaggaggacaatgagaggggcacaccggcagaagaacacactggcagacaccagcagatgctggcaggccagctggaaagagttgtccatgttgcaagcagaaatgagacaaacctgaaaaagtctaaaaatttgggccatgaacaggttggaaacgtctatgactacagcttctggatcccaaacagaaatctcagaaaccacaagtatttccacgaaaaactgtcacttcaggaaatagctacagatatattaccttagcaaagtaaatcagcataatttggtttttgttaattcagccaacattcttttgaggcactgtgattaaggcagtatgcaaggttgatttgatattttttttaagctacaaatttccacttatttttaaattgagcaattaaatgtatttattattaagtcaataaattgtagaagcctcatggaatcgtttgttcaatgaaagtctttactaagacaaagaacatgtatttctgctttcctaaaagaggaatttctcttctttttagaatgatactatgctgttttccactggcaaattagaaaagaataaatttcaaggtctgaattggacattactttgaaatacccacagagagaacatttaaaatactcctataataaaatgcagtcatcaaattgccaaaatttgtcccagttgcatgaagaactacagaaagcacaacactaaggagagagatgttctcctatttggcattatagagtgaaaaattacctgaagtgaaaagcatttcactttctgattctgagtagaatcaggtctataaaattaaatgatataagtgtggcccagttttaatttttttaaattacatttttaaaatattttctggatacctatatgacagtgtatcctagatcacactttgataatcttaagcaatgttttctaaatgttcccaggcatgagaattagttagggtgaggaggtgattgttaacatgctggttctcatatcccagaatcagattcattaagtgttgtgagggaccaagggtctgcactttcaccaattcaccttggaggttaaaatgttcactttgaaagttagaatgtatgctagatat

SEQ ID NO: 469133 - DNA, 551 bp, Homo sapiens
gcccagccaactctgcggccggagggaaccctggggggcaagccatgaccggggtcccaggtcacagccccagagctgaccgcgggagggacggggccaccagctccatatgcggcccgccagccgcatcccgccggctccaccagcccatccccagtctggggacgcctgcccctttcactcaccattctcgtcttcggggctgtcctggcgtcctccctatggctcctggagtgtgcagatctcagcgaacagcagagacgccaaacccagtgcagcgggcgcgagaagcaggactctgccagaaacagcaacgaagcccagcacctgcggccaagaagatagacacaccaacaagaacatcattattaaatgcatggaaaaactggagttatatgacagcaatattcaataaaggaactaaaggagaataaaagcaaacatttaaactagatcagagaagcagccccctgcacctacagttagcaaggaaaacccgcattcgggaggctaagagtattccaagcttgggagtcagactctgacccctc

SEQ ID NO: 469134 - DNA, 693 bp, Homo sapiens
tccttaaaaagttgttcatggggctgagagcccccaggggccccacttatgcaccactgtatccccagtgcctgctgcaggcctggcatctgggaggtgcttattcaatggtttttgaatgaatatgtgtgaatgatgaggcctgagaaagaaaatcagcccctgacatccagaaatgggtctgatgaccagaaacaggccattatcattgtcgctttattggagataaaagatgacggggagaaaaggaggatggacaaaggtgaagggacagcatggtgctcctccttgctgatccacgtggttggaatggaggctgagagaaaaaatgggcagagccagaaatcccaggacctggtgttagtgggatgtggggctcagctgcccacctgtggcccagagcagtggaggatgccttggctgtgccctggcacacagccctctacctccctggcatctgagcactggggactgtggcagtgggctccggtaacccccacaggcccccatgatgtatgttcccatcctacatatgaggaaatagtatctcagggagatgatgtgacttgctcagggttacacagcaaatacctggacagggtgtgacttgacaaagctttttgtccaagttaaaatgccagagacataatattgcaataatgccagtagaagttgctatttattaagctccta

SEQ ID NO: 469135 - DNA, 1020 bp, Homo sapiens
cagcagtatcccacactactggtcccaagtatgactgtgcaaccactttgctggcaagggggtgtaacagcttcttggaagctcatgggcctctcctacttgggaaagggctttcagcagggtggactatgtcagagggaaaatccggggctcaagtgctgctgttcagattttgtcccacaaggtgctccctttcgtcacgctttccctcttcccatagggatggggctccctgagagccaaagtgcagtgattgttttttcccttctgggtctggctaccacgtggagctactgggctctgggctggtacaggggtggtgggcggggtgtctgcaaagaatcctgtgatgtgacccatcttcaggtctctcagctgtggatgccagcatctgctccagtggagaatgcttttaatgatgaggaaaaggatctttatacttatctccagaattttaaaaaacttaactcagaggatttatctaaaagtcccatagcctaacatacaaatcaaatttcaaggatctgatttcagcttgaagaattttagctaatgaattacttggccaagcaactactcttcttttttttcttttaattaaaccaaagaaattatctatggtacaaaatactcttaacagtccaataattcatgtgatgagtgaaactgtaaaacctgcagttgtttacataactgtataaaactgtgccctctccaaactgaagccacagaaccatcacaagttgtatctgaggattttctccttatttacaagctaattatcatggaggattgatcatttcctgttccactaggaattaactgcaaggcctttctgtccctaaagccaacagtacactctcacttgtttcctatttcaaattatgtccactcatgttgtccaacataaactatctaagattctgaaataagagcaaaagtcaaattaggatagtccaataataatatgccaacaggagatttccaaatctggaatatatcttctctaatttttatatt

SEQ ID NO: 469136 - DNA, 869 bp, Homo sapiens
tccccagcaatacaaccagacaaccccaaaatggcacatgtgagtgtcagcaatggcaacattgggctccaggccagctggcccttaggtttccaggtggggtgcataggcactggtgggccgggtggtctgctccttgggtccccaggtgggacactggacattagcagtgaagatgtatataaggcactgcatgggcttgggtgccagcagcatagccacatcctcagatccagcaggacccacaatgctgcagtcctctgggtgaatgtgggagactttgatggggccctgggatatggggatacagaagataatgaactgtcggatcgtttgccaatggtggtgtctaatattcactggggaccaagccctggctcagtgtttctccgaaagttcctatcaatcaaaagcactatagaaacctgggtaatgagagcttgcagtctagtgatggtagcaaacttatatagaggcaacctcaccagaatgcaatgagagttaagcaaagaaaactacagccaacaaataactgtggacccagaaataacaagtgagacacatgtatagattattcccttctctaggggctaaagcacacaagaaatataaacactgggtgggtttgccaaatgcaagagctactcagccttcctctctcttctgacacccatgagatttacaacacatgagtccacttcccagacaacaggttgtaccaaggggtgcacttgacagaaagacaactttgtagcccatacttaggttagaaaagaaaataatattttagaagatttttttttttttttgaaaattggacattataaatagtaatgttgtagaactttctccttagttcagctaaaaac

SEQ ID NO: 469137 - DNA, 597 bp, Homo sapiens
tccaccgtcctccagaccccagaatggtagatccactgacagcttgcactggaaaagctgcagacactcaacaccagcccacgaaaatagctgggaggaaggccgtactctgcaaagccacagacgtggagctgctcaagaccattggaacccacctcttacatcagtgtgacctggtagcagagaaggcagatgacgggctcctcattgctgaactccagcccataaaaatgcttcaccgcactctgagctatttttgcaaggacatctgttgccaaaaaagaattttaattaagcaaaaacacatctctgttttgtccgtggcaaggaggcttgtgaaagctttcttgtctcagatgcatgctaaatctggagaaatggaagctttaagaagcaatctacataaaaagcacaacatggtcttcagttagcccctgccctttgtaacagagaatgtttagtctgagatgtcacacttagtgggagccgctaaagtaattacataattatagtctccagctacacttcattttgtgtagtttaataattttaaaatagcatatgctccctccttcttccttagagtaataaggtttg

SEQ ID NO: 469138 - DNA, 630 bp, Homo sapiens
agccctgccatggcttaagctttcaaactgcctctcagggccaacttacagtgggtccctggactcatgcagttgtcatttccccagtgccggaatgcataatgggcacagacatacttagcagctggcagaacctccacattggctccctgactggtagggtgagggctattatgatgggaatggccaaatggaagccattagagctgcctctacccagaaaaaggaacagaagaaggctctgcaataggtccaggctgctgtgcaagctgctctgccacttgggccatatgacccagcagatccaatggtgcttgtggtgtcagtggcagataaggatgctgtttggatcctttggcaggaaccccataggtgaatcacagcagaggctgctgggattttggagcaaggccctgctatcttctgcagataactactctccttttgagagacagctgttggcctgttactgggctttggtgaaaactgaacatttgactatgggtcatcaagtcaccatgtgatctgaactgcctatcatgaaccgggtgctttctgacccatctagccacacagtgggtcgtgcacaacagtattccatcttcaaagggaagtggcatatacgtgatc

SEQ ID NO: 469139 - DNA, 664 bp, Homo sapiens
cctgctcgagccccatcatgtatataccacttccatttgatgatggaatgttgctgtgcgtgacccactttatggctagatggctgaaggcaaattgcttctggtgggccttatggacaggaatggagaaaaaggcatttgccaagtcaatggctgcatactgggttccagatgtgttaatttgctcaagcaatgaaaccacatctggtacagcagctgtaattggagtagaggcagctcaaatggcttcccaccataatagccctcaccctactagtcagggagccagtgtgggggttctgccagctgctaaatatgtctatgccaattatgcattctggcactggggaaatgaccacaggaagatctttggtactacattacttgaaatgttttggggatttaaaatagaagtttttgtttttgttaggtttttccctcagtggagtacacgaggtaacaactacactgtaaagggagtagtgtgtaaagaggatccctttactgtcctatgattaattttatcaacttttcctaaaattaggagtgaatacatcattaacagaaatagcagaaaacaattagataatgataagaagtacagagctaataggatagattttataaaggagagtttattaagtagtattaattcacacagtca

SEQ ID NO: 469140 - DNA, 653 bp, Homo sapiens
tctggtcagcagggacctggtcaatgtgggctgctgagcactgcttggataagccaggtgcaatgtgcattattgaaggccctgtggacagctgggatagcccagtgatgcccaagggcctagtcgaaagtggacaaagcacatatttggatggacctgggagatcctgctcagagattctgacaggacaaaggattccagaacactgctacaaggctctgagtgtttgttcctcacataggattccagaacactgctgccattgtctgaatgtttgtcctccacataggattccagaagtctgctgctggggtctgaatgtttgtctcccatctaggattccagaacactgctgtgagggtctgaattcacatagaattccagaacactgctacaagggtgtgaatatttttccctcacctagtattccagaacactgttgcaagggtctgcatgttggtccgtcatataggattccagaacactgctgctgtggtctgaatgtttgtccctcacataaaattctggaacactgctacaagggtctgaatgtttgtccttcacataccattccagaacactgctgccgtggtctgaatgtatgtccctcacataggattccagaacactgctactaggttctgaatgttttt

SEQ ID NO: 469141 - DNA, 3287 bp, Homo sapiens
gcacagcgcttcattcaccgacctcagttcacatgtgctgatccttgaatgtactcacacctgctgcagggcactgacaaacaggtggcggggctcttccccgtggtctactgctctgatggcttctgtgacctcacgggcttctcccgggctgaggtcatgcagcggggctgtgcctgctccttcctttatgggccagacaccagtgagctcgtccgccaacagatccgcaaggccctggacgagcacaaggagttcaaggctgagctgatcctgtaccggaagagcgcctcagcctgcattcagttccaacctcgggtttcccgcatccaacagaaaaacatccgcatttcggcagggcagatctaccacacgacagggctcccgttctggtgtctcctggatgtgatacccataaagaatgagaaaggggaggtggctctcttcctagtctctcacaaggacatcagcgaaaccaagaaccgagggggccccgacagatggaaggagacaggtggtggccggcgccgatatggccgggcacgatccaaaggcttcaatgccaaccggcggcggagccgggccgtgctctaccacctgtccgggcacctgcagaagcagcccaagggcaagcacaagctcaataagggggtgtttggggagaaaccaaacttgcctgagtacaaagtagccgccatccggaagtcgcccttcatcctgttgcactgtggggcactgagagccacctgggatggcttcatcctgctcgccacactctatgtggctgtcactgtgccctacagcgtgtgtgtgagcacagcacgggagcccagtgccgcccgcggcccgcccagcgtctgtgacctggccgtggaggtcctcttcatccttgacattgtgctgaatttccgtaccacattcgtgtccaagtcgggccaggtggtgtttgccccaaagtccatttgcctccactacgtcaccacctggttcctgctggatgtcatcgcggcgctgccctttgacctgctacatgccttcaaggtcaacgtgtacttcggggcccatctgctgaagacggtgcgcctgctgcgcctgctgcgcctgcttccgcggctggaccggtactcgcagtacagcgccgtggtgctgacactgctcatggccgtgttcgccctgctcgcgcactgggtcgcctgcgtctggttttacattggccagcgggagatcgagagcagcgaatccgagctgcctgagattggtactggaggctccctctgcatgtggtggggagggagttgtgtcagaggagtgctggcagtgaaggggcaaagcggcgggaagccatggggctgggtctgtgtctgcgtgtccccacccccagggcccggcatcctcgcccacagtcttcctgcctgctcaggccctgctgttcccccctcaggctggctgcaggagctggcccgccgactggagactccctactacctggtgggccggaggccagctggagggaacagctccggccagagtgacaactgcagcagcagcagcgaggccaacgggacggggctggagctgctgggcggcccgtcgctgcgcagcgcctacatcacctccctctacttcgcactcagcagcctcaccagcgtgggcttcggcaacgtgtccgccaacacggacaccgagaagatcttctccatctgcaccatgctcatcggcggtgagcccggccgcgcgcgtcttcccggggccactcccagacttctgcccgcaggcggcgccgtcccactccccggagggcctgaggccgggggctcttccgctttagccctgatgcacgcggtggtgtttgggaacgtgacggccatcatccagcgcatgtacgcccgccgctttctgtaccacagccgcacgcgcgacctgcgcgactacatccgcatccaccgtatccccaagcccctcaagcagcgcatgctggagtacttccaggccacctgggcggtgaacaatggcatcgacaccaccgagctgctgcagagcctccctgacgagctgcgcgcagacatcgccatgcacctgcacaaggaggtcctgcagctgccactgtttgaggcggccagccgcggctgcctgcgggcactgtctctggccctgcggcccgccttctgcacgccgggcgagtacctcatccaccaaggcgatgccctgcaggccctctactttgtctgctctggctccatggaggtgctcaagggtggcaccgtgctcgccatcctagtcaaggacttgtacatgtggggaggtggtgacctgaccactgctgacgacatcgaatcctcaggcagccaaggcacgtgtagattcactgtggggactgctgaagccctggggctgaggtttctcattcatctggcaatccacaatcaagatgagaagcaggaaagggccaggaaggcttcagctacagaggcccagcccagctctgaagggaatctcagcaacctgcagccccctcttctctcctcatggctgaagctctcagggcttgctgacctctacttcctctccccagggaagggcgacctgatcggctgtgagctgccccggcgggagcaggtggtaaaggccaatgccgacgtgaaggggctgacgtactgcgtcctgcagtgtctgcagctggctggcctgcacgacagccttgcgctgtaccccgagtttgccccgcgcttcagtcgtggcctccgaggggagctcagctacaacctgggtgctgggggaggctctgcagaggtggacaccagctccctgagcggcgacaatacccttatgtccacgctggaggagaaggagacagatggggagcagggccccacggtctccccagccccagctgatgagccctccagccccctgctgtcccctggctgcacctcctcatcctcagctgccaagctgctatccccacgtcgaacagcaccccggcctcgtctaggtggcagagggaggccaggcagggcaggggctttgaaggctgaggctggcccctctgctcccccacgggccctagaggggctacggctgccccccatgccatggaatgtgcccccagatctgagccccagggtagtagatggcattgaagacggctgtggctcggaccagcccaagttctctttccgcgtgggccagtctggcccggaatgtagcagcagcccctcccctggaccaggagtcaggtcctaccaggtcaatgtgctctaactggggcaaggcctagacccccaaat

SEQ ID NO: 469142 - DNA, 2871 bp, Homo sapiens
ctggacaaagcagagcgtagagaacaccttctctgctctctgtgaaataggaatgatgatgatgttgataatggtgatgatgatagtgatgatggtgatgaggatgatggtgatgatggtgatgataatggtgatggtgatgatgatggtaatgatggtgatgtgatgatggtgatgatgatggtaataatgatattgacgatgatgatgattgttacaatgatgatgatggtggtagtggtgatgatggtgatgatgatagtgatgatgatggtgatggtgatgatgatggtgataatgatgttgatggtgatgattttatgattatgatgatgatgatggtggtggtgatgatggtgataacgatgatggtgatgatcatggtggtgataatgatgactacgacggtcatgattgtcatcatgatgatgatgatgatggtgatgatgatgatgatggtgatggtggtgatgatgataatgatgatggtgatggtggtgatgatgatgatggtgatggtggtgatgatgataatgatgatggtgatgattattatgatgataatgatggtggtggtgatgatgattatgatggtgatgatggtgatgacgctaatgatgatggtgatgattattatgattatgatagtaacgatggtggtggtgatggtgatggtgatgatggtggtggagagagcccagctctgcccccgggacacccaggccttcaccccaaatagcggatcctgtgggacccatagcactggggccctggggcactgggcgctgggcctgcgtggatttcccagccttgctggaattccgtgcttcgcagcaaactccttcatgcgggggaagccggaggagaaggcccagggaaaatggcccctcagcccaccgtggtaccaagtggccaaagtctacgccatgccccccgaacgcctacgagctcatctgatctcggaagctaagcaggggaccctgttggaggccacgtgggtaacaggcctgcaccggacacagcacttcggcgaaggcaatggggatcctgattggccgcccagggccctcccagagccagacgcggaaggggagggagctctcccgggagcctcacgcgggacactgagcacagcccctatcgcacacgcggttatcgataaacgcagacgtgacacgttcgtgggtccccgcctcgccctgcccacctggggtgcgctccctgcaagtctgcgcccccacgcgccctcggcccggcgcgggtcttctgcggacgcctccagccagctccgggtccctgcgcggaggacgctgattcgtgtctgcccccgcagcagccaccgagcctcgaccggcggcttccgaatgcacgaagtccacgctcctgcccgggaccctgagtcggggcctggtccacgcgtgccgccgcctctagggccctgacccctcccgggcacagcgggcccgtccccggaggcgatgccggcccgggtctgccctgcggttccccctcccgcgctgcttcctgcccgcagtaggggccgctcctcaccgcgcaggccccgctcagaggagccccagagctggagaggcccccgcggctggagaggccccgccgccccccagatgcccccgggccctgcccggttcttcccttcccagccccagaacctctggcttcacctcttcccttcatttcacggatccgcttatttcaggggagctccaggagggcagggattttgtccgtttctttcacttttggatctgcagagcccaggacagcacctggcccgtagtagacacaagattccgcgtgtcaactgtatccacggaaaccattccttagtttattgtcaccgccattcctaactctgatgtgaaaatccctgcgttcatcaacataacccagttagggtcgcactcatcacggggcccccattgcctctggcgcaccccacgactgacatctgcggggccttcgcgctaggcttcgagtttcagcttccgcaccaggcctgcctttctgcaggggccagggtgggggtcgtgtgctgattgggccctctgaaccgccaccgctgcagaggggctgttccttctgtcacatcccttgtgcccgaatccaccctgtgtcttctcttttctcagcaggacattttaaaagcccagaccccctccttacagagcaaatgtccaggcttcggaggtcactgtcacatcccaagaacccccttcaccaggtgccactcttgagactggactgaagccccctggagagttccacttgcctttgtcctgctgcctgaggtgaggacatggacggccgggtacaagacggggcaggcaacctcgcagtggtggtaaccctgtgcatgaaccctgggcctggcacgtggacctcctgtgaccgtccccacaggcccgtgaggctgagcttggcactgcccaagaccacacagtccatgcgcggtggagctggggtccaggctgcccaccagggcagtgactacaatggtggcagcaggggacggtcaccgtcatgagctcaagccaggcgctgcactgaccttgagggagggctccatgcttccccttcccacagctgcagagacggagtccagggactccccaggcctgggccacgcgactgccctaagagcctggcatcagggagcagtgctgtgtgcacccccaggtccactgagagtagggagggggcttccccacgggtaggtggggatggagggtggtccgaagatcaggagacggagccccgcccctcttcgcagacgaagaagaagacgtctaaatgttgaaatgttgaaatgtttcaaatgttaaatgttgaaaacccttaaacgaagaatgt

SEQ ID NO: 469143 - DNA, 3915 bp, Homo sapiens
gggcctgagagacactggatccctgccgtgatgcgtccacgccatcttcacaggactgcctcatttgccctcacaaggcgatcgtgtcaatacgacagttatctgcattttacaggaagctccagcgcccccttccccgaatcccagcctgcagagcttctcttccagacgcaggtgccaccgttcgcgatgctgggagcagagccgccctgcgccatggagaagagcagagcgaacctggctctagtgctgggctctggcgctgccgtgagcacgtgctcaccacacgtccttgtcgtcttctccggggagagccctgacttatccgagggagccacatgcccttccatcctgctgcggccgcctcctcgatttctgcatctccgctccagagcccagtccttcagcctgcagacgagaataatcaatgcccaggtcttggaagagttgaagagaaagcctattgcatgtcagaacatgcctcagaagggaacgggtgccacggaaacactgctgacaccgttggtgtgtcccctgactgcccctggagagggcccgactgggattcagcacccagactgtgcagggaaacatctcctcacaggaaaggaaatctccatttctaccaatggacattccatgcaagtcaccctgaaaattcatggcggaagggcagtgggacctgaccgaggggctggatcagggtgcacgggtgctctcacatgctgggtgacagtacaccgagtgaccttgctgggtgctctcacatgctgggtgacagtacaccgagtgaccttgctgggtgctctcttgggctgggtgacagtacaccgagtgaccttgctgggtgctctcttgggctgggtggcagtacaccgagtgaccttgctgggtgctctcatgggctgggtgacagtacaccgagtgaccttgctgggtgctctcttgggctgggtgacagtacaccgagtgaccttgctgggtgctctcatgggctgggtgacagtacaccgagtgaccttgctgggtgctctcttgggctgggtgacagtacaccgagtgaccttgctgggtgctctcatgggctgggtgacagtacaccgagtgaccttgctgggtgctctcttgggctgggtgacagtacaccgagtgaccttgctgggtgctctcatgggctgggtgacagtacaccgagtgaccttgctgagtgctctcttgggctgggtgacagtacaccgagtgaccttgctgggtgctctcatgggctgggtgacagtacaccgagtgaccttgctgtaccccaaaacctaagcacaaccatcaaagctacagctacaacagccacacaaaaatcagccagacagatgtttgcactcttcttcctctggctgtggcacgcgaccactgggccaagcctctgtgtgagtttctttcatctccacgcggtttctgctgtgacctttttccccagcactgactttacaggaagtccgcttaaatggggccagcatttctgcgttcaataattcaatgcttgcgctcaccgccaggccggttaatttagtaacagtggggagcacaggctgccttccacccgtagatcatgttccatcatgttccgctttgacttccagagcacacgggtgggtgaggacactgtccttcccagcgacggctgtgacttttacgtggccatttaatgctcccagttaatgtgatggtgagaggaaaatgacctgtgctgatagcagtcctggctgcctaaaggttcccagcattttcctggtaaaacgctagtgccactaatacacaggtgtgtgcaaacagtgtgcacatctgtaatacagtggacacacagaccatatttcaaaagctctctggcagggatttgaaattaagtgacaagacatccctgtcaaggacaggatgaagcaatgttccatggttgctaagatgccaagttatttggacaacaattttcccttgtcctaaagagctactgttgattccaagggacgcatcctccttgtaatgacccaggtgacaaactgctcctgggctcacactcttccgtgccagccccagatatcttcccagctcagtcccagggaggaggtattgagcttcctttgggaaatcaagagcaaagctccctcccaactcatggtgttccccgagcagaatagaggccggctgtgtgcgttgaagaaatgaatgaagtgattgggagctgagtgccggcggagaccggcccccctgggcatatgtgaaaacctgaggaccccactgaactttcaaaatccaaagaagagaatcctgaggaaagatctgtatcatttgctggggtgtaagatgtgcaaggatattaacaatttaacaaacacgtatcaaagggaggtataagtactcattttataactcccatgttcattcaataaataccctacctgtatcctatgtgccagacacagatccagatgctgagaagagtcaactaacagctcacaggtcacactgagcttgtgctccctaatggaatgatggtgatgatggtgttggtgatgatgatggtcatgatggtgatggtgatggttgtgatggggatggtgatgattgtcatgatggtaatgatggtgatgatgatgggatgatgatggtgataatgatggtaatgagagtgatggtgatgggatgatggtgatgatggtgatggtgttggtgatggtgatgagataatggtaatggtgatgggatgatggcagtgctgctgatggtgatgatgatgatggtgatatgatgatgatgatggtgatatgatgatgatgatggtgatgtgatgatgatgatggtgatgtggtgatatggtggtgatggtaatggtgatggcagtgatggtgataattaaggtgatggtgatggtgacgatgataatggtggtgatggtggtgatggtgatgatggtgataatggtgatcatgacagtgtcagcagaggaagcaggcacagtagtagcaatctgagtaaacattacacagcccttaatatgcaacagatgctattctgggcacctcccatatgtcaggtcactcaactgacacgacatcacctgaggggcaaggctgcaattaaacatctcattgccctggctcccgctccgggactgcctgcaggaaaaccaatgatcagaaatgcagctggtggggtgcccagactcctcagggccctgccttcatctgatgatgctgctgagctttgcacatgaactgtgccatcccaggaggctgtgctctcatgaggaggggatgggtgctctgatgctgagatcatgtatggggctgtgtgcgtggaagtgaggtaggaggtgagggctccactctggaggagattgaagactgggtgaaacagagaaaaggccacagcgcctctccataagacacggccactagtgccatgacagtttaccattgccacgacaacactgtgaacttacctcacctttccatggcagcaaccccaagacctggaagttaccacctttttcctgaaatttctgtgtaatccattccttaatttgcatgtaattaagagggggtatgtatagatatatatgattgcagagccgccccaccgctcccctcagctcactgccctgggctgagccccacttttggggctctcctgccctgcttcagaaggggacaccccagcatgcaccagcccacaccccgcctcctccgtcctcttccccactcactggcctcattggggaatgcttggaattattccaggacagctttgtcctttgcccagtgctgtgtccccaggtaaacagtgggtacctgcagagagaggtcctcatggggacagagcctgcagtgccacagggcccatgccacctccctcctgggtacactt

SEQ ID NO: 469144 - DNA, 1119 bp, Homo sapiens
ggccagcatgcagggaccactgagtctgcgcttgttctgccccacaccacccccagctcagagcctgaagggtagagggcagcgccaccttcctaaagcactggggggcagagggccggatatcaacgtaacatccggttgtttgaacccgtggagaactgcggggcacggttctcctctgcttctcagccacgccgtcccgccatgcgttcttcacccacatttgtcgacctgaaatgtgggggtcctagagggcccctcttcagagccacacttacagccagccagttgcaaagagggcaggtagattccacaccatcttccacagcccgctgcctgccactctctgcagctcaaatttcaggggctcctgcagctgagacatggaccctactttacgccaagcagagggccgtggggttccctcgtgtgactgtgaggtttgctggagactgcgagcctgccagtgtggcctctgccctgcctggtgcccatcctgtctccgatccacctgcacgccgcatcctggatcctcatctcccgcacccatggatttcagcatccagtgtttcttggcgttccctctcacaggcccagttcctcatggacgtcaccacctgcagcctcactggggcttcttccattcctgaatgagcgcaggggcctctgcgctcgctgcttcctgtctggactgttcttccctggatttctgcgtgttcccccctccttgttcaggtctcttctcaaagaccactccccagcgaactcttcactctgtctcctcctctgtgtcattgtaaccagccacctcctggggctgaccgtcaggaacaagaactgtccaaggaagagcagctctgagaagccctaggtcttgtcttctctcagaaaagagcctgggttttatgaacatccaggtctgctccccattccttgtgggctgcccattgtcatatgatccaacatggctgtttccccccaaaggacaacaggcagggcttgggagggacccaaagagagaacctggctaggactgtccatgctaagggacatgctgttcaaagatgtcttaggatccttggagcccctaacaaaccatttttgctagcaaagcttttt

SEQ ID NO: 469145 - DNA, 2931 bp, Homo sapiens
caggtgagggacggccggtgtcatcgttggagcttcctaagactcccagaggctgatgcacctcccagacccgcctccgcccggctccctgggccctgctccaggggcttcattgctccctgccccgggtcacccctcggctcaccgtctctcaggtgtggaatatcctgctccaatcaaagccatgtcacctgcgttgtccagtgaaacgtcagcggacaggcgctgcccgggctccagggagctcctcactgaggctcactccctgtgcctctgccatcagcacagggggacatgcctggctgcctgtgggaccagggaggacgcgcggtgcgggagcagagccagccacactgccgctgctgcactgttcatctgagtggcgcaagaacttgtcagtgcctttaatctgagggatgagtcttcaggagagtttgttgtcaggatttaacacttactcttggaaaagcagtaatgtgtgctggaaatgaaccgggcagaccctgctcccatctccatctgcctcaatctcagtgccctccactccccaccagcagcgcctgttaccaagtcactgcacaacaaccacaaatggagagtggaggagcatcactttccaccccgggatcatgacgagggctctgtaacttcaacaaatgcgcagaagacgcctggcctcgagcttgtgcagcacctccggagcctgccttcccttgtcacccacggcaccatgactttggagggtctcagctcagtcctccctccagaggggctgtcagtgctgggcagaaaatcacccttcaacgaccgggcccagctgcgctctgtcagagagcagagaaagcaggcctccgggaggttctcactccaccaaggagacgtctccacccagcgctcatcctgagcaagggcactgggaggaagaaatgcaattttaaaacctgtgctgcgaatgatgacttctgctgcttccgtctctggagagctctgggcacttaacatccttccacccacatgcccgagtctgtgcagaaacctcacccacgcggaggagactgcatttcccagtagcagattcaagtcctgaacttcctgtaccacaaagtgttacccacactggtgggtgccagcctgagactcaactatcaggaaaaacatgaagaattcagtccatgccctcaaatgcacccatgtggctcccaaacggcaaatctcagcaatgagattctcagctaggaaagtccacactgaactcatgcagaggacaaagtacataggcctggggttcttggcacctgagatctctgagcagttttctgaattttcctatttcctgttgaagacataggaacacgtggcacagaggcacagagacctggaaaccaacaggtgacctcagggaggtttgtgaagcaccctgatgagaagacagttgggcagacgtggctggctattccccaagtccattttccctcctgggaccagagctgactccatttctcaatctgccttgcagtgagcatagtcagcttcctggcactgctggacctgtcttgaaggctcttttggccggaaatggatgggcagggatctgagagcacctgctatcgggtgagtcctgctttactcatgtcagagatttagactaaaacaaacacaaaatgcaacaaagacctaagtgtaagagctaaaagtataaaactcttataaaaaaagtaagtgtaaattttcatggtcttggattaggtagcactctcttagatgtgctatcagaagcacatacaaccacaggaaaaaaaatacataaattgaatttcatcaaaatttaaaacttttgtgcattaaagttcatgatcaaaaaagcgagaagaaaacccagagaatgagtgaaatatttgcaaatcatacatctgggacaagtatccagaatatataaaaattcttagaactcaacaatataaagaaaaataaccaaattaaacagtaggcaaaggattcgaagagacctttgtccaaagaagatacacaaatgaccaatgagtacgtgaaaagatactcagcagctactcattatggaagtaccactttccactcatgctgagggctataataaaaaacaaaacagaaatgacaagtgcagtgaagatgtggagaaactggatttctcatagattgctggtgggaaagtaacatggtgcaaccaatgtagaaacagtttggcagttccttaaaaaattaaacagagctaccatctgacccggcttctgctcctaggtatttatacacaagggaattgcagacatatgttcacaccaaaactagtatgagaatgttcatagcagcattattcacagtacccaaaaagtgggaacaaccccaatgcccattgaaagacgaatgaataaacaaagcatggtgtgttcacaccatggaatgtgcctgtgtcctcagccatggagagaatgaagcactgacacaggccaccatgcggctgcacctcaaaaacataatgccagaagaaagaaggcacacaccatggccatgtgttttatgatcctactcatagaaaacgtccagagcagccagcactacagagacagaaagcagattcatggttgccaggagctggaggaaccttggtcagttctgttcctgccctgagatgcctcacctagagaggcctccccagtcccagccccctgggtcaaggcccccagcccaacgcggcccctctgacatctccggaaaaagccctgctcccacagagaggggccacctgccctacaatttttcctttttaaattaactttcccgacattttcctgttctaagcacaactcatcattggaggaaatttagagaatgtacactgtacagtgtaatactgtacactgtacaagtattaaataaaaggaaaaatgtccttctcta

SEQ ID NO: 469146 - DNA, 651 bp, Homo sapiens
cctggcttccgggctttggcacagcgatgacccccaggcagcgggggggctgtctggcattggtaattagtgaacctgcttctccactgggaggagtggccgccccgagggagaaagaggaagaccacaggccgccccaggagcttgtggcctgtggggcccaggccccctaccagtcctcgccccggctctgtgtttcccgctctcctgtggggtggcggggccaggcctcccttctggctgcattctgtggaggggcgctccacgaggcccgttgtacagaaggagaaaccgacgccagaaaggcacgtggctccctcggccaccgccagccctggtgcctggagaagggaagtggcctccggtccagggacctcaaatacgcggaccagaagtctcctctcaaggccgcgtctaccgatggccgccccgttatcctggctctagaaaatcttcctgactgaggcaacattgaaataacatgagaaatgcggtgctgacacaggtgcgcagacacaggacagctggggaagggggatagacagagcacagctgtcccgggcccagagccagtgcaggccgcccaccacccgatggagtcagggtttggattagagaaggggccttgctcaggttcaggcctgagcagaa

SEQ ID NO: 469147 - DNA, 834 bp, Homo sapiens
gtcagctgatctgcgatggggaaaagccggctctggtgtggcctttgcccagcggccaccgttcaggatgggggagcaaggacacagaggacgaggccatgccggggcctcattacccacagatgtcacacggctcctcctcctcccctcctcctcctcccctccgcctcctcttcctgttgctcttcttcctcctcttcctcttcctccttctcctcctcctcttcctcctcttctcctcatcctcccctcttcctcccctcctcctcttcctcttgctcttcctcctcctcctcccctcctcctcctcctcacctcctcctcctcctgtccctggggctgttgtcatggacaccaaggggcaggtccatttctggtcacagacgtgcatccagcttctgtctgcagccaaatggaagcagctgcatttgctgaagccacaggggcctgtggtcgccggtcctgggactgtccccgacaccgatgctagctgggatgtccgggcgtccctcccacaaggtgctgaggaatccaggcagagcacagtgtcctttgctgcagggtctgagggctctctgcccatagagctgctgcggctacgcactgttacatctccggaagatgtgccttgttatgctctcagtacttataaaaaaggaattctctgtccacaatttattcctgtgctttaaaagtttgaattccagtggaaaagcagcaagaagacatgagcctcaaggatggttctggagatgggtctgatgattgtgcttggtccaccaaagcttcccacgagaacagcatgtttgtttttgctgacacccccagccccca

SEQ ID NO: 469148 - DNA, 519 bp, Homo sapiens
gtcttcaggaaacacataccgtatggcaattaaaatgatgttctccccctccgtctcagggatgagacatgtgaggaccagtgagaagtactcatcttttacaatgaatgtcaacagactcttacaaatgaattcaccccagactacattgtcatctcctggggacacgtttaaatcgccttctgtgtcttctgtgtggtctgtggtcaattcggattggtccatgcaccattctgataagtccatgctctattttaatatttcagtgccctggggaatatgttcccaactggaacttcccactggtttggaaagagcggggaaattctccccaccacatcacctgtctgtggtttatccccagagtctatacatcagtaggcaggtatgaaagtggcttatgtatgtaaatatgtatgttatttttttctgaagtttaagttgtctggcttcagttcacagggctttaagaaagcacagcttagtttttagtgactctaaattaggaaaaatgggggg

SEQ ID NO: 469149 - DNA, 727 bp, Homo sapiens
gcacatcattggctgagatcagtctctccattttcctaatcgattcttcatgcaaagccacattttggagaaaaggaatggttagaatcatggcaggtatgtttggtcgtgctgtgcactcaggatccgacgaggaacctgagggtctgagacacaggaagctgctcgatcctccagccaggatgaggctgagggagagcccaggccaactggctctcagagtttggactttcaaccacgaattttccacaactgtgcggaaatcaagtggcatcagccccaacgtgggagcgatagggcgtggcggggactgtggcgcagagagggtgcagtcccaaggggagcagcggcttcacccacagatgctgcagcaaggagagccccgtgccagctgcccaggctgttggatccgttcagggatccggcttgcacgtgggcccacgaagggggtctgcacgcaggcagggtctctgttccccgagcatctatccccagcacccacagcagtgcccagctcagctagggtacggtaaatgatgtgtgaactggtgaattcatggaaatctcccactttttacctattggggattaattccatattttaagtctgggccggcagtgccacgtggtcctccaggtgctgagggaatccaggcagagcacagtgtcctttgctgcagggtctgagggttctctgcccatagagccgctgtggctatgccgtgtt

SEQ ID NO: 469150 - DNA, 651 bp, Homo sapiens
ggcagcgagtccatgataaggtctgtacataaaagctcacaaaacctaggggtccttcatggcagaagctgctgtggaagtcggatggacgtttattcctctgttgctgggttgaaccctggctgcccccatgcccctcaagtgctcgtcagcatcactgtcaccatggaaaccacatcctcaaaggggaacgtgcttaaaaggcagaaacaccagtatccgtgggctcattcccatagcactcagaatggtgatgtttgtgatttcccaggctcctactggactcatgtacagaccatgtggacatccaagaagggtctgagagtctatgccaatgggaccctgagcacctgtgacatgagaaggaaagtgtctcatgcctatggggaccctgatgtcaatcttgtgatgggatctcagcaggactggacccagcattatgataacggagctttggatgagttcaacatccagggatggccctacctctggatgaggtcaccatgtacttcatagctgctgctgtgacacccaacactaacagggaaagaccccatcttttgggggtccagctttgtcagtaactgtccatgtgtcttccatgagccagtcaccttgactggggaagaagagatgggatgaaatgtagac

SEQ ID NO: 469151 - DNA, 730 bp, Homo sapiens
ctgcaacacaactttctctgtggttacttagaagagccagcatggatgcacggtttacagagcaaacacaaaacccaaaccatccaaacatgggatcagattgggttcttaaatgaaaatgaagcacctacagtggctgcagattttttgcgatcctatcaaaaccaaaagctaaatggcaataccctggagattggaccagcgagaatgttccaattcgaggggaaaaagggtaaaaacttctgtggaaaaagaagaggattaaaaatgtttaaaatatacttcatgtctgataaagaaatgaaaagaaccatttacctatgtgttagtaaagatacatcattcttttctacaattgactattatgttaaaacaggatttctttataatttacaaagctatcctaaagattcaaaagaaatattctgtgttccaaggcctgtactaggaatcataaatattattgagaacaggacataaacacatttggactaattttaaaatttcagagggtatgataaattgtgctcattgtcccctcctaatctaaaaaccacacagagaggttagttacatatgtatacatgtgccatgctggtgcactgcacccactaactcgtcatctagcattaggtacatctccccatgctatccctcccccctcccccaaccccacaacagtccccagagtgtgatattccccttcctgtgtccatgtgatctcattgtt

SEQ ID NO: 469152 - DNA, 1532 bp, Homo sapiens
cgcatagacatgcttagcagctggcataaccccccacattggctccttgactagtaggatgagagctattatgatgggaaaggccaaatggaagccattagaggtgcctctacctagagaaatagtaaataaaaaacaatatctcatccctggagggattgcagagattagtgtcaccatcaaggacttgaaagatgcaggggtggtgattcccatcacctccctcttcaactctcctatttggcttgtgcagaagacaaatggatcttggagaatgattgtggattatcgtaagcttaaccaagtggtgactccaattgcagctgctgtaccagaagtggttttggcaaattcctttttctccattctgtccataaggcccacaagaagcaatttgtcttcagctggcaaggccagcaaagagaagaaggctcttcaacaggcccagtctgctgtgcaagttgccctgccacctggtccacatgacctagcagatcccatggtgcttgaagtgtcagtggcagatagggatgctatttggagcctttggcaggcccccagacagctcttggcctgctactgggcttcggtagaaacagaacgtttgaccatggggcatcaagtcaccatgagatgtaaaccacctatcatgaaccagctgctttctgacccatctagccataaagttgggcatgcacagcagcattccatcatcaaatggaagtggcatatatgtgatcaggcttgggcaggtcctgaaggcatgaagtggggaatgctgccaccaggagacacaacaataattccattaaattggaagttaagattgccctggaccactttgggctcctcttttcctctaagtcaacagcttacgaggggagttacagtgttggctgtggtgattgacccaaactatcaagatgaaatcagtctattactccacaatgcaggtgggaattgaacaatgagatcacatggacacaggaaggggaatatcacactctggggactgtggtggggtggggggaggggggagggatagcattgggagatatacctaatgctagatgacgagttagtgggtgcagcgcaccagcatggcacatgtatacatatgtaactaacctgcacaatgtgcacatgtaccctaaaacttaaagtataataaaaataataataataataataataaaaaaactgggagagtgtaatatattggaattcaaaagaaaatattccaaggagaaagaaatgtctaaattaaatgctgctgagaagtaaagttaggactaaatatagaccataaagccacagaattaccacatgaagattatcaatatcgttgaataaatcaattttagtgaaatagttgtgattaaagccctaagagatgaaatggagacagtaaacataaaccttttgagaaattttgccaaaatgcaaatagagaaattgggcaataaccagatgatacacagaatattaaagagttttctttttactttaggtacatgtgcacaacgtgcagg

SEQ ID NO: 469153 - DNA, 469 bp, Homo sapiens
acagaagcccccagagagcagcacctcaccatggactgcacctggaggatcctcctcttggtggcagcagctacaggcacccacgccgaggtccagctggtacagtctggggctgaggtgaagaagcctggggctacagtgaaaatctcctgcaaggtttctggatacaccttcaccgactactacatgcactgggtgcaacaggcccctggaaaagggcttgagtggatgggacttgttgatcctgaagatggtgaaacaatatacgcagagaagttccagggcagagtcaccataaccgcggacacgtctacagacacagcctacatggagctgagcagcctgagatctgaggacacggccgtgtattactgtgcaacagacacagttaacattcacagagtgggaaaggcagcaatcaatggagtggatgcaaacattcctttgtgaggacataaattttaaaatc

SEQ ID NO: 469154 - DNA, 628 bp, Homo sapiens
tctctggattcaataatagtatatgctatattttaattatttatttttaaagtttctgtctcatctaactggaatagccctggctggggctgggtggcaggacagcccctcagatgaggtcagcaacattgaggggcatttcctcaatggaggagttgtagaagatctcgatgtctcgaagagtcctcttgtcttcttctgtcaccacgttaatagccacacctttacggccaaaccgtccacctcgaccgattctatggatatggttttccctgttggtgggaagaattggcggataccctccaaggtcaacacttccttcgtgacaagaatccgaatgaggtccctcatgaacttcttggtcacctcaagcacatcagaaggcatcgcagctgacagcaaaactacctgggttcatgtcatcaaagctgtcaacaatctcattccagttactctcaatgacacctttgggctccatcccattggggccgttgtctctggatcaggaatcctggctcgcagacatgatccttagaaactctagaatagttttttgttggcatttggttttggttttggtttcgccattttggtcagaaaacatactttgtataatttgcatcctttt

SEQ ID NO: 469155 - DNA, 655 bp, Homo sapiens
ccagcattggaatcccagatctatcatgttattatatgacctcaagggtgaaagtttgtttcaaagttctaaggagaactttgatgttaacagtcctcatctgacaaaatcggtaaagaatacaatgagatgttggtgttccgctgacacagtgttggtgtttcccacacatggaggaaacttagggatatgtctgaccttggtactagcaggaagcaggagagcaaatcttgctgaggtgcccagaggaatcctaacttcccgcagaagcatgaatgtccatggattgaatgccagactctacatccgaagaaaaccagacccagacctacactggatggccacgtggcacttctctatgtttttgcctttgtctccaccctgccctttggaaagtcaaggagcgcaatggccaagtgaccagggactcggtgcctccttgcagaagacagtgacccagtggagaaaaacaaatcataaggctctcaaatcctaagaaggggctttgatgtcaaacggatggatgcaatgcagggaggagatgaaaatgaggagaacatctggaaacatcagtggaccacaagcttttgaaaagtaaaggtggtgtctttctcattttcatatacctttgcctctcctggctttcctgctttgc

SEQ ID NO: 469156 - DNA, 904 bp, Homo sapiens
ccacacaaggggatggaagagttgtacaaccaaagagctatctcaggagaagattctcagagaccaagtgcccacttagccgtgaaaaagatatttgttggcggcattaaagaagacactgaagaacatcaccaaagagattattttgaacagcatgggaaaattgaagtgattgaaaccatgactgaccaaggcagtggcaagaaaaagcgctttgcttttgtcacctttgatggccatgacttcgtggataagactgtcattcagaaataccacattgggaatggccacaactgtgaagttaggaaagccctgtcaaagcaagaggtggctagtgcttcatccaggcaaagaagccaaaattgttctggaaactttggtggtggtcatggaggcagttttggtgggatagacaactttggtcatggagaaaacttcagtggtcatggtggctttggcggcagctgtgatagtagtggatatggtggcagtgaggatgactataatggatttggtttcaagcctgtttaaaaaaatgtttttaaacttgaaaggaagacaagtgaccaatattataaggttaatgcagaaaataatggtcatagtatttaataaacttcaatttatcaaataaacctgataaataatgtgatgctgaataagataaacctaaagttactaagagacaaacactgtatattaagtgttataaccacacatcagaagaccattttagactgtggtttcagggtgctagaatattcgaaccctgtttgcttagctgactaatctaactttttggtaagactggttatatttttttctgtatagagaagaggtgatgagagaaagtattctttagtttattcattcacaattttttaaaaaggtcactctggttacc

SEQ ID NO: 469157 - DNA, 616 bp, Homo sapiens
ttgtgaacatctctttaggaactcattgccttctgcggcagcataggaatcagatgagcaaatggggctggcctttctgtggtctaagagtggcagtggatttgtgtcttgggggccctgcctgttcccgcttgccatgccttccccgacctcacccccaggacccacggtcagaccccaggccctgcctctgttgagtggcatgggctacctccacgccaagggaatcctacacaaggacctcaagtcaaagaacgtcttctatgacaacggcaaagtggtcatcacggactttggactcttcagcatttctggggtgctgcaggctggcaggcgggaggacaaactgcgcatccagaatggctggctatgccacctggcaccagagatcatccgccagctgtcccccgacacagaggaggataagctccccttctccaagcactctgacgtctttgcccttgggacttcttgggtccacaggctccagtccttgtcatgttcccttgtgccaagagacaggatatgaggaagggaagaggcagccagggtctactaccctgcagctgaaatgtccacaagaactggcaccttctcactcttgcctctcttgttt

SEQ ID NO: 469158 - DNA, 745 bp, Homo sapiens
agagaggtggatgatcatgatctccctttcagcaccttcactgtagtatgattctagaccagattctagagctggggaaacagagggacgtatgtctgcacaagctccaaatgcatgtagagatgtgcccagacctacgcatgtgcacgggacccagcaggaccatgagggaggctggggcagtggcagacacaattctgacctctctcccactccggccacagaatgaagaggtccatgatgaggccgaagagtcagaggatgacttcgaggagatgaacctgtccctcctctcggcccggagcttcccacgcaaggccagccagaccagcatcttccttcaggagtgggacatcccctttgagcagctggagatcggcgagctcattggaaagggccgctttgggcaagtgtaccacggccgctggcatggcgaggtggccatccggctgattgacattgagagggacaacgaggaccagctcaaggccttcaagcgggaggtgatggcctacaggcagacacggcatgagaacgtggtgcttttcatgggtgcctgcatgagcccgcctcacctggccatcatcaccagcaagttggaaatagacaaactcagcagccatccttgaaaaacgagtggtcattatgaaaatgtgttgctcatcctgcaagccagctgcatttgcggccctcttctattatgtacaaaattctgagcccccctccccaagcgccataactgcct

SEQ ID NO: 469159 - DNA, 882 bp, Homo sapiens
caagctaaaccagtgttccacttggctttggtttagcaagtgatggcaactggtatccttcctgagggtgacgagccccccttttccttccaggccttgccagagcccaccccagtctctgaccctctgtgtaacaggctgttctcttctctctgtagacacactgtcagtgccacgctggtccccgcagatccctcgcagagatctcggcaactccatcaagcacagtcctgctgctgcctcatatctcttggggaagaaagcaccctggcaatatcgaggggagatgtgcccagggagttaatcgaatgcacctctgctccagttggtttatcgctgtacacaggagacctccaaactgctcaagtttgcagcaagtggatggggttggagagcgaggcaatatttgttgaacaaatgaatgacccttacgaaagttcaaggttttccaccaagtactggatgtctcagacgtgcacagtctgtgggaaagggatgctttttggcctcaagtgtaaaaactgcaaattgcttaatgacaacgacaacgacaacaaaaaacaggcttatgactgcttcacagggggccatgacacatctttcaagaaaacagcagagctgcttgtgaaagagaccatttgtcccccgcagcacctttcaatgaaggaggaaaggaaagggagattccccacagctcagggcttcccaaacatcagtctggccatgtcatggtcctcagaaaacttcagtggcttcacagcacctgcagattcaaatgcagaccctttgccttagcttttggggtccccaccccctccccttcctcatgtccccaccattcgtgttgttctcttcactttaaaagttctcatcactttaaaa

SEQ ID NO: 469160 - DNA, 857 bp, Homo sapiens
tacagagaccagtctgcagaccagggttaggacctggtgatgattttcaccaactgccaaccacctgagaaaataatggcaatgtatcatcacaagatcagcatatcattgattaatgaaaaaggtccacccgaactccagtatggcttagagcctggacaacttccaactctgtatcttcaagagtcattcctccttctgttcatccaatcagaaacattttttgagtgctcacccgctgtgatgggcaacgaggaaacggatgaattgatgtccaagatctccattctcatagaacacccaggctgctgggaacacagatataaaagggccgattatgacaatgttaagagctgcaaagtggaagttcagaatgctacagaaatctacaacaggggagcagcaatggtgctactaaaccgtgctgtttctattcttctcttcaagggcaacttctgctacctgacagatgaataaccagttgcctagtggcgtttattgaataaccttccttcctctactcatctgtcatgtcaacctgtcattgatcaggtgtgtaccttaactcaggactgtttctgtactccctattctgttctcttgggtgtgactggtttgttatttcagttttcctctttcatatctacctggatgatcttaaatgttttcttattatatatatccttacatatatatatatctccatatacatatatccatatatatatatatatatttggagtacataagatttattttaatttttttattttttaactatttttccaacaaacacgggagtgcagatatttcattgatatacggatatttcctttttttgttgttttgcttatata

SEQ ID NO: 469161 - DNA, 3759 bp, Homo sapiens
tcattcagctgccctggcatcgtgatagcgagtcttttagtgttgtgatgtttaagggagccagtgagctgccagcagtaactgcatccctgccctcgaagacggctctctggtttacccgcacagcttctaactgttgttactattactgcattgatccctatatccactcaggtctggagccagagcctggttttcaaattgcaagacaacgatctgatttagtgatttatccgattaggcttaaatgtatttattacatgcttaaacatattccagtgagctctgaaaacgatccgcagaggaaaacagaaccagaccctaatccaatcagcatctgcgttaggcagaacatcccccgcctcctgtcaataacctcagtgcccccaaacctttatctggagtttagaagagattgcagggaggtaatcttcagggggtccaaggtcacctagactttaacgctcctctgatttctccctctcatagagctgggtaggggggaacccttagctgtcttctagttattgttttaaagtaacatttctctttttgatattaaaatggtttttgtttgtgaaaattatgaaaaatgaagaaatatgtaaaaaaagaaaaccaaatcacccataatcttgctcatattcgcattttccggtgagtcttttcaatatttaaaaatgctttcaaaattacccaagtaaagggattacattttaattataaaaccttttaggcttttttcctatgcatttttaacaaagcagaaatggtatcaaattatattgattatctgatgccctttttccttcccttctttttttttggagggccatgtcattaatttttgaaaatatcacgcttaatagctataccctgtttccttcctgtgaacagggggaatttgcataagtattgggttttggttatattatgctttttggtttttctttttgctattgttttttgaacgagtgattatttttgctattattgacactactactctgaatatttttgtattacctattctcattccacttcttttgaacgtgagattttttttgacagcttaactgagatataatcaacatttaatcagctgcccagatttatagtatgcaatttgatgagctttgacatatgtagatacccaggaaaccatcaccataaatcaaaagagtgaacatggcttttacccccactgtgccctccagcatccttgttctgtgtgttgaaataacctcaccaggtctaggaggctctcagcaactctggatccctgaggcacctacgacgccctctagggcatgccctcacttagaagatgccgtagtagatgtttgctggatgaaagaatgcaactaaactctgctgggtgtgtagatacctagctggtgtacacctgcagtgacggggaacttcctcccaaataactcagtccccttccacagctagcttgttctgggtggtcaatccttgattgagctcaaactggccttattcccctgagcctgatgctacatattttggccacagtgagggggcggtacagacctagcccctgatctcatagagctcatggtttcttggtggggatggacattgaacaactaatgatgtaaatcatgactgaaccccagggtgagcaatgctctggaaaaaaggggtataagagctataaaaacttgtggtggggagctggtgttttgggggctgccctggtcagcaaaggcctccatgtcatgcttcatgatagccttttatgtctctttgtcattttctcttccctggtctaaacattatgagttgctttggccacgtctccattgggcaggattttcagattcttcatctcctgcctgctcttttgtcatccttgcacctgcagctggggaacactaagatccctgtctccaaggacatttgcctaatcatgcagccaatgacagcaggcgttcctcctcctctagccacagaacgttttcagcaggatcaaaggctggcttagaaacgacaataaccacaatgaaaacactgccacccatgaacatttatcacatgcttctcaggtggcatgccctgcactaagcacttgctatgggctcattcactgcgttctcccagccacaatatgagctcaaacctctgagccaaccttttacccataggctgtgctctgtcactatcatcaactggctaagagtgatgggtcgtagcgaggcttttctcccccttgattaaagttggtatatttccccgtcctatttaaagtgactattctgtgtgtgtgtgcacgttgggtgtgtgtatgcatgttggtataagtgtgtgcatattggtgtgtatgtgtgcatgttggtgtgtgtgtgcctgttggtatgagtgtgtgcatattggtgtgagtgttttgagtgtgcatattggtgtgtgtgtgtatggtgtatgtgtgcatgttggtgtgagtgtgcatgttgatgtatgtgtgcatgttggtgtgtgtgcatgttggttgagtgtgcatgttgtgtgtgcatgttggtgtgtgtgcatgttgtgtgtgcatgttggtgtgagtgtgcatgttggtgtgagtgtgcatgttggtgtgtgtgcatgttggtgtgagtgtgcatgttgtatgtgcatgtgtgtgcatgttggtgtgagtgtgcatgttggtgtgagtgtgcatgttggtgtgtgtgcctgttggtgtgagtgtgcatgttggtgtgagtgcatgttggtgtgtgtgcatgttggtgtgtgagtgcatgttggtgtgtgtgcatgttggtgtatgtgtgcatgttggtgtgagtgtgcatgttggtgtgtgtgcatgttggtgtatgtgtgcatggtgtgtgtgcatgttggtgtgtgcgcatgttggtgtatgtgtgcatgttggggtgtgtgcatgttggtgtgagtgtgcatgttggtgtgagtgtgcatgttggtgtgagtgtgcatgttggtgtatgtgtgcatgttggtacgagtgtgcatgttggtgtgtgcatgttggtgtgagtgtgcatgttggtgtgtgtgcatgttggtgtatgtgtgcatggtgtgtgtgcatgttggtgtgtgcgcatgttggtgtatgtgtgcatggtgtgtgtgcatgttggtgtgagtgtgcatgttggtgtgtgcatgttgtatgtgtgcatattggtgtatatgcgcatggtatgagtgtgtgcatgttggtgtgagtgtgcatgttggtgtgtgcatgttgcatgtgtgcatgttggtgtgtgcatgttgcatgtgtgcatgttggtgtatatgtgcatggtatgagtgcatgctggtgtgagtgtgcatggtgtgtgcatgttgtatgtgtgcatgttggtgtgtgcatgttgtatgtgtgcatattggtgtatatgtgcatgggataagtgtgcatgttggtgtgagtgtgcatgttggtgtatgtgtgcatattggtgtaaaggtgtgtgcatgttggtgtgagtgtgcatgttggcgtgagtgcacgttggtgtatgtgtgcatattggtgtaagggtgtgtgcatgttgatgtgagtgtgcatgttggtgtatgtgtgcatgttggtttgagtgtgcatgttggtgtgtgtgcattttggtgtgtatgtgtgcatgttgggtttattccaagtgtgggcagcatttcacacacagattagggctctcctccagttcttttcttttggagataacttgcacattatctggcttt

SEQ ID NO: 469162 - DNA, 685 bp, Homo sapiens
gagattgtaaggggtgagaagtgccaggttacgagaacaggtgccagccctttcatattttgtttggacttagaaaggaatgctaacagttgatgtaaagaaacaagtgaaaccagaaaataaaatgaaaaagaatcagagaagagggggagagaaagaagagaaagtaatgtccctgaaactgtgggaagattcagatgcccagtgtggtagaattggaccaagaacagcagaggagtggctggagagctccggaatccaagatgttagcattgtgaatctttcgagagctttccagagaacctaccataaaatacagctctatgggatctgccagagaacaaaggtgaggataaatgctaagtgcattgatgctaactatgcactcaaagattcagaaaatgaccacaagagggttcatggcccgtatatcagcaaagaccatgcagccaacagtacttacatagtctgggcattgtctttattctatcaaatatccatgggtctccttggagatgaactgggaaaattctaaccacaagctgtcagtctccacaatttctaattccagaatccattacaagatctacttcctagaaccatttcagctgccaactgtctcagtaggggtttccacagaagcgccccaaaacaaagacttggtgtgactagttgatgggatttt

SEQ ID NO: 469163 - DNA, 464 bp, Homo sapiens
aaggtttatcctagaaagcagctgctgccagggatggcgcaggggtggtgtggaagattcaagactgtcttttctcccctcttcagtgcatctttcaatgacatgaagttaaaaccaggccctctcctgcaggtctgctggagtttactggagatccactacagaccctgtttgcctgggtatcaccagcagagtctgcagaatagcaaagattgctgcctattccttcctctggaagctttgtcccagagggcacctgccagataccagccagagtgctcctatatgagttgtctacccctgctgggagatgtctcccagtcaagaggcacaggggtcagggacccatttgaggaggcagtctggcccttagcagagctcgagcactgtgctgggagatctgctgctctcttcagagctggcatgcaggaacatttaagtctgctgaagctgggttgacagcc

SEQ ID NO: 469164 - DNA, 1691 bp, Homo sapiens
taacaacccagctgccctatcaagatgcattcctgtaaacagttcttatgcaaatacgtttcagagagggtgcaggaaggctactggttgtcagtggtctcagtgctttcaggctacgcccttgtttacactaacaaggaatgttggggtgatcagacccaacaccaggtcgtgggggtgacaaagttgggcagagtcaaaggattgagaaaaagagagaaaaaagatgccagcacatgcaagcatgtgcactgtaccatgtcaccaccactggtgtgcacaaacactgtcacactgatatcctggtgtagctggcacatgcagtcaacatttggtgacacccgttatggccccgtgagtcctctgcccaaaatacactcaaatgtaaacttttgtccttgtatccatactgtagtgggggaggcctacatagcagagagagaacgtgaacattacatactccagggatcaagtagtgtagtgttgtcttttcaactaattacgtcatatcctaagtctgaattcattttatctgtttcactttgctttacactgtctgctttaaattgattcaagtcattcaatttgatctgtgaacctttttgctccccaattgttggcatagcttgcacgctagtttacttggaggctacttttgtgtcaaggtaattttccacatgacactttcttacttttggagcggtacattttaaatattttgatgcatttaagcaccaaaatattgcataaaatattttaagcatttgtagtgttttgtgtgaagaatcttaatatcacacagtgttagccagaacacagaaaaatgattataaatgtactaatgggcatgtaaatttacacacatactctttcatccgataatataacctttagtaattattctgcaataactttaaaatatacacaaatatatacgtttcaagttataccaaaatttcttatacaatgtaaatatacattaggaaataaagtaatagtttgaagcttttaaaatggatgctaatatagagcgctctcaataataaattgaattaaaaatgaaagatatcagagtaagcatgcttgtatgtgtacaaaaataaggtagagctacaccgaacatagaactttttctaaaatgtcatatgttagtgtatttatttgaatgtacatgtatacctgataaatatttggaagaacacacaagaaagctcagaatagttacctgtgaaaatgaaatagaggtctggaatggggaaaaaaatcagtattttatttttttttaattttttttcttatggagtgaatgtattattaatgtaattataataataatagattttatacataaagtagtagttataataagttcaaactctgaagttaggctactcctaattgtatcaatttgtgatgttgggctggttactaaacatcttagtgcctaagctcccttatctgtagaatgtaaatgacagtagttcctagttccataaaactgataggaaaagaaaaatatttaaaaagtgatattaatattttaaaaatctgatattaaatattgcattaaatacaatgttatataatcttattgttgttattttcttcaaagaaataggtctttataatgactcttccactgataaacattgacatttagaaagaaaaatgttaaaataaaaaaagaaata

SEQ ID NO: 469165 - DNA, 773 bp, Homo sapiens
gaagagcaaataggaagatcttgggcccgtgcctgaccaaatagatgagggctatccctaaacccttggggcaagaccgtccacgtaagttgggatgtgaggtctgtgggatcctcaaaggcaaagaggaactgggagtcagagtgcaggggaatacagaagaaggcatccttgaggtccagaaccgcataacaagaaaggcacgtgaaaagagcaaagtctcccaattacaactgaggaggtgggagaaatacctggttacaggctgtcccaggattccttggatggtaatagaccttgaggacagttgtccaggacaggagattaacactgagaagaccacaccagtgtccaggaggaagtcaatttcctggccctcaatagttaaacatacctggggctcacctggcactggtgctggcctggtgcctgctactccttgggccaacctgaagctgaagcatgcccagaagtatgaatcttcatttaaaaaatcaaaaatgaagaaaatatttgaccagacattttaccaaagaagacatatggatggcaaaaagcgcatgaaaagatggtaaacatcattagtcactaggagaatacaaattaaaaccccaactaattatcactacatatttattataatgtctaaaattaaaaagattttaccataccaagaagcggtaaagatgtagaaaaaccagaactcttctatgtagtttacggaaatgtaaacttgtaccaccactttggaaaatttagtagtctattaaaac

SEQ ID NO: 469166 - DNA, 3029 bp, Homo sapiens
ttctgcttcatggcttcagcagtctgacagccacaaagtctacaccataatttaggaaaatttaatgacgctcaataaagacataagggaaattcataaaagaggacattaccacaaaattcagtgtgaagttgatagtgacaggagacagacaaattcccaggcagacagagacagatccctggttaaacttgaccttcaagccaaggacagtatgaagcctgaaaaccaaactactagctctgaatggagtccatgcactggagacaagaacctggaacttgctgaactgtgggagcaaaaagagctgagagaagccactgggcaccactctctcctgctgagcaacaggagagaagaagtgaagccactagatgccactccaggtgatgtgctgcttcagcttaggcctagtgggcatggctgctctggagagagggcaacacttcagctcaagcacaaggggtgattaaaatagttactttaccattctcctaaccagtcaaatacttaaaagaagaataatagctatggctgctgggaggagaagggacaaacttttcattagcatatatatgattgtctggaagacttaagagaatcaagtgaaatatactaatgggagtaaatgtaaacacaaaagtttcgccgtttttctgtatatcaaaataaccagagagaagctcatttttgctgtgaacctaagactgccctaaataaactctattaaagtaaatatatatatacctggaagcatctatatgagttagataaggcaatcttttagattaattttagcaaatatttccatatgtatgaaataaagattgaattactgctgtagtataaagagctactcattgttagggtcagagttaaaccacatgttctgatgctgcattctgtttattttttatatataatttctgcaaatacatctgtagcaataaagtaaatgatattctaaaacaaagtatttgtcttattcatcacaccaacctaacaaaatctagttttcataaaatttgcacttcttgcaaattgtctgcagacagcacttgataatagtatctgaaaaggtaaaaacatttgataaatatattagaatcataactatttgattatgtttagtaataaatatattactactactctaaagataaatggaaaaaaagcatactttggagtcagctttccaaaaaataaataaattacagaaagtcctttcataagtcagaaatgttgaataaacttaaatgataatactaaataaccatacaaaataaatgtacaagcaattcataagttaaaaagaaaggaattccaattctaaagaaatatccatactgttttccagaaaggttttactaatttacattcccatcaacagtgtgtaagcattctcttttctctgcatccttgccaacacctgttattttttaactttttattaatagccattttaaatatctaagatgatatttcgttgtggttttaatttgcatttctctgatgattagtgatttttttaatgttagttggctgcttttatgtcttttaaaaatacctgatcatgtccttagcccactttttaatggggttacctgctttcttcccttgttgagttccttgtagattctggatattagtcttttgttggaggcataatttgcaaatattttttccattttgtaagttatcagtttactctattgaatgcttcttttgctgtgcacaagctttttcatttcaataatctctatttgtctatttttggttttgttgtgtttggtttagaatttggtcataaataattttcctaggccaatgtcctgaagagtttttttctaggttttcttctatgatgtttttagtttcaagtctatgtttaggtctttaatccaacataagttactttttgtatgtgatgagaggtatagtaatatttattttgtcaatctgggtgccttgatattgggtgcatacatatttaggattattacattatcttattgaattcatttctttgtcattatataatggcagtctcttttattactgtttttgatttaaagtttatttaatcttatataagtatatcctactcatttttgctatctgtttgcacggaatacctttatccaacctttcattttcagtttacatgtgtttttatgggtaagttttcatttcatgtatgttaagctgtgttattagtgcattcatatctaggattgttatttttaactgacctcaatattatgaaataacgtttcaaaaattctggtaatatcttgtgctttaaaatctactggttcaatattcatatgtcctgtccattcttctttcattagtgttaatataatataacttttccccctctgttttaacctactcatgcctttacatttattatgtgattttagtaacgagattttatttcaggcttatttcctaaaaacctaatctgacaatctttgccttttagttcatatctgcattttatttgtatttaatcttttacagatggttggatttgtacctatcatcttccattagtttttaatatatcccttttcctttttgtttctttttttttctttttctgtattttccattaactaaacatttttttagaattccattttatttctttgttggtttattagctataattcttattttattattgatttattctgagtttccagtatacatctttaaggtatcacaatctatcttcaataatattgtaccacttcaagtagagttcaagaacttaagtattcttctgattctcccctcactgtgggtttgttgttggtgttttatattgaactatttgtaactctacacaattacatttctggtgttcaacaaatagatcaaattgtttctttgatttctttgactgttcaattactatttgtccaagattttgttactcatatttcctcttccattcattcaccctttagttcctatgtcccttttcatattttatttatatttggatggtccatttgaac

SEQ ID NO: 469167 - DNA, 524 bp, Homo sapiens
taccctgcaaagccacagatgtgatggaaatagcaggagaactagaattagaagtggagcctgaatatgtgactgaattgttgcaatctcatgagaaaattgtaacagatcaggagtcgctacttatggatgagcaaataaagcagtttcttgagatgaaatccactcctggtgaagtcgctctgactgcaagactcagccaatcttctggctgctgctgtcctggatctctgggcccagcccatgccctcatcgcctaccctgacttctccctgtgtggggaaggggtgctcctagaatgtaagggaaatttagaagcagctagaattgtccttcttttcacttttgttgagattgatgccagaggcatgatggaatacaaatgtgtgctactccatctttattatgaagaaaacattatgaagagccttacctgatgatagtaataacaaccgtaaccactaagtagagtctatatttattaatagcaatgtcatcttctctaacagttgtccagtgtccca

SEQ ID NO: 469168 - DNA, 1076 bp, Homo sapiens
caaccagatgatccaacaacaggactgatggtgcctgggcaagcgccagctcatgtcatcaacctcactgagccccgggtatgtttaattattgagggccaggaaattgacttcctcctggacactggtgcggccttctcagtgttaatctcctgtcctggacgactgtcctcaaggtccattaccatccgaggaatcctgggacagcctgtaaccagacgcactaatgaggcagtaattccactatatccagttgtacccaacccttataccctgctctctcaaataccagaggaagcagaatggttcatggttctggacctcaaggatgccttcttctgtattcccctgcactctgattcccagtttctctttgcttttgaggatcccacagaacacacatcccaacttatgtggacggtcttgccccaagggtttagggatagccctcatctgtttgacattaaaacagttgagggggttccttggaattactggcttttgccaacatggatccccagatacagcaagatagccaggcccctctatactctaatcaaggaaacccagagggcaaatactcatctagtcaaatgcgaaccagaggcagaaacagccttcaaaaccttaaagcaggccctagtacaagctccagctttaagccttcccacaggacagaacttctctgtatacatcacagagagagctgggatagctcttggagtccttactcagactcaggggactaccccacaaccagtggcatacataagtaaggaaactgatgtagtagcaaaaggctggcatcactgtttaagggtagttgcagcagtggccatcttagtgtcagagtctatcaaaataatacaaggaaaggatctcactgtctggactactcatgatgtaaatgacatagtaggtgccaaaggaattttatggctatcagacaaccacctacttagataccaggcactactccttgaggatggtgcttcaaatatgaacgtgcatggccctcaaccctgccacttttctcccagaggatggggaactcatcgagcatgactgccaacaaa

SEQ ID NO: 469169 - DNA, 469 bp, Homo sapiens
aaggagccagttagacgacgataaacaacaaagggaaaagagatgctgcacgcacaggagaatggaatcttgtaccttgttgatgatgtgtatcactccatttgtggctgcgttgtccccatcgacaatggaggccccttcaattgtgatattctagacagctacactcagagactgccatgtgaacatgaagatgccatctacaacccaaggagagaggccaaagacaggcccttccctcaaagccttagaaggaaccaatcctgcccacatcttgatcttggacttctggccttcagaactatgaaagtcagcatgctcaagagagcacgctcagtctcttctttcacctatgctgggatggggggttcagagaggccccatacagaagcaacaggaagctgtcctggggtgggtgctgaccaggcatggactatttggcatgtgtctattttaaggggataaacca

SEQ ID NO: 469170 - DNA, 769 bp, Homo sapiens
tctggctttgtgctgatgctttcaggaaacaggtttatagcaaagtttctccttcctgctggcagttgaatgacagttgccttgaaaactaaatcagaccagaccaaagtcaaacactttaggaacccttaccttatcgctgttgaagatttcccccgactttccagtcaaggtgtagaacatgtctgtgttattcatatattcgatgttcatctgaccagcaattatgtggagtttcacaaagtattgagcagctttattatccaccaaaagctcatttacctaagagagaagagccaattttactattatttgaagaagaaaatgagttttgtaacacatgctgtgccttacttattatcaaagacatcaaagccagggcaccctaacttgggtttgggcttttgcaaatacaaatgcatgaaagcactgacaattatacttgctatacattaccatcagtgcaatcaacctgggccaggccttccagggagtagaaacctggagagttggaggcaatgcacaatctactctcaaaccaggggaggttgctttagcattgaaactgacatggggaaagcacagcatcgcaatggccccaggaggaacaaggaacaaggaatctatcttgaacatggaaagcagatgggaataaaatttgaagtttcatggaaagagtaggtaaagcaagtaagctgattgtacttttgaatagaaaagttaagatttttgaaatccatgggatcaaatctacttttgtcattactac

SEQ ID NO: 469171 - DNA, 819 bp, Homo sapiens
cacagtaagaagtcaccacctatgaatcaggcttcaccagatcctgaaactactggtaccttgattttggacttcccagcctccagaactaacctgaggcaagggtatattcacaagtatggtggagataatgctggcttatctgcacctgctatgaacagccacttttggccatatcctccataccctgggaatggtctcaggccctggaagctggtttggagctgtttgggcaggaaattgcaggcttctgagtaccccgagtgtggtctagtggggggcccaggctcttggggagcatgcccctttggacgttcagattccttgccctggagtagccagcagagggccagaatgggagcttctaacatgcagtgcccaggggaggggctcctgttgcccaggtctaagggtcaaactgctggaaacacatctggcagtggctgagctgggatttaaaactagatccatctgagaatgtctcttgccactgtaccatgttgccttggaaaggactcttgggaagactgtttacactgaggatatcccaacctgtacagatcttatataaacactgaatatcatcaatgtcactagcattccaagagtccctacacttcactgttgtttgtacttttgcacaactggaatgtaaactgtgcttattacaataggcccactcagccgtgtcctggctatttttcagctgagtttagttaaatgagagagaaatgctcatctcttctactgtcccttacttcctacatctattaataagtaaaagtaaaaaggcaaagcataaagttatttgttctcagt

SEQ ID NO: 469172 - DNA, 542 bp, Homo sapiens
agatttccagcaaatattgtcaaggcatctctgcaactttgctatccagtgactaacgccatgctttttccagtggtattcagatctcagcctggagggaagaaggttatacccatccctgaatgtgcagccttgctctgcccagaaaattccagatgttcgccttccactgaagatgaaaacaaactggaatgcaaatgccttcccaattaccgaggcgatggcaaatactgcgaccccatcaatccatgtttacgaaaaatctgccaccctcatgctcattgtacgtacctgggaccaaatcggcacagttgtacatgccaagaaggctaccgtggggatggccaagtgtgcttgcctgtggacccctgccaaattaactttggaaactgccctacaaagtctacagtgtgcaaatatgatgggcctggacaggagcaaggattgtagtaggtactcaataaatctttaattaattaaacactcaacaattatttcctttatatgaccattagaatactctggaatattgttgtggcctg

SEQ ID NO: 469173 - DNA, 588 bp, Homo sapiens
ggcgcaattgctgtcaacaaaaggaagctctatttgaacagaagcagggcaggctgccttgggaggccccaaggatgagtggaggcacccaccctgggggctggggcattttggcaggttgtgttgccccctaccctggggtgacttgtgccaatggcttgatctccagggatcccacagctccttatgaacctgctggtcctctgtggttgccaaagtcagagtatattctgcggtatatttgtgggggttgtggtgatgtggtgacacaagggctgaggttccttgaggagggcagtggcccaccatgggtgcataatcagtatggcatctgctgtctcagtgaagatcgaaaattgccactgacagcattgcctaggcctgcaagggcaaagaggctccctgacattttggctgtcagcagtttatcacagagccccactgagaattctgaggaagggcctatccccctgatgtgggcttgctgagtcatctgttgtttggataaatggattttcagaaagttcctgaaacaaacaatgcagtatttggattttcatcttcttggcaagaaatttctgaaatggt

SEQ ID NO: 469174 - DNA, 645 bp, Homo sapiens
agggtccaggtgatgtggcttccaggatataatgataaaaaaggaaaaggtctcctttgctctacacggcttcctaaaggaaaattgtcatattaaattatatatgtcaatgatggctgtgatgaaaatggcaacactagagttgcgcaatgtacacagtctggacaatttaacagctttatctttgagcaagaacaggtgggaagaagcaacaggaaaatatgacatgggaaagggcaatagggtgctggcgctaactggcactggatcgtcagagctgattgcccatcggcccacagggatgatccaggaagcattgccgtctcacaatcttgtgactttatcaacttcaaggacatgtcacctctgctccacttcagacatgcacaaccacagccacatcttggatcacaaagccaactttggaatagctgcatctttgaaatgtgattatgatgacaccttttctgcaggactgagtgaaaacagcagctgtaggaatggtaacagagtagacaaagggcattttcaggtgtttttggtgtgcaaagctgcacctctgtgatattgttggggttaagagagcactgggtatccatagccactagcagtacagtcttgggccagtcacttaccattttgggg

SEQ ID NO: 469175 - DNA, 2323 bp, Homo sapiens
acgtaacctcctcctcccattcattcgacaccccctcccttctttaccctattcaccgctgttacgcggctgcaggcatgcaagctttggcgcgccgtcgaccaattctcatgtttgacagcttatcatcgaatttctgccattcatccgcttattatcacttattcaggcgtagcaaccaggcgtttaagggcaccaataactgccttaaaaaaattacgccccgccctgccactcatcgcagtactgttgtaattcattaagcattctgccgacatggaagccatcacaaacggcatgatgaacctgaatcgccagcggcatcagcaccttgtcgccttgcgtataatatttgcccatggtgaaaacgggggcgaagaagtatttattcgcgataagctcatggagcggcgtaaccgtcgcacaggaaggacagagaaagcgcggatctgggaagtgacggacagaacggtcaggacctggattggggaggcggttgccgccgctgctgctgacggtgtgacgttctctgttccggtcacaccacatacgttccgccattcctatgcgatgcacatgctgtatgccggtataccgctgaaagttctgcaaagcctgatgggacataagtccatcagttcaacggaagtctacacgaaggtttttgcgctggatgtggctgcccggcaccgggtgcagtttgcgatgccggagtctgatgcgtgtgacaatctaaaaacttgtcacacttcacatggatctgtcatggcggaaacagcggttatcaatcacaagaaacgtaaaaatagcccgcgaatcgtccagtcaaacgacctcactgaggcggcatatagtctctcccgggatcaaaaacgtatgctgtatctgttcgttgaccagatcagaaaatctgatggcaccctacaggaacatgacggtatctgcgagatccatgttgctaaatatgctgaaatattcggattgacctctgcggaagccagtaaggatatacggcaggcattgaagagtttcgcggggaaggaagtggttttttatcgccctgaagaggatgccggcgatgaaaaaggctatgaatcttttccttggtttatcaaacgtgcgcacagtccatccagagggctttacagtgtacatatcaacccatatctcattcccttctttatcgggttacagaaccggtttacgcagtttcggcttagtgaaacaaaagaaatcaccaatccgtatgccatgcgtttatacgaatccctgtgtcagtatcgtaagccggatggctcaggcatcgtctctctgaaaatcgactggatcatagagcgttaccagctgcctcaaagttaccagcgtatgcctgacttccgccgccgcttcctgcaggtctgtgttaatgagatcaacagcagaactccaatgcgcctctcatacattgagaaaaagaaaggccgccagacgactcatatcgtattttccttccgcgatatcacttccatgacgacaggatagtctgagggttatctgtcacagatttgagggtggttcgtcacatttgttctgacctactgagggtaatttgtcacagttttgctgtttccttcagcctgcatggattttctcatactttttgaactgtaatttttaaggaagccaaatttgagggcagtttgtcacagttgatttccttctctttcccttcgtcatgtgacctgatatcgggggttagttcgtcatcattgatgagggttgattatcacagtttattactctgaattggctatccgcgtgtgtacctctacctggagtttttcccacggtggatatttcttcttgcgctgagcgtaagagctatctgacagaacagttcttctttgcttcctcgccagttcgctcgctatgctcggttacacggctgcggcgagcgctagtgataataagtgactgaggtatgtgctcttcttatctccttttgtagtgttgctcttattttaaacaactttgcggttttttgatgactttgcgattttgttgttgctttgcagtaaattgcaagatttaataaaaaaacgcaaagcaatgattaaaggatgttcagaatgaaactcatggaaacacttaaccagtgcataaacgctggtcatgaaatgacgaaggctatcgccattgcacagtttaatgatgacagcccggaagcgaggaaaataacccggcgctggagaataggtgaagcagcggatttagttggggtttcttctcaggctatcagagatgccgagaaagcagggcgactaccgcacccggatatggaaat

SEQ ID NO: 469176 - DNA, 673 bp, Homo sapiens
tgcaggccagacagtctctgtcatgactgttcaatttggctacatcctgaaagcagccacagacagcatgaggatgatgggcatggctgtgtgccagtaccggccagcccagaagacggacagcctcggggacagcggctcccacagcggcctgcacagcactccggaacagaccatggccgtgcagagccagcaccaccagcagtacatagatgtctcccacgtcttccccgagttcccagcgcccgacctgggcagcttcctgctgcaggacggcgtcacactgcacgacgtcaaggccctgcagctggtgtacagacggcactgcgaggcaactgtagatgtggtgatgaacctccagttccactacatcgagaagctgtggctctccttctggaactctaaggcctcctccagcgacggccccacctctcttcctgccagtgacgaagaccccgagggcgccgtcctgcccaaggacaagcttatctccctgtgtcagtgcgaccccatcctcaggtggatgaggagctgcgaccacatcctctaccaggcgctggtggagattctcatccccgacgtgctgaggccggtccccagtaagtgacccacggccccgcccggcgctgctccatcctctcttcctgcctcctctgtcctttcttacatgtac

SEQ ID NO: 469177 - DNA, 654 bp, Homo sapiens
agggtccaggtgatgtggcttccaggatataatgataaaaaaggaaaaggtctcctttgctctacacggcttcctaaaggaaaattgtcatattaaattatatatgtcaatgatggctgtgatgaaaatggcaacactagagttgcgcaatgtacacagtctggacaatttaacagctttatctttgagcaagaacaggtgggaagaagcaacaggaaaatatgacatgggaaagggcaatagggtgctggcgctaactggcactggatcgtcagagctgattgcccatcggcccacagggatgatccaggaagcattgccgtctcacaatcttgtgactttatcaacttcaaggacatgtcacctctgctccacttcagacatgcacaaccacagccacatcttggatcacaaagccaactttggaatagctgcatctttgaaatgtgattatgatgacaccttttctgcaggactgagccatggatattttgatagttgacttttctctcttgcatatgaatgataaaaagaaagtgatacattagtggaactgtcattttctgtgtggtcacagcaaatttaaaaaaatgcattttaatcataaaattagcctgattcatggtgtttctatctagaaattataaaaggatg

SEQ ID NO: 469178 - DNA, 514 bp, Homo sapiens
gggaagccttcagggatccaatggatatggtcagacagatactctggcagtgtctgcctggggcctctctacaagacctttcaaaggccagctacaaagtccattcattttcaaaggcatgcagccagaagctcaaagtctgctgcagaggtggagccctcatggagaacctctaccagggcaatacagaggggaaatgtggagttgtgcagcccccacacagagtccccactggagcaccacctagtggagctgtgagaagagggccaccatcctccagaccccagaacggcagatccattgacagtttgcactgtgcacctgttaatgctgcagatgttgtcaaggctggctgtcagtggcccacggacaaagaaggctatagcagggagagcctggaaggacctgccagaaggagcagggaccgactagaccatcccatctgagaaggtgtgaggtgatatctcatagcggctttgatttacatttcccagatgattaattatattgagca

SEQ ID NO: 469179 - DNA, 497 bp, Homo sapiens
tctgattggctgagctgcaatgcaggaaggaggagaacttagatggacacaaacaacagaggagatacttttcccaaaaccaaatcacctggctgcttctacagcagatgggattctgggcagttaaaagtaataaatggtattgagaaagagaaagaaaaatggctgctgagtaaggaaaaggcaagggaaggagaaaacagcagcacacagaggagacagggcattctgcaaagaaaaagaatgatggatcttcccagctgccttcagggaccatgcagtctgccaccttctggcttaatcccctacttaatcccttttgtccatcctgccccagactcactggtttccttgtcatcccctatcctaccagtgtctaattgcccttcttttggtaacagtgctctacttttcatcaatgaaatcacttatcccacttttagttcataagttttggggtgggagggaaacagtttcaatgcatggacttcagaatt

SEQ ID NO: 469180 - DNA, 550 bp, Homo sapiens
agagagcccaggaaggtgtatctgcagatcctagatcttggggatggttggttcaaatgttagtatgccagactcactcttgttcagccactctctggttctggtgtcaccagatgctgctactgagagactccttggctccaattgtcctgctctcctgggtgtccttctagccagaataaactctggctgtcctttggagacccagagtgtttcacctcgacccctgcccacgacctgcaacccttcttggaaagcaggaaacaagagggtgggtctccttgttgtcggaatactcctgggcaagctcctggatctgattgaggaaaggggtgctaccacctgcagattcctggcatcactaccaataggacccagaacaaatccccagccttcagcggataactgccaccaggtggcgccagcagcagtggacctggacagtttggactcctgcaaccctggctgttaaatcctcagtcacgtaactagcctggcactaaatgacctcacatttacacgattgaattttttggactttactttctgc

SEQ ID NO: 469181 - DNA, 3074 bp, Homo sapiens
agtgggtgcagcgcaccagcgtggcacatgtatacatatccccccacccaccgacaggccccggtgtatgatgttcctctccctgtgtccatgtgttctcattgttcagctccctcttatgagtgtgaacatgcggcttccaggggcagtgtttgatttacaacttgcagaggtagaatccacgcaagtaagaattacttggaagaaaccacgacaaccaaatggaattattaaccaataccgagtgaaagtgctagttccagagacaggaataattttggaaaatactttgctcactggaaataatgagctgtcggaaaacctcatgcaacaaatggaaatgccacacaggcagaagctggcccctcctaacccatttgaccttcttcctggagaaagtagcaccctagagtctctggccaagctgcatagacaatcagttattacagttgccaaagcagtaactacaaggaatcagtatattactgacattgcagctgaacagctgtcttatgttatcaggagacttgtacctttcactgagcacatgattagtgtatctgctttcaccatcatgggagaaggaccaccaacagttctcagtgttaggacacgtcagcaagaatatcccaatggaaaaataactcactatacgatttatgcaatggaattggatacaaacagagcattccagataactaccatagataacagctttctcataacagggttaaagaaatacacaaaatacaaaatgagagtggcagcctcaacccacgttggagaaagttctttgtctgaagaaaatgacatctttgtgagaacttcagaagatgaaccggaatcatcacctcaagatgtcgaagtaattgatgttaccgcagatgaaataaggttgaagtggtcaccacccgaaaagcccaatgggatcattattgcttatgaagtgctatataaaaatatagatactttatatatgaagaacacatcaacaacagacataatattaaggaacttaagacctcacaccctctataacatttctgtaaggtcttacaccagatttggtcatggcaatcaggtctctccatgttttaacctctaccaaagcatcttggctagggctgtctgtgttgccccagtttctaagtgggctgcctctgtggaatttctgttagctacctacgaattcacattccgtgcataactgtaacaatgaaccaaattttagtgttttccttttttacatgtaaaaagttgtattccattattctaagacattactgtgttattacacagcagctgagaaatgtcattctaaatgttttacctaaatggaaatataaagttggctgactattttgcagtaatgtttttattgcttattcaatgccaaatagcaaatgtatttatattttacactattacagcagagttacaagtagattctaaactattttcttatttacgtgctacattggcatttcctttgtaaaccattcaattttgaagactgagtgaacagagtttgatattattttactttttaatgacacaacagagattgaggaatgtagttttcatcatttgtgaggtcagtcattttaactgctttctcaatgttatgcttatcactttcccaacttcttggatgtgtgatttttttcccacctcttttttattgtctagggatctcttttactgtatatttattcaccctcaataaaatttttatttttattagaggatgacagttgaccaagatgtacttgaacagtaggtgagtcactgtgacataccccttgttcttctttctcatgaaatatttttttccattgaatcacagaaacagatgttctaataccaccatgcaaaatcttcctttatcatctcattttgaaagtaaacagtctcttgtgcttctggagaaaagcactgaacctaattcctttaccagaaagtttataataaaaattgtgtgcatttccatgttaactttttcttatatatgtttaataaaacacattattctataccctaactttacagctcctgattctccccctcaagacttctctgtaaaacagttgtctggtgtcacggtgaagttgtcatggcaaccacccctggagccaaatggaattatcctttattacacagtttatgtctggtaataattttttttttggaaatagttctgagaacagatattaatctgtaacataataggaatgtagcttttagatttcagaatgtggtgctacattaggaacctgattattaataggctagttaatatgttttgattaagaaacaagtttttccatattatgtagtggttcaatcatggtcaaatgaaataattttgcaattaaaacaaaaaattatgtgttacgcataattatactaaattcctactcttaaaagtcattgacaagtcaatttgtatgaatgtaagcatatacttttacacttctgaagttttacacaagtactctcatgtcattgtctttcaagtgtcccttgagcagagtaattttaataaacatttaaaatagctatttttaaagaaatctgttatttaaggtcaatttttaatttgaaatgtaaacaatgtatttcgtttctgatcactgttaccctgattgcctgtttatccttcaattgtgaaaaagatgaaatccaacattgtatctcatgttagttagcatgcttatactacttcatgagaacttggtagattgaaatctttactttgatgtaatgtaaatcctctttagattcaccaattaggtaacacattacctagtggatttcatatatttcaactcagaaaatacaatttacacaatacttcgtaaaacatagccatttccttttatatttctgaatttgaagggccagcattgagggagatgccatgatgttttaaagaagtctcctcttcttctctttcctaagttaagatttttctttccctaattcccctttaacccctttacatatttctctttaagactatattttttgttttctttgttgcctgattcctagtgactttgcctagtcgtgac

SEQ ID NO: 469182 - DNA, 803 bp, Homo sapiens
acttctgcagacttaaatgtccctgtctgacagctctgaagagagcagggcttctcccagcatggcgttagagctctgagaatggatagactgcttcctcaagtgggtggctgcccctctgggacaaagcttccagaggaaggatcaggcagtaatatttgctgttctgcagcctccgctggtgatacccaggcaaacagggtctggagtggaactcctgcaaactccaacagacctgcagctgaagatcctgttagaaggaaaactaacaaacagaaagaaacaacaagcatcaacattaacaaaaaggtcatctacaccaaaaccccatttgtaggtcaccaacatcaaagaccaaaggtagaaaaaactgcaaagatggagagaaaccagagaagaaaagctgaaaattctaaaaatcagagtgcctcttctcctccaaaggatcgcagctcctcgccagcaatggaacaaagctggatggagaatgaatttgacaagttgacagaagtagtcttcagaaggtcgataataacaaacttctccgagctaaaggaaaatgttcgaacccattgcaagaaagctacaaaccttgaaaaaagattagatgaatggctaactagaataaacagtgtagagaagaccttaaattacctgatggagctgaaaaccctggcacaaaaacttcacgacacatgcacaagtttcaatagccgatttgatcaagtggaagaaagggtattggtgattgaagatcaaatgaatgaaaggaagtgagatgagaagtttaaagaaaaaagagt

SEQ ID NO: 469183 - DNA, 577 bp, Homo sapiens
agaaattcattaagtggaaacttagccaaggtttctgtaaaccacagaaagaatacttaacgtggcgggaacctactatgggtgcaaaaaaacgacatctcctggaccatagattaacagtcaacacactaggaataaaaaggaaataccccaacaagataaaaggcatttatgagaaactcacatctaacatgattctcaatgcagaaagaataaaacttttctcattaagatcaggaaaaagagaaaaatttcattttgtacttttattcaatattgtactaatactcatggatattatattttctccttatttctctggtggtaggctctcctgcaggggtggctggcccaaagcagagctgccttttgggctaaagaaggaactactgtcacttaactcattggccaaaactggttatttggtttcactcaaccagaaggctatcagggagtacaactgtaccatgagttcagagtatttgatgaagagtgtcaacgactaataaacatttcctactttctatgaataatgtgctccttttactgttgctgataaactttataacattcccct

SEQ ID NO: 469184 - DNA, 599 bp, Homo sapiens
tcttctcggcttagcggctgaagactgacactgccggatcacctcggaagccccctagaccatcatggacgccgagcttcaggtaactctcacagtggaagatacctctactccctccttggcgaccgatcatgcaccccttaccatctcattaaaacctaatcacccttaccccactcaacaccaatatcccatcccacagcatgctttgaaaagattaaagcctgttatcactcacctgctacagcacggccttttaaaacctataaactctccttacaattcccccattttacctgtcctaaaaccagacaagccttccaagttagctcaggatctgcgccttatcgaccaaattgttttgcctatccaccctgtggtgcccaacccatacactcttttgtcctcaataccttcctccacaactcactattctgtgcttgatcttaaagatgcttttttcactattcccctgcacccctcgtcccagcctctctttgctttcacttagactgaccctgagacccattagactcagcaaattacctaggctgtactgccgcaaggcttcatagacagcccccattacttcagtcaag

SEQ ID NO: 469185 - DNA, 551 bp, Homo sapiens
agaaaggcactccctgacaaacaggaacacctgaaactggtgatcagcagcttctcgcatgcagatccaagagacaaaggaggacgttaaagagaagtatgcttaccgaccactaaactcattctgttgcaaggcagattttgtattatcccagtggaagaatgcccatggtttagcactaactttaaggcagacctcattggctttgggcttagcacgctacatgacaatggaaatggatacgacatttgcatttaataaagcgtttgctgaggaaattgagttgagtctgaaggttctgctggtgacagaaaggagattaatgtcaaacttcaaagaatcctatctggatatgttcagagggaatgatcactacactcagagtggaatgtttcagaagcttgaatttgcaatcaatgttcatttccaagggcaagctagggtttctcctatgtgtctgtgtttgtgaggaaagattctagtggatttctctctgtggcttactacctttggctggaagttactctctatttatttctgttccaaattgc

SEQ ID NO: 469186 - DNA, 731 bp, Homo sapiens
accatacgcgtgcttttctggctgctagtgaaggcgggaggagtttgacattttttattaaagtatgacttgggaaatgcaacattatgtggtcttgggaaatgcaacatttgggcaggaaaacaaaaatgcctgtcctcacctaggtccctgggcacaggcatggggttggaaccctcgccagggaccacacccttcccttcccagcacttccctgccccgctttggaggcttgagcagcttccaaagggtaaacattacacttagattctttaaagaaaattcttacttgtcatatatgtttaaaacactccatttgagagacaaatctgaaggagaaaaaaaatgttacaaaataccaaagtggtcagaaactttgagagaagagaagcggaaacagacacagagatacaaggaagaagaacatgtgaatgaagaagcagattttggaattgtgttgtcacaaaccatggaatacctggaatcaccaaaacctgcagaaggcaagtgaagattccctgcagccttcagatggagtgcggccctgcaaaccagacatatctcagagatattgcagattcagttccagaaaaccagaatgaaattttctatttgttgagccattttcaccatattttcctttacttctttgaataagatttccttttagtcttcagatatatttatgttagctgctttcgtgtctttttctgctaaactcaaaatcttga

SEQ ID NO: 469187 - DNA, 531 bp, Homo sapiens
gctggcaacagaaatcaagatggtgtttatttcatatggtgtctggaaaaagcgaatgctcatggaggccactatggtgaaaaagccaggggaaagtaattgtgtccatcccccccagaaaaccagtcttcttactggtttgacctgggcgctgactcactccctgccccatctccaccctcagaagtcagcctggcaaacacacgtggaaaaatctccactaactctactttttgaagcatgtgatatctggtcacagagagtcgagactttgcacacccttcaaagtgatgcatgtacagtggactttgttatttcaaaatctgtcactgtgtatcctcagccagaacttgggaaacatccttcatatgtatttccctgcactggccacagccatgttgtgattgaggggaaaatcccaaatgattccattaaatgttgctggtgtcagtagtgccaaaaacgcatgtatgacatgatacagtaggagttgtctatacagttaagtgactatcactcacccggtcttcc

SEQ ID NO: 469188 - DNA, 1862 bp, Homo sapiens
gcagcccaggaaactacactcgacccagtatgatgaaaagtagtagagactgtgatgaaaggagaaggcgttacatagcactagtcatcctctgtttccgggtaaacctgcgagtgcatctcctgtggccttttttcctgctgcctcagcctggattacacttacaggattattattactgctgttgctctgttgagcaggcccttatgaaaacctttctgctaaggatgtcaaagcaattctaccaaaggaaaaatccagccctgagaggctataaaccactttattccagtccacctagtaatgctacgagaagagcagagtgtcttcatcttcctctgtcagcctttaataaatcccagacgaggggtcagcagtccatgacagagatctcctgctactgctgtgtatggcatgtgtcaatcctagtcaaaacccctagtcagagctctctcctccttaaaccaaatatttgtggaaaagtttaaaaatggcaaaatgctgtataaatgctatacatttccctctatctcatgttctaactgcattccacggttttgtggtaactagcttgtaaaaatattaaaaaggaaaaggaaaaaagaaggcctgatttgtagcatgccaatttcatatttgtcttgtaaatactccaccatgaccaatttcaagctacaaatggtttaacaaccagttggaaaattttctgaatatttaacatttaatattgcaagctgatacaaaccagctctagcacactcaaattttcagtagtattttcatgattccttaattcaaaataggtcctaataaacactatactttgttatctgtccacatgtctttaattattaagaagtgtgttcaaatttgccattttatgggaatattctaattgttaatttcttaattgcttttattagaaatcatgcttgatacaatttcaatccagtaaaatttattgagattgactcaaagtccagaaataatagatttttataaatattatttgtgtgcctgaaagaaatgttttctgtaattttttggtacaatgttctatatccattcaataggtcagatttttaatctggtttaaatcttctgtgtcattattctttttctgcaagatgtatctatgacagaagtatattaaaatctcctattctgtgctcacttctgcagcacatatactaaaattggaacaacacagagaagattagcatggcccttgcacaaagatgacatgcaagttcgtaaagcatttcatagaataaaaatcttctattatgcttttttcctcatgcaattctttgtttatttggttttcggggacagcataccttgttcaattctgtaaatttttctcatatattacaaagctttattttgtgttcttacatatcaaagttgtaataattgtgttaattaaaacattttcattgtgaatttatacttctctaataatgtttagagtgtattttgttttatattagtgtattcttctaagatgtctactgattactatttgccggctgtattttttccatccttttatatgtcacctttttgtatccttacattttagacacgtctcttgaaaatattatacacaggaatgtatgcgtgcgtatttataactgcatatatacaaaaatatgagtatttatacaatatagtactctcatgttaatttatttttatatgatgtcatgtgtatatgtatttactacagcttgaaaatctttgtgttttctggagaacttaatccatttaaaatttttaaatttctaatatttgggggttaaaattttattttgtttttatatttgccttgcttcttttattaccttcttttgggtttg

SEQ ID NO: 469189 - DNA, 625 bp, Homo sapiens
tgttagttgagctactgttcatcagctgaccctgaaattgctctaattgaagtttgatagataatgttaggattcacctggttcataaaggataagagacatttgaagaggacccaagtacaacctgagcttgtaagcaaaccttacgagctagatgagctaaatcccagtcaacgtgcaaaaacaggatatagcttcaaatgtggcagcattgggaaggcactgtttctgggtgagaagaagacaacctggaaaggaaggactctgtaccacttatcagcttattgtctcccagctctgaatccaccctttcctatgcagctttgtaatactgaagccagaccctatagacgtttctcctttgccagctggcacacaaggctttatcaacagagggcttgtgaggataaaggtgcttttccaagttctttgtttctttgctgccactttccctcagcccagaagtagtagctgggtttttttttgaacatactacttttcgatctctgagagtcctgtttaatctttttaaatcttcaactattactagttaagaattctttatattaggctttccatttctaatcactgttgcattctttagttttctgactggaccctgacc

SEQ ID NO: 469190 - DNA, 444 bp, Homo sapiens
gattcccttggctgttctagcttgtgtccctcccctggaataaacgtgacaatgagtataattgatttcaagtgtgataagttcctaaagaaattaaaacagaatgtcatgaaagagaatgacagaggtgggactgtgtggactgggttgttggggccccgagctgaatcttcaatgacagagaaggataaaagctcagaggaagaccaggaagagaggaatgtccatggtcactctaggcagatgagggtagaaatcttggagacacctgaaaaccacagaaccaaggaaaaggcaaagcccagattaaaggtagtgtctgaagtgggtgctggtgatggagattgggaagggaggagaggattcattgaaccagtggactggagtcccacccttacagctgtggctgcagctgccagagactgactgccaattaccattaaa

SEQ ID NO: 469191 - DNA, 590 bp, Homo sapiens
atctgggactggataatttataatgaaaagaagtttaattggctcactgttctgcaggttgtacaggcttctgcttctggggagacctcaggaagcttacgatcatggcagaaggcaaagggaaagcaggcacatcttcatatggctggcaggaaatagagagtggggtggggagctgggggagaggtgctatacaccattaaacaagcagaacttgggagaagtctatcacaagaacaacaagagagaagtcctcctccatgatccaaccacctcccacaagccctttcctccaacactgaggattaattacaagatttggctgatgatctcctatcacacttcactgagaaatgggaatgattggaggagaactcccttttctcccaaccacctggtctacacatgaacctgtgtgtacccagtgtacccattttctcttttcctcctcttagtatggaaaaaaattcccttccttcctgtttatattataagaaagcaaaactggctttcctccactctgcctttctcaaggacttttcttcctcattactccctttttctcctgcatcgtcagtccctccctcttt

SEQ ID NO: 469192 - DNA, 559 bp, Homo sapiens
gtgttctctaaaccattgataagcaaaatgaagcctgaggactttgtccagtttacccatctagaaagatgccaatgccagcattctagtcctaaatccttactggttcttcaacaaaggccagatgccatcgaggacaggaaagaggaccacacaccgaagcccacagatctttctgctggggagttgttggcaaaagcattccacttccctgtttgtaaagtgggcaaatataatactgtgaaatgccacaatggcaagtgggagccaatgaagggtttggagcagcacagtggtcaggcagaccaagctgactcccagctgtttccccttcacagtggcctgggaggggctgctggctctgcagagtttgatatttcctcaggagactttcagtgttacactgaatacaaatgcaagagtgggcatccttgccttattccttagaaattccttagatggaaatttttttttaactataaaatatgatgttttctgtgggtttttcgtatgtagcctttactatattgaggcaatttccttctactgctagtttttc

SEQ ID NO: 469193 - DNA, 897 bp, Homo sapiens
aggacaataagacaagaaaagaaagcatgaagattgagaaggagccagaaagcgggccatgggttccaaccagcttggcgttttctcagctatggcacgatgcacttggacttcatttgtgatcggcccctcattgagcatgaaagctggttacctttttcctgccagaaaatctggctttctcatttgccagtgggaaacattaataccattcagcagaatcatgcttccctgtacttctggcctccttgaagtaaggcaaggcatggacacaccttgctctggccaatggcacatgagcagaagtgaactgtgtctccagacctctttctcctatggtggagcctgtgccaatgatgtacctgccaatatgatgtggatggatgtgtatgggggatttcatcatgaactccacatacaagccaatttcacagccatagaaatttccaaaattagtattgaggcagttgaccacagctctatgctaatttctgaggctattaattgtgtttgtgaaatataaatgcatgagcaatgactgtggatattgcttaagaatctaaacactttattgaagaaataagtgagacaaaataggtgtgataagagtacaaaatatgtaccatattgcatcaaatctagcatactataaattttaagacatatatcgtattccatggaccacaaaagatgctgccaattaaattatgacttaatgtattatcatattgaatttttaaaagacttttaaaggaggtcttttagcttattcaaacataactgccctttattactcatctgcataaattaaaaagaaaatgtaagccaaataaattggttaaggagttcctaaaactgctacaaatcaataatttgatctttttgaattgttttcaa

SEQ ID NO: 469194 - DNA, 766 bp, Homo sapiens
catcaatcagtatgcctcacagagaggtggaaaatgctgatgaatctgggaagctgcttaagtatagattggttaagagatgttttatggtaattaatggtatgagagcagataacaggaagattgagctaggctacaggaataacatgtacaaagggcccgtggaagggtggagactcggcatattcagagacctaaaagaaggacctcctgcccacctgcttagcagtgccctttttcctgaagaagaagctgagctctctctcttccatcacccacttgccaccccagtcaccaaagcctctcccttgaaacgacctgcccccccagccctgtatcaccagccctatgcttcattaagggagcacaatgtgtccccgtggtcgcctgccagccgggatgtcctgtgtgacagcagatgcaaagagaatgaacaggcggctgaaaaggctggagacaaaaagagcacattgtccagagctctgaaagggctgcctgagaggggacatatgcatctgaaaaaaataccccagggatggggccaaaacccaacctggaaagtgattgtgtcatacccataagaatcccagggcttggttggatttctgaggctgggggtccaagaaatgggagaggaaggaaaagctagcttgcaaatgagctgttattttgtgaaagatgacttcatagtttagcaaaaggggttcacaggtcaaatataagactctaagttctctgctctgctttgtgaacttgggcaattcac

SEQ ID NO: 469195 - DNA, 2066 bp, Homo sapiens
acgtgccagccaccatgtcgaagggacctgcagttggtattgatccctgcaccagctactatgtcgcctctacggacactgaacgaatgactggtgatgccgcaaagaatcaagttgcaatgaaccccaccaacatggtttttgatgccaaacgtctgattgcacacagatttgatgatgctgttgtccagtctgagatgaagcattggcccttcatggtggtgaatgatgctggcaggcccaaggtccaagtggaatacaagggagagagcaaaagcttctatccagagaaggtatcctctatggttctgacaaatatgaaggaaattgcagaagcctaccttgggaagactgttacccatgctgtggtcgcagtgccagcttactttaatgactctcagcgtcaggctaccaaagatgctggaactattgttggtctcaatgtacttagaattattaatgagccaactgctgctgcttatggcttagacaaaagccagcctggtgtgctggttcaggtttatgaaggccatattgagatcgattgtctctatgaaggaatcaacttctgtacctccattacccatgcccgatttgaagaactgaatgctgacctgttccgtggcaccctggaccccgtagagaaagcccttcgagatgccaaatttgacaagtcacagattcatgatattgtcctggctggtggttctactcgtatccccaagattcagaagcttctccaagacttcttcaatgggaaagaactgaataagggcatcaacgctgatgaagctgttgcatatggtatagctgtccaggcagccattctgtctggagacaatcacatgaccgtcctcatcaagtataatactaccattcttaccaagcagacacagatcctcactacctattctgacagccagcctggtgtgcttattcaggcttatgaaggtaagcatgccatgaccaaggataacaacctgcttggcaagtttgaactcatgggcatacctcctgcaccccgaggtgttcctcagactgaagtcacttttgacagtgatgccaatggcatcctcaatgtctctgctgtggacaagagtacaggaaaagagaacaagattactatcactaatgacaagggctgtttgagcaaggaagacattgaacgtatggtccaggaagctgagaagtacaaagctgaagatgaaaagcagagggacaaagtgtcatccaagaattcacttgagtcctatgcattcaacatgaaagcaactgtcgaagatgagaaacttcaaggcaagattaacgatgaggacaaagagaagattctggacaagtgtaatgaaattatcatctggctcaatgagaatgagactgccaagaaggaagaatttgaacatcagcagaaagagctggagaaagtctgcaaccccatcatcaccaagctgtaccagagtgcaggaggcatgccgggacgaatgcctgggggattccctggtggtggagctcctccctctggtggtgcttcctcagggcccaccattgaagaggttgattaagccgacccaagtatagatgtagcattgttccacacatataaaacattgaaggatctaaatttgtagcaaattctgtggcagtttaaaaaagttcagctgctatagtaagttatggggcattctcaatacttgaatatggaatataagcacaggggaaggaaataacattgcgcttcataaacactgtattgtaagtggaaaattcaatgtcttaaatacaactatttaaaattggcaccataaaaatattcgaattaatagtgcaagaatgtttcttctcaccactccaatttgtcattatactgtaaatcctagctagtacattaagaaaagaaaaggaaataaagggtatagaaattgagaagaaagaaagaaaactttatttgcagattacatgattgtctatgtagaaaattaaaaaaattcacatacacaaaaacttgatctaataaatgattatacgaggttgcaggatacaaggttaatatacaagtcagttgctttcct

SEQ ID NO: 469196 - DNA, 2282 bp, Homo sapiens
ggtcaagggtgggttgggagatcatcccggtcaagggtgggttgggagatcatcccggtcaagggtgggttgggagatcatcccggtcaagggtgggttgggagatcatcccggtcaagggtgggtgggagatcatcccagtcaagggagggttgggagatcatccaggtcaagggtgggtgggagatcatccaggtcaaggctgacccacggggaaaaaattcactgttacccagttaggtcccacctcagtggaccacatggtgcctctggcaggccgtgcctatggctagtgacgtaatttccaagctaccaggaggctgctgtgcagcaggtacctccagccatcctcctagcaacagcctgcaccatgccaccacccagcagacagctgctgctgccagttccagaaactagagagatccatgaccaaagtgaggctccagaatgtctctgtcaagacaatggagatactgatggtcacagggccagagggcaccaaaagcataggagcaaatgtttgatgccagttgaaggagcagtaaatccaagagacactgagaaagacagaccgtgtgcaggagaagctgtggtttatgggcagagaggagattataaaggaatatttggaaatgaaggaaaggaaactgctcttggaaaccctgaaatgaacacacaatgcatcagagccaagcctgcaatcactcaagaaagaatgattctcgaggcatcgagtcccccctggaagttaattgaaaggctgtctacagaaaagatggtcagtcctaagggagagcagttccattctgatgtccacagctggctggtagggtgagtcagcatcccccccagcagtcccattcaccctgggccactgctgggacccagcatttgaacagtaggacagagggctgcaggctggcctaagtcacaccacagtgagctggtcttcccaggaagctcccagccttcccgttctatggcactgtcagactgtacctctttatttcaaaacacatcagaatacatcaaagccctgactgttaggtaagtattactatgcccacttttataagcaaggaaatagagattgcaaaggggtaattaacttgcccaaaggcgcttaacttcataaaccagcctggattccgcacctattctgactctaaagcctgtgttctttcccttgacttcatgcggcccctgccttcaaggactttcctctccagtgtatctttaagtaagaaagcgtgtgtgggagactctttggccactcagctttccttttatgtaaaacgcctgtttgtgtcttttgctcacttttctattaagttgtgtttttcttactgattagatgaattctttatacatgctgaataccaatacatttctcagtctgtacctttttgttcctttaatggcgacttgatgaccagaagttcttcattttaacatgatcaaaattatcaatccattctcttctgttattttacatattgtgctctgtttataaaatcctgccatatcttaaattcataaagatccttgccagcgttttctgctaaaaggtctaaagtttggacttttatatttaaattttaattcatcttaagtttttaaaaattacatatactgtgtgaggtatagatgcaatttcacatggaaaaccagctgtcccagcaccatgtatcgaataatctatattttccccactgatcttcagtggccattctgtattatattatatcaagtttctaaatatgtatgaattggtttctgaactgtatcttgtcccattgatctgtttgttcttttatcattaccaactgtcttaactaccatagcttttgaataagtcttgatgttgagtaggataatctcctcaccttgacttctttaggagtttctcagctattcctggtcttttgtgcttcaattaaattttgaaatcagactgccacatggtaccaaaaccaaaaaacaacccaactgctggtatttttgttacaatttaactgaacctaaaaaaaaatcaaaatcagaagaatttgcagttgttcatgattacctttgctggcagttttcaattgcatgcatatttttaaaaaagcatttttcagctttgttaattctattttattttttgctcctatttcagtaaatctcctctttattaattcatcccttctatttttaaaaagattattcttttgcttattctaatttcttaatttggatgtttaccttgctgctattcagacattcttctttcctaatatatt

SEQ ID NO: 469197 - DNA, 1634 bp, Homo sapiens
ccaaacagaggagcagggaaagggggcagggaaggaaggaagtttaataaaaagtagtttgtcccgtgtgcttgcttttggttgtgtatatggctgcccctaagaggaagggaagaggggaaaaagaaaagtgtcagttttgctccagccaagcagctgggccctcagccagtgccttccctccagctgcctgatgtaggatgatctaaataagaaatgtgggggtgggggtagtgtcttccagggactcccttcactagcctcctgggttaaaaagcacactggggaatctctgcctttggctggggcagcgcctctggccagtttgggcaacaccctccgccatcatgactaccgtctctgctgccctgaaggggacgcatgtttccagatcatccagaaaggtcacagtttacaaaggctacatccgaaattgccctgtgacttggctggctgtctggactcctgggccttcggtcaatagtgcattgtcatcacaagtttcccacgcaagagttcttgctgtccagctcaattcctctggctgctatcacagtccctggaaactgggacgccagaattctcttgcgagagactcccgagcctgctacatttctggatccattttcctgacaattgttgcctttgtgcgcacccttaggtccagggaaggggcagcgggaagagaagatgggaaagcaagagacctccactggtcctgttttacaggcaggcctggttaccaggagatagactcttaatagagatctaaataccagattcagacagatgcatatcaaaattctaccttgataactgatgcagacatattagatgccacaatttaaatcatgccacataagcttactaataactgactgagaactgaattgactcattcgggctacagaccttcctagcagatgttagaatctgctctgaaatgctactgcttgctaattgtcagggcaacacatcatccgttaaacttaccccctttcgggtacagcgttagtgaggttggggcttccctttctggtttatacatatttctgttaagggcaaagcttggccttagaaatggggtaatttggcctatgatgggagttttcaatttagtgatgctgtagaacaaaggtggaaggatgacaatgtttatgcaatgacctcttccatctcactcttgtgaaaggttgtgtagcttctgggagacagtcccatgagaccacagcccagagagcttcactgggaatatggaaggtgctgcctccatatccccccaggtgacgaatgcatggcaagcctccttgacaaggttgtcaaaaaggttccttcctatgaacacatttctttgaattgaaaaaggaaggcaggctctttctgacagaagttaagtctaacttggctgcttggctatccattaaatatttttcacaaattgagtgaaacaaatttgtaccactaaggattttatgaaatatatatttaaagcaattgataaaagcatgttaatacaaagatataattaaaattaatgaatatttctattttccctaaacctttctgagaacatctggttaaacaagctgcctttaagtgaaagagtgacaggtataattaaaagccatttaata

SEQ ID NO: 469198 - DNA, 755 bp, Homo sapiens
gttttcttccccatttcctcctcatggcagcaacggaaacctgaatctcagagctgccatgggaccagggggccaacagaccagaggcaccatcctcagagcccccggtctgcctgggactgggagcatggctgtggcgcccaatgagaacatagtgtccatagtgaccatgattcttcaagtggtgtctgaatttcccacattagctaaattcctttgggagcttcagggtttccagtcttccagggtttttggcttaaatgcaagtacctcttggaagaatggcacatgcccccataccctcagggtaatgggacaaggagaagatggagtagggggtgaggctcagaaaggcaagggaaagtggctctatctctctccaagtcacttctcaaactgtgcagggtttgcaggaaagaatcacaccatgtctgtctcagacttctacttctattctcctatttgcccattgttcctttcaatttagttttggtccacgaacggcaatactaatgctatgtaacgagatagaaaaacttggattctccagaatttctcttaggagggaaattgtactttaataaatagatataggtggtacaagtgcacttgtgttacatggatatattgcatagtggaaagtctgggcttttagtgtagccatcacccaaattgcgtacgttgtacccaatgggtaatttttcctccgtcaccccctcccaccctcccaccttttgcagcctccagtgtctgtt

SEQ ID NO: 469199 - DNA, 512 bp, Homo sapiens
gggggaagcccctcatcttctgagcctcagtgtcctgggatggaagatgaaggggttggcaaggtcattgctatgggttctcatgcaacaaacattctgtgactcactttccatagttgatgttcacgaaagagagcacactagtgccaggcacaaggtgggcacacagtatacacgggtcaaatggaggaacagacaaggaggacatgggtttgaaatcattcacgcgcatgcttttatctgtcttcttaagcctaatggccacatctgtggaaagggaggggaaatagtgaatgacacccatggtcctggtgtctttagcatgatgctccaacacctgggccaactgtggctccagattaacctctgctgcaaaaggagtcttgggcccggaaatgtgaagtgacggagaatggtagcggtttcaaatcttttgataggccctttataaaagtcttagaggtcctttggcattggttcttaaccttaagtgtgcatttgaagtatatata

SEQ ID NO: 469200 - DNA, 4446 bp, Homo sapiens
tccccaatgttagaggtgtttgggtcatagaggtggatccctgagaaatcgcttggttctgttctcgcgatactgagtgagttctcactcactagctcccgcccgagctggttgtttaaaacagccgggcaatccccaccgcccctcactcattgttgcctctctcaccacgtgatgtctgcacacgccaacaccccgtccccttccgccatgagtggaagcagcctgaagctctcaccagaagcggtgttggtgccaaacttcttgcacggcctgcagaacggtgagccaaataaatccttttttctttataaattatccagcctcaggtattcctttcctgcaacacaaatggacgaagacgatcccctatacttcactttcttcatgccgccccctggagcatggactggggagcaagctctctcggcctctatggataaggacaaatcaaaaactgttgaagcaacaggaaagggaagacacaagtctttggatagtctgatggagcagagacgttttagcggcctgggtcatctgcctgtggacacttctacctcatttgggtgcggctgtcgtgaaacagaatctatattttaaccatgttgtgcttttagaataacattgcgcatatcacgaaacacctgtaaaatatagactctgaaaatattagtatttttaaatcagcttttaattttagaataagtgtcggctgcagctgaaatatgacggcacatttcctctcatcaaaactttgagtcgtatactcttataccacctggaaacccacctacccagtgcccctcaccaatggctctgcaactccccatagatttctgcccaattgctattttttgcacctgctgagtttgtcttttttgtatgtgtcataatgtacactttaacgacttatttctcctgttaatctagaagctggaaaaaactgggacctttgggcttcttcttgtaaactccatgttaatgacttattagcgtcttggcaaaaatacctaatgacttctaactaacctcctactgacaactatctcagggtttaagttctgactctgctagtttctagctatgcaatctttggcaattgacttaacttccctgtagaagtggtacctttgcttggcaaaggagggttttagtccccatgactgccatagccacccccaaacatgcaatgtgtagagtaaaatcaacacagagcaaaaatcagcttcgggacaaaacttcctggtatccctgcaaccaaattataatccataaatccctgtcataggttaacattctacagctgccactgctcccttcctctaaatttcctcatctggaaaaggggggaaataatatattgtagggtttttaaattgatatctaatattttacatatttatagggtacatgtgatattctgttgcatgcagagaatgtgtaatgatcaagttaggatatttgtggtatacatcaccttgagtatttttcatttctatatgttgggaacatttaaattctctcttctagctacttcgaaatagacaatacattgttgctaactatggtgaccctactctgttgtcaaacattaaaacttattccttttatctaactgttaagtttgtacccattcaccaacctctcttctttccccaactcttgccatccacacacccttcccagcccctggtaaacatcattctactttctacttccatgagattaactattttagctctcccacttatgagtgagaacacactaaacttgtctttctatgtctggcttacttcactaaacacaacgacctccagttgcatccatgtttttggaaatgacatgatttcattctttttttatgaccaaatagtattccgttgtgtatttataccacatttcctttatctattccaagtgtccgtcccttggtggacacttaggttgattccatgtaattgctattgtgaatagtgctgcaaaaaacatgttttctctttactctgctgattgtttcctttggtgtgaagaagttttctggtttaatatagtcccatctgtctatttttggttttgttgcctatgcttttgaggtctcagccataaaatatttgcctagaccaatattctaaagtgttttccctatgttttcttccagtatttttatagtttcaagtcttatgcttaagtctttaatccatcttgaattgatttttgtatatggtgagataagggctcaatttcacttttctgcatgtgcatgtccaattttctcaatactatttattgagcccatccatgagcatgggatgtcttttcaatttgtgtcctcttcaatttctttcatcagtgctttgtagttttccttgtagagctcttttacatccttagttaaatttattcctagatatcttaataactgttgtaaatgaaattgccttcttgatttctttcttaattattggtttatagaaatgctactgatttttgtatgttaattttgtttcctgaaactttactgaatttatcagatctaagagttttttggtagaatctttagattttttatatataagatagagccatcataaaagagggacaatttgacttctttttcaatttagatgccttttatttctttctcttgcctaattgctctggctaggactgccagtactatgttgaataggagtgttgaaagtgggcatctttatcttttttcagttcttagaggaaaggctttcagcttttccccattcagtatgatgttagttgtgggtttgtcacacatggcctttattatgttgagatgatctatttgaagttgtattatctactcgctatattggtttctctccatggaaaagatcctgttttccctacgaggcaagcaggatgcttaagatgaaccctttttgaccaaaggagaaatggagactagagaggatgagatgactcacgactgtttactgggtgtggaacccacgggaccttccctgtgccataccgtcaccagcatcacacactcacaccgtcaccggcgtcacacacacacaccgtcaccggcgtcacacatacacaccgtcaccggcgtcacacacacacaccgtcaccggcgtcacacactcacaccgtcaccggcgtcacacacacacaccgtcaccggcgtcacacacacacaccgtcaccggcgtcacacacaccgtcaccggcgtcacacacacacaccgtcaccggcgtcacacactcacaccgtcaccggcgtcacacactcacaccgtcaccggtgtcacacacacacaccgtcaccggcgacacacacacacaccgtcaccggcgtcacacacattccatacccgcctggaggtgccacagcatactcccaaaagccactgcagaaacatctttgcacttttcagtttcccctaacattgaagaacctggaggtgccccacttagcgagtgcacagggcagccgaggggatgcagttcccttctgggcagcctctccaggtctgggcacagaacctgcccctgcttctcttccaaagaatgaagcccctcccaagcctgctggactcatatgctttgtgatcaattccgtgtcctgcaagtgtttttctttattgacatgaaaacctcatgaaaacatgctttgtctgcattttcccgtagaggtgataggaagcttcaaagggtaaaggaagttagaaaagactgggaagggtgaggacagatgagaaaaaggtgtgcagcctgatgtgtgggcaaggacagatgtttccactgtgctgagcaatgcctgcctgtacagtgcctttatgtgttgttgatttttgccatgagccttcaggcttctccttgtagccctgacaagggaaatcccataatgaaggatttcacggagctccacgggctggtggaggcttttctttccatctgtcattttactttaagccttgacctttctgttcccatgtgaggcagtaccaggaaggggcttgggctggagagcaaacgtctgggtttggaccccagattgggctgtcagtgaagcagagaagataacctagggtttcgacaaccttaaaataagtcaaggaagacagcgcacatcccagggggtacgatgggggggcaaagatgggtggtgaagagtttaaataaaggagagccccttggtttagaaggaggtcctacatggaagtaggaaggcagagtagtctaggcgcccccctctctggccacccctggccactcagggatcccatttttactgaagaaagcagaggcttcagagtccaaaatatctgggtttgaatattggccctactacttgctggaaagttggagccacgtggcaaacaaccttgctaagcaaccttgggcaagctgcttattttctctgactctcagtttcctcatgtgaaagttagaggtctcaac

SEQ ID NO: 469201 - DNA, 830 bp, Homo sapiens
agatgttattgttaattccagtgtatagataaggaaactgactaatgcagatgctggaactccagggccccagggaatgcatcaagaagggaaagtgggaaccagagccgcagccggtgctggcattggtgctggaactgaggctgggaccgctgccggggctggggctggcgtggctggaggagcacttgctggtaccgccggtgtggccatcttgtggagaaagaaagcctgggaggaccatggcagtgatgttcacacctctgacagtgaaatatgtatactgtgacactgaacgcattggagttgacctgatcgtgaagacctgctttagccccaacagagtgattggactctcaggtgacttgcagcaagtaggaggggcatccgctcgcatccgggatgccttgagcagagtgttgcaatatgcagaggatgtactctctggaaaggtgtcggttggccgcttcctggtgaacctggttaaccaagtacccaaaatagttcccgatgacttcgagatcatgctcaacgggctaaaaggcatccgaattcacaatagagtggaggagaaagtcataaacatcatcagtgaccttggggccagttgtagaaaccaggaaatggtggagcagaaggaccaggagaatccaatgaacaagagtaagacttggtacaaaaatagtgaatttattccgaagtgagcttggggaaggggcacaaaacttcttgcctttaaatgtgctgcttcacctctggagcagataacagacacttttacaagaaaaaaatgggggcactcagttcaaatgtccctggtgatgtatgtt

SEQ ID NO: 469202 - DNA, 621 bp, Homo sapiens
gaaaagtaaggatcagacacaccgagccccctgttcactctagcatcccttcggaagggacaaagatcaatcagagtagaggcctgagtttgtaacttacccacagaccacagcatgttgggatggaagaaacctaatgtttccattattcctgatttaacgattgggttttccgtctctgtatctatcccattcccacctcataaaaccgtgaatgccatgggatgggaacctcacctcttcaagataattctcaatttatatgttattaaatgcttgctctttgcaaagcgcaaggcttggaatacgtacagggtggaggagactgcaagaatcagtaaaaaccaagcctctccctgcccctgcagcctgcaccaacacttctctgatagctggcagatgctgatgagtgaaaagagagtcatacagagccagggttgggtaccccggacttcagagggacatgacttaggggatccagagagcttcttggagaagttttttatagaaacaaacgcatgaagatgtaaaagtcttcagtctttaagctagggctacaattccagtcttctgattacaaatctatgggatctccgctatggcataccgtctgtcttggac

SEQ ID NO: 469203 - DNA, 689 bp, Homo sapiens
cacttccttaagtcattagtacatggatactcctgtcaggtgttgagcatcatactaggcaaaatatggaacataaggagagggacaatatggccgctttggctcaggacaacatggcatccatgctacagggactttttaaaaggaagaatgcccagtcatgcttgatatccttcatgggtcggcagattaagccccctttggggacccttcactgcatagtcatgcaagtctccccagtctttctaagcataagcattgacaaggcagggcttgttccatcttcatccttttctccttcctcagcctcatccagagagctgacatcacctttctcagcaacagacaatctccaccaacgagaaagtcattttttgtgtctgtctttaattaattcactcattaatagagatatattgatggtccacatgtgtagagcagttgccccttgttcagctcaccccacaggacagagattattcccaatcatctcccatgggcaaagagtccagccctaccctgtgaggaaggcatgagagggaactgcccaggtgggtgctagaagggtttgaaagtggttattaatggaggacagagcagtgatcacatgggagaggaactaaatgtgctgaggctgctgaaattgaaaacgcctgttaatagcacaagtgacacatcatagatcactc

SEQ ID NO: 469204 - DNA, 1153 bp, Homo sapiens
acactgttggtgggtgttattcacaatagcaaagacatggaatcaacctaaatgccagtcaatgatagattggataaagaaaatgtggaacatagagcaggacgtgtggcttctgagcgagaacatttgtagtgccagtgacgaaagagagaatttgagagatattgagatgttgagaaagagagatgttgagaaaggcaagaagatttttgttcagaagtgtgcccagtgccacaccatggaaaatggaggcaagcacaagactgggcctaatctccatggtctcttcaggtggaagataggtcaggccattggattatcttacatagacaccgataagaacaaaggcatcacctggggagaggatacactgatgaagtattttgagaatcccaggaagtacattcctggaacaaaaatgatcttttccagcattaagaagaaggcagaaagggcagacttgataacttatctcaaaaaagctgctagggagtaataattggccactgccttatattgcaaaacagaaatgtctcatgacttttttatgtgtaccataatttaatagatctcatacaccagagttcagattatgaatgactgtcagaatattttgttgggcagtcctgatttaaaactaagactggcttgtggttaaatgaataagtttggtttttgaatattaatagtaattccaattcagtgaatgctatcactgtttaccccttctaaagatatgattagactttgttaataatgtttaagatggtgagtaccatcttaaaacttattggagattggttttatatttatatttatattggtttatatttagatttatatgactggttatgtgaatatatttaaatactggggaaattccttcactgtctcagaaccaagcaagatgcacctgtgttttgtgtttatttgcctcttaaaggcaagggttgaagataagacaaaagtcaactactgctgaggcacgggcttaataaatgttgactaaaatatccaactcaacgaccaatcctgtgtaattttcaaactgtgtcagtaacttgctgggtccaacctccataccctggccgtgtgacggatgaagaaatgcactcagacacaggtatcccatgaaacagcaggctaggggacc

SEQ ID NO: 469205 - DNA, 789 bp, Homo sapiens
gcgagtatcaggcatagtaatgacagtcttacagtctgagcaccccctgggcttggtggagcagatgctcaggcccccaggatcaaggctgcatttgaacaagatgctggctgttctgcacaaggagtttgagactcgacaaccctcttccagctctaaacttctcagggtcactgtacccctggggcaagggcctcagtcttggagccctcgagcttcccccgggagcctttgcacctggaagccttgctgtcatgtcaccagccatgagccaggaggcgtggggtccagtgggggcttggcagggtcccgggggccccaaggcctctcatccccagccctgcatgagaagctgccccgggaaccagggcctcctcccctcacacctcccttctgggccttggcccaccctgcgctgtgtgtccatcaacaaacccctggagcagcaggtaatgcccaggacaccctctccactccacttccacccatgggttcctcttcctaaactgatgcctctcaaattccgcgtggccaatactttgcatgttgttctctggccttgctcgcgtggccaatactttgcatgttgttctctggccttgttctcattctaaacacctgaaaaactccctcttcctgcctctctcccgcatccacattccacaccccaagggctaggtcagtcccagccccgccttgaaggtatccctaagggctctggcctgagcaccatctcactggcctgggggtcctccctctgttctagtttgtccggagtgtttggcactc

SEQ ID NO: 469206 - DNA, 568 bp, Homo sapiens
gggcttgggagatgaaatatttgcgtagtggtcaagaaggactatttaccgacaccggttttcctccccacccagtacgtcttgtcctcattttacccatctcctattcaagatggagttgttctggttcacacgcctctaacaatgtggcaacaggaagtgagaacttgagtgtttacgttttagtggtcatggttttgctgtgtgtttgtgtgtctcagaatagggacattgtcttcaacttctttgtatttccaaagtgtgcaaagcaggccctggacaaaggacctgtcactgatgctgaattcctgactcaaggaccgcccagagtggacaaaactgttcacataaagccaggacaaactcacttggacattgatcgaaggcgtataaacagtgggcaaggtctttcgggtcagagctctatggatgactcattgtctctagaagaatgtcaggtccagaaggatgcccttggcctgtaaatgctttaaagcaccactggcaattcaaaaccttgcccccttgattttactggcttaaatcttgttttgaagtcttagatact

SEQ ID NO: 469207 - DNA, 1820 bp, Homo sapiens
acccccagcacacgggctcccccaccagcacacggatctccccagcacacgggttccctccccagcacacgggttccgccagcacatgggtccccccagcacccaggttctccccagcacacgggttccctccccagcacacgggttctctccccagcacgtggattcccccagtacatggataccaccagcacatggatccccccagcacataggtccccccagcacacaggttctccccagcacacgggttccctccccggcacacggcttccctccccagcacacggatctccccagcacacgggtctccccagtacatggatccccccagcacgtaggtccctccagcacacaggtccctccagcacacggctcccccccagcacacggatccccccagcacacggataccaccagcacacgggttccccctcccccagcacacagatctccctagtatacgggtccctccagcacacgggtccccctagcacacggatccccatagcacacgggtgctcccagcacatggatccctccggcagaggtgagctgctgctcaaggcccatgagacagaccccatgagacatggagatggtgcctgtcttccagagagaaggggcaatggctctgagctcggccttcactccgtgctcctgggagactctaaccaggctgagtccctcctgagcaatgaccacaaacctctgaagaaggaagaagagtgggacccgggccccagagaccctggtgggagtgccgtggtgtggcctccaggtgtttggaggatttcaaaggcacagatcctcccagccctggttggtggagtccaggtcgtatcttcccttctgtggccaggcagagtggccggtgccctcgtcctcttacatgcccttattagaagcacagactcttctccacagtgtgcaggggtcttccatcctcccacttcacagagctggatctttcgagcctcattgtcgaaacaggacagagaggatgggtgtggtgggtggacgcacagctgagaccctgctcacacagctgagaccctgcacacacgcacagctgagaccttgctcacacagctgagaccctgcatgcacgcacagctgagaccctgcacgtgcgcacagccgagaccctgcatgcatagccaagaccctgcacgcacagcagagaccctgcacgcacagcagagaccctgcacacatgcacagctgagaccctgctcacacagctgagaccctgcatacacagtcgagaccctgcacacacgcacagctgagaccctgctcacacagctgagaccctgcatgcacgcacagctgagaccctgcacgcacgcacagccgagaccctgcacgccctcccagctcagtctacgttggctgttttcttgggatgtcattgtggaaggtcctgcctggggcatggcggcttgggaatctgagcctcggactttcaatgccacgttccagttgctgccatgtgtttcctcccctaaaggaatcctgcagataaaatggattatgtttgtcctggacacgtacgagtgcatacatacctgcggctttgggcacgccgtccttgccaacgtgctcttcttgggtggtttaaaggctgatgtgctctccagggcttgtgagtcttcctgggcgcccctacccagtcaggatggctgcagacgcatcttcatgcgcattccagcagcgtctctgccaggggtgctgaaagtcactgtctgaagcagctgggagatggaagtgattctgactttggggcacccaccctctggaaaatgtggcacatcatt

SEQ ID NO: 469208 - DNA, 717 bp, Homo sapiens
gaagtccaagagaggtgaagaggggagaagcaggagacacggatgctgtggcatagaagaacatggactgctagtgaatcactcacagaaggtgactcacagagactgggtcaacatctcagaggacacagaggtgtgccctgcacacgccacaatgtgtgcacagtgtgggggtacagtgaatgtccgcagcggggggctgggtttcatcttcagctttgtggatgatgaattcttgattgggaaacccagcatctccctgatgccgactactctgaagataaaacatccacagggcacagcaaggttagtgcatcccctgggacgggaggcagtcaagggcaggcaccgagcccatgaaagcctcgacagaggcagctctgctcccctacgagctccagcaggaagcccgcaaggacccattttccccatgttcacggagctggactggaagcccaagctggtccagccggcacgggcagtcagaggttggaagctgggggggcctcccacatttctgctggatgctggggcccagagcactgcgcttccttgtcaatcaacatgttgtgataaggggaatattgggggtgcatctatcacctcagggggagaagcatgagtttaatggtggaggaaaggttgaccttagtgtatgacaaattgtttgtttgtttttttcaattgtttgagagacctagattttctttaatgttc

SEQ ID NO: 469209 - DNA, 943 bp, Homo sapiens
caaattccaaagaacagacttaaacatgagctgcgggacacaacccatgtgtgtcatgtgatgacagtgggcctcctggaccatccagaacgaccccccaccccagcatcctggccatcatcgcaccagcatggtgcctttgccatgtgggtgcacagattcagaatctccaaggatccaggccgtgacattagcaagcaggtctgggcccgaacgtcagccaggcagaatggtgtcatcaccaaacaaggacctggggtgtttcaccagctccagcgtcctggctggactctcccttctgacattgccactccctctactcctgaggaaaagccagtgccgtccttcctagaatctccttcctcgtttggttccaggcaagagtccaccaaggaggtgctggagaacccactcttacagagaaagaaaggtgggtgtcattgtctggaggtgaagacgatggccgcagaatttcagggctacatggaggtgcgtgtaaaagggaaaagcaatgtttcagaaggaatggaaggggaagaattcaagcctgcaaaggaggcactcattaatgagagagtgtccagaacaacatctagcgccagtcccagaagaaacccacaggagcacaaagatcttcagcctccgaagggtgggccagccccttctgtgggtcttgaccccaagtgctctgagaaggagagacttaaatgtttggtgcctaaactcaatgtagcatctgaaggagccatattagcataaggtgttctagaagatatggctaagcctaatgctgggttaaggtttaccttttcctaaatgtatcccccttgaatttgaatatcgatgtgtctgaattttttctcttcatttttgtagttctgtaataatttgagtctttttcctgaaaattagcttctgagcctgttttcatcctcaccaatgt

SEQ ID NO: 469210 - DNA, 1273 bp, Homo sapiens
attatttccggtcaaagtcactttgtcaagtcggtaggcgacctaatgttacctggacctttatctccggtaaaaagcgaactcagtcgcagggtggagagaacctcgggctccatgctctttggaaacgagtgcctgggggcagctctgagagagtctgctgaattcttacaattcctgggcgtctcttctgcaaatcctatttgaacacagccttttctgagcagcacctctgccgcctctcccaaaacggcatacagaacatgtgcctgcacttgcatgccgtctgcacacacagagcaccagaccctccaacagctcaggggcctcgcatccaatgctcaacacattccacgctcactgggacgttccaggtcaatgttccctgtttttcctgactctctgcagcatcatagccagggctccttggctgttatttcttcctgcaatgcagcctccgagctcactgcaggaatctttgagaaatcgcagctctttgccccagcacctgactatcggtttgatatcagagctactctgaagccaatcatgctacagcagctagatggagccctttcctctttaattaacagaaaaccattttatgaattaattaacaagttggagaagtcagccaacagtgcaagatctgtattggaattactcatcaaacacatcttctcaggaacaaggcagatgatgagagaggacggagtggaagggatgtagaccagtgcagtctcatagctgatctgtcaggaagagcctctcagtaggtcagtgtacaagaaaagggatgcatggtaaaaagaaaaaaaaaagtactgaagcgtgtgatatgaccaattgcattacacaggacgatgccttgaacaaataccttggaatgagtcaggcagagtggggatatttgcttgataaaccctggggctagttattgcaccaagtggacttttctctaagtggttaagtcaaacttgcctgggtttttccccccagggtatttcagcattcaggagaaagaggctgttggaaaatttaaactccagtaacaggttgcaaacacaaactttgctgtttgtttttaaagggaggtgtacagatataaatcttgtctccactcacccgtaagattcttggagactgacatattccttttctctgtaaatttaacttaatgctgtgtctcaggcaatatatacatttttttttataatgggcagaaggttttgcattaagaggaagttcgcattgaagtttataacctgatgtt

SEQ ID NO: 469211 - DNA, 742 bp, Homo sapiens
actgcctttctcaaaaaactggtggggagggggtgctgcgggcatcccgggatgctgtgagacatcctacagtgccagggacggcgccaccccaaagagcttcctgccgactcagaatgtccgcgggtcccaggctggaaaacacgctgcaggcatttcgtcttcaaaggagacaaggtcttccttcatccccagacagtcgtctatttgtgtctattttaattcaggatgaaaacccgactgctgaggccctgtctcgccagatctttacaggcaaaagggaacaggaacgatccctgcaaggacttttatgcaataggtcctctggccggcagcgcccccaggttctgaacactgaacacatggcgtccccacaccactggacatgtaactgggaggacgagccagggttgggagcaaaggagagtggcaggaggtggggggctctcttccaatgtgtcactgcccccaggaggggtgtgggctgcgagaatgacccatgctctggggcaatgttattcgacgccatttttctcctttgaaaagtattttattctccttataggtacccatgatttcttacaatattacttaactccctggctaccagctgcatgtgcagacatcctttacttttcagatgtaatagctgagcgtgaataagatttcctgaagaaagtataatattttgaaattatattctaaagattaatgtgatagattgttcccctctatggaatgt

SEQ ID NO: 469212 - DNA, 1578 bp, Homo sapiens
cccgctgagccctcctcctgccttgtttgcaaaatctccccagacaacagctgcttcttaagcctaatgaccaaaggtggaaagcagccagacaaaaatcaaagaagtccaaagcagcccctccagcactttggaggaagccagcctgtgatctgggacgctgctgaaagcacagcaaccaaaagggaaatgagaacattatcaaccggcatgcactctggagctccaggcaaccacgtgcttctccttggagaagagcatggagcaggtgtggcaatgctaaagtcaaacctgctgttggttattgacggtgcccatggagggagcaggggctccttctccgaggacagctttgaagccccttcttctggccttcagcacctacctgactcccattttccttccacctacctttgggctataccttgctctcaaatacataataagaatatgaaaaatagtgattgtggtgctgtgttggtgggggaggcagctgtgcagtgtttgtcacttcaaaacaccgctcatctacaggacaggattggctgccacgtttcctgtcctcggaggagggagcaggggagtagaggagagaacaaggtctccttatcgctgttggtctggcagtttgctttgttccgtgcaggaaagaaagcgtggggaagatctcattttggtttctcagattagcactctatggatagaatttcttttcctaggtatgtgtgataagtgttattctttgccttcttttgctctgtcttggaaggctgtttcagagactgctagctagaattcattcctgatgacatgtatcctggtagattttctgaaaatcccattttctgttataaatgcctttcattagacatatacttaaacatcgttcattgtcaaatagttatcaaatgacatcagttccatgaaatggttacttgaaaaccaatgtaaaataatttgttgtacaatgaataccttgatcaggaaatcactcatcgtagttggtattaaataaatgtgagtgggtttactgacaggaaacgggaaagaaagaaggagggaagaaaggaaggaaggtgggaaggaggaaaaaggggaaggagggaaggaagaaaggagggagggatgaagagaaggaggaagaaagaggaaggaaggatggaaggaaggaaggagggaaggaaggaggaaaggagggagggaggggaaaagggcaggccaagtaaaggactttggcattagtaataaaaagtatgtaatgacaaaaagtaagggaataaaacccaaataaatgttaggcactgaaaacctagagaggtgaaggaaggatgctgtgagagaaaaagccttaaggaattattaaattcagaaaaatacagctgtatcatggaaggtcacaaaaaaaagaatatattatttattccccactgtgcacttagattgttataatcaagtctgaatttatttaaaggaaagaaaaccttgaggtttctgtgaaatcatgtaattctgaggaaatgatacaagaaatctttcatctttgaaaggaactaagtgggaagtgaattaaactttttt

SEQ ID NO: 469213 - DNA, 1069 bp, Homo sapiens
cagacctgggttatagatcaatgaatcctggtaagcgggtgttcgctggagcacccaagcaggactcctggccagtgtgtatgtgtccggtgccatgctggccagcctccagaccagatgctcaggacctgctctgaagaggttgcgaagtgatatggctgtttttcaaaaccagagtcagacggctattacgctgctcttgcagttgtgggtggatcagcctccactcagagaaacagaaacaggcttccctgaggtcatgcgacacatcctttgggacttggagaaggatatttatcctcacagtggggaaggcacagaaaacttgcagagagcccgcctggcccaggccttggcctcacctgtggccacccctgctttgcaccactgcctcctcaagggacaggtcccacgtgacagcgtggctggtatggtccctgtagaagtgcgagagaaagcaaggacacagcctactagcctgagaatgccaaaacagcttctgagtagagttgccccggagcccaagcctggggtgtggcatgtccctaagcatctcatgcatttcacgcttgtggccgtatgggtgtcctctggggctctttgcagagacctgcgtgcacctccccgggaagcagcccagggagtgccttgccacactgaggccaccgtgtgtgacaccgttgagtctcacatggagacattcattgtccacacaggagaggagcagggtgattacatcccagttccaacttgcggcccactccaggtgtcccaggagctccctggctctacccgaggcccccaggaaaccaggagtcaggctgcgggtgctcagcagcaaggactgcgaggcaagagttgcgccctgagtctgctccctggggaagcctgagtccaagtgagagaggggttggagggagaagcctgggggttgccccagcttgggaatttccaacactcctcacaaagacaatagtgagaagcaaacatgaaaatgtactaggaaaattatgatcagaaaagcatttggagacattaattgaaaaattgagtctttgaataactactt

SEQ ID NO: 469214 - DNA, 678 bp, Homo sapiens
catctgcctctcaagttctcctggccagcactgtgctaggttttatggttactacaaagatgaatgacagttgttccctccgtgttcacacctacactcttgcctcgcagtccttgctgctgagcacccgcagcctgactcctggtttcctgggggcctcgggtagagccagggagctcctgggacacctggaatctgttttggggggagatcccgctaagacaatagcgagagaaccagacagcctcacagccaatgcactctcctccaccgcccttgctgctacctccgaacaccatttcctaacttcaagtttgtttgatgctcttgtggcctgctgtgctctcctcctctgtcatctaaattttaccctctttcaaggaccagctgaaatttcccatccccgataaatccattcctggtttccccaacaccaggggaacttgctcttctctgtcattttgttgctctgagggaatcctagtgtacatcgtttagttacctgcttaataggcaggacactttgctcccaaatcactgtaaaagcttttataggctgcattcttgtcttagatttttttgtagcttccagagacctcagcatctagttttgttctattttcatttgggaagaaagttctgctgacaatagttaacacatttattcattccccagac

SEQ ID NO: 469215 - DNA, 722 bp, Homo sapiens
gcagcagtgtggaagattctgtgaggctgcaactcccctcatgccgacagcacctcggcttgaaagtttaccactcatctcttgctctttccctgggatttttgacactgaagatgtaaagaaaagccttctcagtgctcccgagtccttatgctgcatgaaagtgggaggggttcacccaccgtgggcagctctcaggcggtggagggtgagagtgatggacacagacatccgccttttccatgtgaccagccagttcctgtggcagaatggatacggcctctcagaaggtccccacgggctcaggcaccagctgctcatggtgcggccacttggatgtcctctctgggtggacgttctccctcttctgctttgcgccctccatcctctcattcctgcctcctgggaacagataccacataaacgagaactagctttgccaactgtcaacaaaattatactgggaaagccagaaggctgccatgcaagtcttcaaagaaccctgattccctacagcctcagagcagactgtgctgaaaattaggcaccaggtttaattgaactacaaagcagattgaatatgcagcagggacacagctgtcctacaccgaattcaaggccatggggacatttggcaatatctggagacatttttgattctcacctggggccttggggatggggtgctactggtacctgttgtagaaataagagatgctgct

SEQ ID NO: 469216 - DNA, 595 bp, Homo sapiens
gagggaaaagtacaaggtgtgctcacccctgaatgagtccccggggcaacccggatccacctgtccaggctcctctgagcacgtggggagcacgtggagagggagtgggggagtcgtgggggagcgtgggcagcgcttgggggagccgttggggacttggggagagcgtggagagccgtggggagggcgtggcggagctgtcggggagccgtgggggcgcgcgtggtcagcacttggggagcgcattgagagccgtggggagcactgagggaggatgcggtggccacggctgcgtggcacccccaggccatggccaggagaccctcgggcggcgcaggtgccggaagcagcgccatccgtgctatggacgggtccccccaattggcagcggtctcgggggaggccactggatatacagctctgggaacaaaaaacggaatcatcagcctatttacaactctggaatggatgagatggctgtgacgactggcagcagctgcgcctgagccctcagcacctgcagggtcccatgggagtataaaaatatggaacagccagcttcctagagtgagggcaccattctgtgtttgctgcc

SEQ ID NO: 469217 - DNA, 803 bp, Homo sapiens
tcccagaaaggactcgggtttgagtcccgcggcagtaagtgctggagatgatctcagtgagtctccactccaactctggcacagcccactgtggcaggtcttaagcttcagagaggtttaggagttggcctagtcgcagacagcaggtgggcaagatgggcatgactgcagaggttcttgccctgtcctcctatcgctgtggtcttagacctgcaggctctcgagaaggctccttttatacatctgctgtttacctcccgcagatgcttggagctccattggtcacttgccccatccctgctggagcagacctagaaattgtttgccagtgggggcagaatgagggaggggctttgaaactcagttgctacaagttagcgtttttccccatcgatgggcttgactatgaccagggaatcatacagctttggaacagaaaagaatcatctagttgtggtcaaatgtcacactttttgggagaaaaacctagagagccagtgactctggacggcacttcctcacttgaaagcatcacatcacaatcatttcggcctaaaacttattactcatctgtgttagctagagattgtagctgcgtaaatgtggcttatttcatccagaacagaaacattaaaacgattcgactcctgcaggacatcttaatagtgtgtgaaaggaagaattcatatttccagaactctgtacctgttacagctcaggcggtctatgctttcataaacatagtgacatattttatgcattgatcttaaaaccctattacaaattctattccatattttctt

SEQ ID NO: 469218 - DNA, 1458 bp, Homo sapiens
gctgccagcatccacacgcacctcctccgtagccatggtaatatttcccacatgccacaagtccctttcagtttctcatggcccatatgagatagtaacggtactcacttccccagactattgcgatgatggcacgcgatggggagcccggtcctcattgcactggggctctgacaccatgacccagccatgtggaccgccaccgtcccctaccaatgcccagctcgggctcttgcaaacctcccccaatcccatccttgctcactatgttcctctgtggtcccttccatcgactctaccacaccgagctattgcgggaagccccatggcttctttcttactgttcctcttcacccactgggtggctggtgatgatcccccgaggcaggggaaggcagtagtgtcagctcttactccagggtggtcagggcccttagtgtcctcatttcgtgcctgaaatctctagaggtgttcatcttgcatgtttgggattatatatatgtgtgcatgtatgtgtgtctatatatttacatctaatatgtatatgtgatttttaaaacttattttttattaaagttttgaccagtttggaagcccagaactataacgtgctacaggttatgagtatgtagaaaccatggaatacactctacatttgcatatatttcctatatttgtaccaaaaaaaccttaattacttacctgtattgcatgaaatttagagcaactgctccttccactcctcaaatatactgtgtacaataagagaatagtcagtaggctcaagattaccatgcccatttcagaaccagtaaggttgtggtttgatatctaaatggactgattaccttaaaaaataaaaaaaacaacgatttccatttattatatttttctccattttctctggaacctgactctttttaatatgcccttactgaacaggtaaacactagatatgctttgtagattgatctcctgagacaaggacatgatgtttcggagacgtggctgttgttattgtaaagcagttacgagaaatcacacgagcttgctggggaaagctgatatgtttatctgcagcagcattcatcagggacagataccagatccacatgtaattattttccctgaacattggcgagacattaccaaaatcagaattgagttggtgtgagttagtttggagactgatttcagttagtttgatacagatacacacagagagacagattttttatttttaaatgatattttaaaatcacagctggagcctatgggctccggtcccagagcaccacatcctcctccatggcagaactgctgtgtttgttctattaagatttgcttttaggatttccgaatttgtagtttacaagagtccatctaggaagatgaacaggttttataattcagtttatcctggtaagcacacatatatcattatgtgtggagcatatc

SEQ ID NO: 469219 - DNA, 540 bp, Homo sapiens
tgatttcagacttccagcctctggaactgcagtgttctgtttgatggatcagctgcaggtcacacatccatttccgtttagtggtgcagacggcctgcgtagttccgtgtctgtgggtctactctctggcactgctctgttaagtaacacagaaaaaggcccatccatctttaggggcagcagggagaacaaatgggtgcaatgggaagtggggtcccggagctcagaggcaataagagcagctgacgtgcatggggctgaggttccaggtagagctggattttactccaaaggtggacacctatggtcccagacctcagaaaaggccatcaaagtccacttgttcaaggtagatggcagccatgcaggatggaaggcagtgccggcatcggtgaggctgcttgggcgtcttctacagtcgcagtacggcaattggcttcctccagaatgagacccaagagaacaagaggcaggccttgaaactcatgtcatcatttctgtcctgccctgtttgttagaagtgaggctcaatggacctca

SEQ ID NO: 469220 - DNA, 897 bp, Homo sapiens
gagtcctatctggaaacgtaacaccctgcagctccatgctttctgaaaagctaaatgtcttgtattgtgataggtcagtttagagtcgtattccaaaccctgaacgtcaggggctgcaaagacaacatttcccggtccacaagcctcctcccctacgttggtttggttagcgttgctatagtaacctctagcctgttttatgacatgctggtgattaccgagcccatgatagtgaagaaaatatcaggttacaagggcagatgccactgtaaaacatcctgtgtgacgaacatccaatttcccagcagagagtgtggtttctgccactcgggaaggtggggtggagaaacatcacgtcacaaacaacaccgggcagtggttatcacacttgagcgtgcatgggaatcacctggagtacttgttgaaccacagattgctcagctccggcctttcagagtttctgattctgtaggcctgggtctggacctgaatacctgcattcctaacaagttcttgagttgtgctaatgctgctatccagggactagacgttgagaaccacttcactatgcatcaccggaaagaggaattatccacaattgcagaatctgtggatcttttctacaatgcccatgacctgtccactgaggccctgagttatcactgcccacgtcatagcaagaactggcagagacatttggttttcttgccatggttcccactcttgtccctggttcatcttttagcctacagcaccagctttgaggctaggagaaacattctaaaggaaaatgatacagcctcatctgtgctgtttgctgaatcttcctattctccccacatctgagtacctggaaggatcacaattcctgattcccatcatggagcagtgccatgc

SEQ ID NO: 469221 - DNA, 651 bp, Homo sapiens
aaaaagtcacactagctcaccagcaatggatccaaaccaagaagagatctctggtttacctgaaaaagaattcaggagcaaatggtactgggataattggctagctacatgtaggagaatgaaactgaatcctcgtctctcacctcatacaaaaatcaactccagatggattaaggacttaaatctaagaggtgaaactacaaaaattctagaagataacattggacaaccccttctagacattggcctaggcaaggatttcatgaccaataaccccaaagcaaatgcaataaaaacaaatataactagttgggacttaattaaactaaagagcttttgcacagcaaaaggaacagtcagcagagtttttgttcccaagggaggaatgctttcatccaagcccacatttactggttccattaaatgggaaggtggatgtggacaagtggacaaggcttgcactatctgggttatttatcatcagctttgtcaagctgggaactttggccctcagaatccctttcctcgcatggccctgcactagagttggccataagtggacttggcaagattgggaggcaaagtgaagccacagatgttgctctgtgtctaaagtgacctaaattatcattcataaacgtcatctccctc

SEQ ID NO: 469222 - DNA, 716 bp, Homo sapiens
aggaggagttaagtcacgtcttacatggatggcagcaggcagagagagagcttgtgcagggaaactcctctttataaaaccatcagatctcatgagacttattcactatcatgagaacagcacaggaaagacctgcccccaggaggagcaaatcatgtcttacatggttggcagcaggcaaagagagagggcttgtgcagggaaattcccccttataaaaccatcaaatcttccagccacacctggctgctgcaaggttgctgcagacctgcatagtggagtcttcttctccaagagtgctgactttcttcctgctgctccattttgtgggtctaaaggacctcaaacccttgcccagtcttcccagcagctgcagaggacagctgcagaggaaaaatacatgggaaagacctgtccccttgattcaattacctcccactgggtccttcccacaacacataggaattatgagagctacaattcaagatgacattttgacggcgggggacacagccaaagcatatcaaacaaccagacgctcacagtgctaaagaaattactttgtcttcagtagcttgctgacatcattaatattatagatttgcatatgctgtttactttgtaattatgaaaatatatttgtgagggaatgggatatagaatattttttactcaatgaaattttggtacataacctgaaattattaaatgtacaa

SEQ ID NO: 469223 - DNA, 2112 bp, Homo sapiens
caggaaaacaaaggaagatttatagagtgcccataaattccaggaattaatctcttaagattctaagacagcatctgaaacgggactcagtttctgactctcacaacgccgttggcagaaacccagaggaagggaaaggagcgggcctggaggagtgaggggctgcccgccctcctgagcggttgcgggaccacctgaggccctcggcggggctgttcaccatcgtctggccatggccaggctgctgtggcctctcctcctctgtgtgcttctgtctaaaggcgctgtgtcttcttctcgcgcgatgcggaagggcagcctgtggcggtgccgagcatgaaggactgcggcccgctgagctcacttcaccgcaaccgccgcctctcaggcaccgcatccgcagcaccaccctggtctgtccacactcccactaagccacagcttcgatctcccaaggagacctcaagacaagttgctgtctccatccatcctctcacatccccagtcattcgctcccattccactgggtccgccctctctccgcctccctacctgcagacctgggctctgtcaagactggttcatcaacttgtggtccttccacatcctaaacatctcgaaagtttatgtcgttttcttcagctcaatgaagttttctctctacaacttcaactaaatcttcctcaattactctcatcaatattcaacgtctccctggccatcgggatctgctctcccccaggctgaacctgctgaactcacatgctccctcagtgctgcacttctgcacctgcttgtgtgtacacccctttcgggctcattttaagtggtcttaaagactcaactccatgtcagctactgcaagatgtcctataaagctctacccataaacccacactgactggtctagatgcttcctttctgggctccttctactttatcactccaaatggtcatttttctgttttctctggctttgaagataggggcttttttgtgcattccatatttttatccccaaagtgtcccacactttgggacactttagtgtccagacattcacaaactattgctgcatgaataaaaaaaaaggaaggaagggaaggaaggagaaatgagaagaggtgggagaaaaaattttaataattacttaaatattatttcttaacataattaatatacaatgtttacttatatgtatacttaataaagtgagtaaacttaagtattatttaatatgattctaataatgattcacggatgtgatgatgctagtgaccatccccttaaacaaatacatatacacgagtgatgtatggcatacagcctgtttcattagctgtcaagtgaagggcatcattactcttcctgtaacctaagctagaccttcagaagttatcttcaattttcacctttgttaagccccatatttataattgttatatttttagattcaaaatatattttttcacaactagcccttcagttcattaaaattaccactgttttaacttcagctaccatcgtaaactaaactctacttagctgctaaaagtgtttcttaaagaggagtgatgttaccttcctcaagggcatctggcagtgtctggagaggtttttgttctcatgatggggaacggggtgctcctcctgcattcagtgaatagagactaggtatgctgataatattctataaatcactggtcagtctacgacgatggtgaattatcaggccacaaatatcaaatgccaagttgagaagctctgtgcacagcaatccagctcagaagtcagcattttctctaaagagccagatagcaactgcttcaggctttgtgggcctacagtctgtattgcaacactcaactctgctttgaaaatgatatgaaaacaaatgggtatggacgtgtaacaatgaaactttatttaaaaaacaggctgctgagtggatttggcccgtcagctgaagtttgccaacccctgatctagcttaaagaaaaatacaatcacgttattagcattgcaggaaatgttcaatgcctattagttacagcataaagtccaagttttataccctaaaatacaaaggttctacctttctctcattttctc

SEQ ID NO: 469224 - DNA, 629 bp, Homo sapiens
ctgggcagagaacagactatgacacactgaccgtggtctgtgccccaaggtatattttcaaaggtagaaagaccttgtacaatgattgtagatcccactagtgaaaatgtcgtgatcaatcatttgttccagtcgaaattgtcacaaacaggatccctcgtatctgcctatccttcctttaaattccgaggacataagtctgccctgctcagtaagaaaatgacagcttcttcaattattggagaaaacaagaattatctagaacttagtaagttattaaaaaagaaaggaacttctacatttcttcaaagattggaacgaggagatccagtcaccatagcatcacaactcaggaaatcactaatggatattattggaaaacttcagaagtgcactccacacttcattcattgcatcaggcccaataactcaaagctgccagatacttttgataatttttacgtgtctgctcagctacaatatattggggtcctggagatggtgaagatcttccgatatggataccctgttcgcctttccttctcggatttcctgtcaaggtaaattcttctgctcttaaaatcgtcgttctcgctgctgttcagtgcagtgtactgacactgacacta

SEQ ID NO: 469225 - DNA, 697 bp, Homo sapiens
tctttgctctgcgtttcacagtcacatcttccaacagatgccgatgcgcttgccttctggggcttttctcctttctctacaaggagagagggatgggagcagcttccatgaaagagaggaagctgggccacagggagagatgggcagagatgatgggaccagcctggagcttaaaatgcctaaaagtaaaataatgagcaaagatatgacagcttcactcactgaaatatcagcagttctgggtgtgtgtttctggctgtgtttatgctggacacaaggctcggggatgagttcaggctgcggtcagccccttaaccgttgtccagggccttctgtgcaagacacagccaccctgtctgtctccaccccccggctctcccaactagacgtttccaagaaacaaataattggccatacgatcattcactatgtgacaataaacaagttggttaaatggatgagttaattagaaatagcacatagtcaacagttgttgttacagacttattttcaataaatttaacttgtaatgaaaaccatttcttgtccaaagcacaagtcgaattttatacaattgtaacacatattcatctggtttgccactgtttcttctgtaagaacgaagataactgtattgctggagaaggtgtgcttttttcatactgattgataaaattttaatttagaaacttagtct

SEQ ID NO: 469226 - DNA, 576 bp, Homo sapiens
cagcagcagctgtttcattagtggcaataacagcaaaagtgcattcattgcctccgttcctaagattgtcaactgccatgcctggacatctgtttgaaatgacactagacctaaatggcatgtccagctctcactttgtagctgtgctgaagatggatggctactccaatatgaaaggaagaaaacagtacctgctcaatggtccaaggatgctcctaacctacctgacgccttctcctcattacagttcacgaggtgtgggtttgcctgatgcatcaggagaagtttcaccagatttgtctgaaatattaaagataattgaaatgggaaccaccatggcagaagctaggatacatcagactcagctgacatattgggaaacttatcttgcaactcatgcttatggatcgtgtgaccttgcggttgcacagcaagaaaaacagcttacagaacttacaaaatatgtgggggagagatatggttaatgctgcacagaccttacagagaagcagttaatattttttcttaactcttacttggggtgggtggggggcgctacttcatgcccattctagc

SEQ ID NO: 469227 - DNA, 738 bp, Homo sapiens
ggcataagacatcagagcactgccgcatctctgtattttgggaagggtcaagcttgtcctgcatgctacagcttgttcttcatgctacagcttgtctttcatgctactgcttgtcctgcatgctacagcttgtcctgcatgctacagcttgtcttgcatgctacagcttgtcctgcatgctacagtttgttctgcatgctacaacttgtcctgcatgctacagcttgtcctgcatgctacagtttgttctgcatgctacaacttgtcctgcatgctacagcttaggtaaaacccaggaaaatgtggggccccctaagactgtggcccccagggtttcctcactccatactagtctgcactcagcctctggcaagtcaacacattgccatttaaatattcctaccagtatagggctcctgtgcttccgctccagaccatcttcatcccctcagattctagagttgataggctttttcttacaaacttagttctctgataggtccaagaaacatcaccgattttcaatcagttcagatttgttcttgttgttaagacaggagtgacaattagaagctgatttgaaattagaaatcttacagatttatttttttcagtgacactttattgcttgtcttctaaaatctaatattatggttctaatcactgttaatattaagtaagcatttttaccaaagatagaataattttccactatagattctagtgatggtaaggttt

SEQ ID NO: 469228 - DNA, 613 bp, Homo sapiens
gccagagagaagatcatgaaaagcaaaaataagtatgttcaagataacactacagtgaatatgatccttcaatgtgacatggtggcagagaagagggatgacattttggggatcttatgtggagtaagtgatatcattaatgcttcctctgttgatggtgttctaagtggagagaaggatgtcatcatggtccccaagtcttccatgacagagaagagtgaccagtgtgctcggtatgataatgccttcattgcagaaattctgattgacagaggagtcaacgtcaaccaccaggatgaagacttctggacgcccatgcacattgcctgtgcctgcgataaccctgatattgtcctgcttcttgtattatctctactgagtctagatcgtggtatctcacatgatactcacaattaaatattgcaggaacagccctgaattgatgaaccaaattatgacaaagaaaagaagagtcagatctgagttacatttcaagcaaaatagctcataaaataacagtgtagtgactcaggtgcagtatctataagtacatgaaatgactccccttcagcatctaggagactggtatcacaggtagcatatgataaggttc

SEQ ID NO: 469229 - DNA, 886 bp, Homo sapiens
gtccaggtgggtgggcagggttactgctgattcttgatgcccacactcgcattctctctttccctcaaagtcgctgatcgtctataattagagctcagtgctgatgaagcatcaggctctgtaatgtgggacgcccaaaagggcaagccagggagggctgctcctttagatcacgttgagcagagacccacagcaagtcagcaagcgagccgtgtacatctgagaggcatgtgctgggtggaaacccggcaagagcacacggagcaggagcacgggccagcgctgaaggagcagcaaggtggccggtgtcagcagagcagagcgcagagggaaagtgactggagaagttgcaacggctgtgggctggggcttgagacagatcatggtgtggccataagcaggactttggcttttacttatgagagaaggaaagctgttggagcatttcagatacagaagagccgaagcactgaaaacaacagagaggagaatggagttacagagagtccttcttccacgtgtggaaccaaatgtgtaggctttcgttaatatctaaaatgcaaacagctgtgaaaaccaaagactacggcttctgtgccatctgaccctatttattatgatgattggtggtgtttcttgtcatcttcaaacttattccatggacagatgtaaagtgacagtattataacatcataaacttgatggcatatttccttagctcttgatgtagaagtagtaaatccaggatgcatgcaatataaatacatgcttcccttcttattttctctctatataatgctctgacaatttatgttatgtaagtttaaaatgctcttttttatgccaaattttagaaataaacagtttcaaaaaatgactcactttt

SEQ ID NO: 469230 - DNA, 609 bp, Homo sapiens
cccaagaccgttcccaggacagcggcatcctcctcatctgagaacttgttagaaatgtaaatgatcaggccccatcacagacctgctaaatcagaaactggaggtctatggcacagtgctaaacagaaaaatgcctgtcccattccaaatgcctcaatcatctctgttgagaaacatgatgaatatgatctaatagggaccttgccgttccttgaatacagtggttcattttctgcctattgtgagcagtgcaatgtcagagataacaagaggcccaggcagagttggctatgggaggatcccacacctggcaggagtggagccgccttgatgagcatccctgtcatactcagtcgagtgggctgggagcagctggtgatgtgtggtcaatgtgtgattcgcacagcagctggggcctgggccactcagactttttgctacaggagatttaagtaggcctttccatgtgcagtgcaatcctttttgtcatattttaaaaatactttaaagatatcacacgtattaaaatatctaagtattttaaagacaaaggcctgtaatatttacactgagaactgagatccagattgtgctcttatttgcatgtaa

SEQ ID NO: 469231 - DNA, 2341 bp, Homo sapiens
ctggaacttcctggttctaagtggtgatggcgaagtttctggagcacgcttcgtgggcacggagtgaggttgcaggttctactcccgggcagctgcagtggctgccagtggtgatggtgaagtctctggagcacccttcgtgggcatggggtgaggctgcgggttctactcctgggcggccgcagtggctgccagtggtgatggtgacgtttctggagcccccttcctgggcacggggtgaggctgcaggttctactcctgggcggccacggtggctgccagtggtgatggtgacgtttctggagcgcccttcgtgggcacggggtaaggctgcaggttctactcctgggtggccgcagtggctgccagtggtgatggtgacgtttctggagaccccttcgtgggcacagggtgaggctgcagaggttctactcctgggcggccgcagtggctgccagtggtgatggtgagatttctggagcgcccttcaagggcacggggtgaggctgcaggttctactgggtggccgctgcacccttgagttgcttcctcattggatgagaggcatggtcttccatagttttcttcaaactgttgatgcaggtcagtgctttgcaactgaaaggtcaagtttgtgctgatataccacctccctgtttcattttcaaggtcttttactgtcagcaagaaggaattataaaagtacctgtagcagagtgcttcagacaagcagaaagtgcacacacacaccaatcccaaaatttcatcaggtcactttcactggctgaaaaatcgttcctgctcacatttgatatttgtatagaaaacatagaagacttagaacaattctcttgactcccaaccctacaaaagagagagcgatcacaagagctccgagctgggaataaaacctgcacaagctcagctctgcatcgcccctcagttggggctgagctccctcctgggagcctcccgagcacatctcaggaaggtgcgggactgaacagcttctggggagaacactgggaataggagaagatactggggactggggcttaggacagaaaatactcaatcaaggacactgagttagttaatttatattttttaagtataggaaaaatgtttaggagcacaaatgattatgaaagttttaaactgcgataagaatcaccgtcatcataacctgctggtagccacagcatcaccttgtcttgtctctaataaacttgctcctcggtctcctacgctatcctctttctgttaccctcaggggatactgaacccccttcctgcagtggagctgctcacttttatgtaaaccaggccacagcaaattaggctctcaggccaactctggcccactgcctgttttgtaaataaagttttattggtgcacagctatgaccattcatttatatatgcctgcagctcctttggggctacataaatagggttaagaagctgttaagagagattatgagacaagtaaagctcaaaagcatgactacctagctctgtacagaaaacatttgccacctctgatgcagaccatattctgtgcaatggcaaggccagtgggcaggcgggacagatccggctgtgaattctgcccctgtcccttagcagctgtgcgacgctggaaactccattctttgagacgtggtttcctcaccgtaaagtctggaccataatatccacctcatgggcttgttggggaggctgtgagactccatatgtgaggtactcagcatggtgcctggtatttaatatgttctcagtaaagggaagctatgacaaagcagctgtgatttcagccccgctgcctgttctggctctaatgcccttcctccatcttcactccccatctctcctctccaatccacctttcctacatcttgctgcttttcatgtcctggtcctctgaggtttttgttctccttttctcctcctttgtgttacccctctccccctttgccttaaccatgaggctcattcacgtctctgaagaccctcattattcccaccagcatctacacactggggatccagtaccctattttttctggggagctgttccctgcttctcatgcttcccagtaacagccgccatcatcagaaaatgataaatctagaggaaccgaaatccagacctagggctctgtcctgccccttgagaggtcctcttcttgctcacggctgagggcagcagcctgcacaacccgcaccagtctcatcagaagctggccccattgcatcagctcagcacctggctgccacgctcaggtgtgactgccgacatcgcatcagcagcctgcaaagcatggggtcattggctatc

SEQ ID NO: 469232 - DNA, 883 bp, Homo sapiens
gtgtattcagctggacatgacaactttgggcagcactggacacccagatgctgactctagccaataccctgcagaggctggcagtggacagtgctgctctagaaggtgacctgtgtgtagcagtgatccagagtggggactgggagctgccatattggatagagcgggtgtggacattgtcaccatcacagaagcttttagtggacagtgctgctctagagggtgacctgtgtgtagcagtgatccagagtggggactgggagccgccatattggatagagcgggtgtggacattgtcaccatcacagaagcttttagtggacagtgctgctctagagggtgacctgtgtgtagcagtgatccagagtggggactgggagccgccatattggatagagcgggtgtggacattgtcaccatcacagaagcttttagtggacagtgctgctctagagggtgacctgaataaagttacaactggcaaactgtagaatgtgtgaagatagcaaaaatagcaaaatagagacagcaaaaatagagtttcaagttgttggttctgttacctcattgcagcaagttatatattgtaatcaaaactaagttttaaatataactgaaaacaaaaataatcttaattacttttagagtaaaatacgtgtttaaagatatttggggactcattcatttttggagtctttgaatatttattaaaaatttataatgctacagtggctacaggctcaggagctaaaataatgtgggctaccattttagccctgtgacttttaagatgtgtgacctcaaggagccgacttagcatctctgatcctcagtgttttcaataaggagccgatgagtcatccgtcagatcgggctcctgtgc

SEQ ID NO: 469233 - DNA, 632 bp, Homo sapiens
gctacttctccagcctgtgtggagtaggaggtggcaggctcttgatgacgcgttgcagatgcagccagggctctagtggaggtggcctgagtgcctgtcagggcagagggacttactgtcttcagggggtgcggcggctgccaggctgtgagccgcgagggagcacctctcctgcctgggctcagcccccttcttatggttgcctcctgtgtctccgctctcttcatttgagaatcatccctccagtttgcctttttcaactccagctttcccaccaggaccaaagggcagtaaccccacagcaccctgtctcagcagagggcactgcccctggggagcactttaggcctttgggggcactgttggcagagttcctggaggtcctagacatcctacctgggctgtcccctacaacgaggcagtgtgtccggcacctgcagtttccctgctccttcacagaggtgaaaaccctgttgccaggagcctcagcctaggactaactgccttttccatagcgttttccagagcatttttgcatagctttaacatacattaaaattcccagaagtgcacacgtgcttaaaatgagggaaagctgttcttcgctggcactttacctagagctggtcacc

SEQ ID NO: 469234 - DNA, 1849 bp, Homo sapiens
gaatggatgatcagatggatagatgatcggatgaatgaatgaatggatgatcagaggcatggataatcagatgaatggctggatggacgggtgacaggatggctggatgatcagttggatgaatgaccagatgcatggatgaatgattagatgaatagatggatagatggatggatggatggatgatcagatagaaagatggatgggtgattagattaatgaatgaatggatgatcagatggatggataatcagatgggtggatggatgggtgaccagaaggatggatgatcagatgcatgtatggatgattagatgaatggatggatgatcagatagaaggatggatagatagatggatggatgatcagatggcttaatggatagatggtcagatcgatggatggatggatggataatcagatggatgaatgaatggacggatggtcagatgaatggatggatggtcagatgaatggatggatgatctgatagatggatggatgatcagatggatggatggatgagtgaccagatggatgatcagatggaagaatgatcagatgcatggatggatgcttagatgaatggatggatggatggatgattaaatagatggatgaatggatggatggtcagatgggtggatgaccagatagaatgatgggtggatgatcagttggatagatggatggatgctcagatgaatgaatgaacaaatgatcagatggatggataatcagatggatggttgaatggatgaatgggtgaccaaatgtatggatgatcagatggatgaatgatcagatgcatggatggatgattagatgaatgaatggatggatgcatgatcagatggatggatgatcagatggatagatggatggatgatcagatgaattggtggaccaaatggacgaataatcagatggatggatgaatggatggatggtcagatggatggatggatgatcagatagaaggatggatgaatgataagattgattaatggatggatagatggatggatggtaagatgaatggatgaatgatcagatagagggatgtatggatgatctgatggatggatgaatggatggatatcagatggatgatcagatggatgggcagatggatggatggatggacaaatgaatggatgattggatggttggatgaatgggtgggtggaggagtggatgactgaaaatgaatggaaaggagacagcatcccacagagatatgaaaaacctgaggctgagtgtgacttacccaaggtcactcatgggcttctgaccacgcaccttccattcacaaccatgtccgatctcacagagcctgatatgatgggagcaaaattaagccagcagtgtagatgcagggtgtcagcagtgggcctggacagaaaccggctctgccctcacgtggagccgaccgacgggcttgttggctcatgggcagggctgacatctctcttccaaagactgtcctggaaaaacgtaactctcaacggaagtggtcactgcattgaccctaacccccgccaggcctgagttgctggggttcagtattactccagagggaatgtgtgtgcatgtgtgtgcctgtgattttaggcgttgacggcgaagctgggcttctgctggcctggccctgcggccgcctgtgccgtatccacgtagcctcccctctttgcctctctcagccactcagctcatcagttcttcatccataacaggtctcttctgcccctatttggtcagcatgaaatgcatattttcttgttttttaatttggaagcttggtttctcagctcacagctgctttccttcacagccagggctgcctgc

SEQ ID NO: 469235 - DNA, 621 bp, Homo sapiens
aatggattaggaacttgtgaggtcgtcgccatctagtgaggagatgctggaacgtccctgtgggctgctgtggccgactcaccgagccacgaagccggtagctcctcgcttttttaaaaaggaacacacaaacacctttgaggaaggcaatgccaagaaggcactggcaattgatggggcacgtggtcgtggaatcagttctgaagaacacagtgctgagtggcattgtggagcctggcacgggcctggcgagcactgcctaggtgggaccctcaccggcccggctgtgggccggtccaaacccatgggcatgctgagccactttctgctcttcttggaagttccagttcagataccaccaattgtgctccgttatggtgttcctggctgttatctgcttcaggcttattgtgtttgcagtgtgcacagatccggcagcgtccctactccagaggtgcatttgcgtgtaaagctcttaatcatttaatgaagcactgaggtgctggccatcccgtggctggcgtgggctgcgaggtgcaggtgaaggacctgccagcttccccttcgcctcccgccatgattgaaagtttcttgaggcctccccaaccatgcctcctgtac

SEQ ID NO: 469236 - DNA, 730 bp, Homo sapiens
tgcccctcacctcctcctggtacatccacatgtgtacccctcactttctccctcacctcctcccagcacatccacacacatgcccctcacctcctcccgtaggcatctgtcaactaaaggaaggaatatgaaaattgttccatatgtgggtcttacttttcagctcccaagttctcaagatctcatcttgaatgaggttcaggaaaatatgcttgatagtttgagccaagtcacgtggctcagtgtggtagtggcatcctgtaagatttcagggattggggaagctatgcacaccagtggaattgagcatgggagaaaagtgaaggccctggttgccaagcactgcccattggacttcctgtccccatgccttctccctgtgcccgtgagctctcccctccacatcagcccctgccatggcacacagaggaccagccctagaccctggcagccctttgctgtcatttgcacagttggtggtgacggtggacactgagctgactcttcaagccccgtgggaggacagaggactggtgctaaaaggagcaaagggctgagcatctctcgctcgctaaagtgagtacaaaagctagaacaaaaacgagaacccgaaaacaacacaaaacgtgaaagaaactaaataaaaatgtgtgaaaaatagaatgtcagctggatgaggacaaaaataaaatgactggaaaaatattccaagtaaatactgctgattgtc

SEQ ID NO: 469237 - DNA, 535 bp, Homo sapiens
ccttgctgaaatgccaagagggtcgcacatcgacggctcacctggggacaccaaggggctccaacgccaccttgcggtggggggtgggggtggtgctgacctcatctccccccaaaaaccagccacaggggtgagaacttgtggcctcaacctccgacctccagggagggaagaagcactggggttgagccccgtcagtcatgcctttgggatgaaactctgcatggaaaccctggaaagacagggctggagagctcctggctgcctcgaatgtcaccactcctcgaaacgcgggcccagcgtcttccagggcgctcctccggtctcactctttgagtcccccccacactctgggactctccagtcagctctggtccggctcatgcagacaccagttggtaaacaggaggtgctcaacgagtgttggctggtcatagagcgtgcctcatggatggccacagacctattgatcaggaccccaccctcatgaccttatctaaccccagttacctcccaagaccccatctccgaatcc

SEQ ID NO: 469238 - DNA, 992 bp, Homo sapiens
atatggcattaagttcatttgtctgttttcaattttagggccaggcagcaggtggcccagacgctgggctcccagggatacgggcctcagtctatgtccaggtggcaccacatcttcttcacctgtggctgttccgctttgcttaatgccacgattatggatgcctcccactcagagactgacctgcccgcttctgctagagcagaggggctccatttcctggctgtggggctgggagaagggacttggggctctaaatggtgtctcattggaattcgacgactccgtgtcctccacacccctcacgtcttgcctcaagagacacaggtgcccctggttcctgagctgctccgtggccctgggtgtctctgctggcttctcagggctcctctcatctggaggcacccatttcctggagctctgtctgcgtcagtggctggtacctgtctgtcctcatcatccagggctcctcaacagagggaggagggcaacttcagtagaagcagagtcacactgggcctgggggcctccaaggcccctggatcattttctgtttgtcacctttgaaaggaagtttgtaggaaacataggagaataagaaagcatgttcatctgacaattcagcaaatccttggctaaaataaccctagcttatccacaccatggaattctatgtagctattggaaatgaaggaacagggagaagaatattttatgagcaaattactatcttcatattctcaaatgaataaagcatgcttcagtaagattcagtaagattctatttttattacaaatgtgtgtgtatgtatatgtatatatatgtacatacatatgtatatatacacatatgtatgtgtatatatacatacactatatatagtggatatatagagtgtatatatggtgtgtatgtatatatatagtgtatatatatagtgtatatatatagtgtacatatatagtgtgtatatatatagtgtacatatata

SEQ ID NO: 469239 - DNA, 1154 bp, Homo sapiens
gaaagcagcgaatgaagctctagatgctgaaaacggcacagaatgaattatgccctagagtgcccggaaggacatacagccccgcaggcaccgtgattttagcactgtgggccctgggttggacttgggactgcagaactgtaagtccacgggcagcactgaggatgcaggcaaccggggcccacacctccacgctgtgcatagatggtgcttgccaaatttggcccaccgcctacttttgtagacgacgttttatgggaacacagacacccccgtccaaagacaataagatgaggagagaagaatcttttcaacaacgagaactgggaatgctggaggcacatatgcaaaagaaagcagtggacttcaacacactgtccccaaaactcacccagaatggaccatagacctggatgcaggtgttaacactaaacaacccttcaagaaaacatgggaatgacacttcatgaggttgcgtcagatgacggtttcttcttagatacagcacaaaagtcacaaatgacaaagaaaaaaataatacgctggacttcaccaaaatgaaaaacttttatgctgcaaattatatcatcaagaaagtggaaagaaaactcacagaatggcagaaaatatttgcaaatcacatttctgataaaagacttgtatctagaatacataaagaaatcttacaactcaaaagtaaaaggacatataaccaaatttaaaaattgacaaaggatctaagtagactttttttttttaagaaataagtgaatggacagagtgagaatgagtactaatgggtatggaatatatatatatatatatatatatatatatatatatatatatatatatatatatacatatttttttttttttttggcagagtctcactctgttacccaggctggagtacagagagctctaagccaacatggggggtgggggctgcctccctgttgcaaaggccttatgtcaagactctggggaggctgggggatgttggaggagcccagctgattcccgcagctattgtgccttcccagcccagggcaggcatgtgtgaatttcagtgcgtccagctggcttcccttttcctggacgccttcttccctccctggggttcaccgaccgtgattatgtctagagtatat

SEQ ID NO: 469240 - DNA, 933 bp, Homo sapiens
tattgtctatggctgcgaagattcagtgttgttcctttcatgatggaagggcccaatgtactcaacctgctaacgggtggtatctgcctaccctgaaaagtggtgccacattggtctctgttgttgggaaagattgtccatataattattaaatgcctgccggcagtggacatcttgtggtggacataggttctgagaagttcacacacgtgtttctcactttgacccctgatagagatctgcctacttgctgcagtgctggggtagtgtgcaggtccacccacgaacctacacttgcaagaactggtttctaccggaccctaatagcaagcccagagctgcttttggaaaggagatttgccaacagaagaggggataacctaactcaaatcttcagagatttgtgcaatgattctcctattagaacttgccagatgggtccctacagtttctcagacaatgcaggacaatgcaaaagacttggccttgtcctgaataaggtgattgtataatttacaatccaaacctggattttgaaagtgaaaggaagtgctactgataattctgccagaacaacaggtgtacctgggccttggcaacgaagcaactcatcaaaggcacattgccgttgctgctacatgaaggcagtttcttatttttctttatggatgcactggaataaaatatttttcaagttgacagctgcaaactggttgcataccagctgatttattctagtaaaggtaaatgtgtaattgcacctgccactgtcatcaacacctcactaaatctgcgcgatttactgttgctctccaaggcccatgtggctgttgtacttgctaaacaggcaaacgacttgcaagtattttttttctcagtatgtaccttgtgttttcattctcttaacagtgttttccaaagagatgttcaaaa

SEQ ID NO: 469241 - DNA, 1078 bp, Homo sapiens
ccgagccatggagacgtgggtgaaccagtcctacacagatggcttcttcctcttaggcatcttctcccacagtactgctgaccttgtcctcttctccgtggttatggcggtcttcacagtggccctctgtgggaatgtcctcctcatcttcctcatctacatggaccctcaccttcacacccccatgtacttcttcctcagccagctctccctcatggacctcatgttggtctgtaccaatgtgccaaagatggcagccaacttcctgtctggcaggaagtccatctcctttgtgggctgtggcatacaaattggcctctttgtctgtcttgtgggatctgaggggctcttgctgggactcatggcttatgaccgctatgtggccattagccacccacttcactatcccatcctcatgaatcagagggtctgtctccagattactgggagctcctgggcctttgggataatcgatggcttgatccagatggtggtagtaatgaatttcccctactgtggcttgaggaaggtgaaccatttcttctgtgagatgctatccttgttgaagctggcctgtgtagacacatccctgtttgagaaggtgatatttgcttgctgtgtcttcatgcttctcttcccattctccatcatcgtggcctcctatgctcgcattctagggactgtgctgcaaatgcactctgctcaggcctggaaaaaggccctggccacctgctcctcccacctgacagctgtcaccctcttctatggggcagccatgttcatctacctgaggcctaggcactaccgggcccccagccatgacaaggtggcctctatcttctacacggtccttactcccatgctcaaccccctcatttacagcttgaggaacagggaggtgatgggggcactgaggaaggggctggaccgctgcaggatcggcagccagcactgaacccagggcatccagtgcctggctctgccatctcttagctccagggatgtcgggttaataattctctcattttcagtcttggtttcctcatgaattatgatgattgtgacaccctcagacttg

SEQ ID NO: 469242 - DNA, 801 bp, Homo sapiens
cagctccgcgtcctgtgaggtccagtggccgcccaggcgcgaccagatctgggtgcgcggagagcgcgcatggcggctgtgggaccgcggaccggccccggaaccggcgccgaggctctagcgctggcggcagagctgcagggcgaggcgacgtgctccatctgcctagagctctttcgtgagccggtgtccgtcgagtgcggccacagcttctgccgcgcctgcatagggcgctgctgggagcgcccgggcgcggggtctgttggggccgccacccgcgcgccctccttcccactgccctgtccgcagtgccgcgagcccgcgcgccccagtcagctgcggcccaaccggcagctggcggcggtggccacgctcctgcggcgcttcagcctgcccgcggccgccccgggagagcacgggtctcaggcggccgcggcccgggcagcggctgcccgctgcgggcagcatggcgaacccttcaagctctactgccaggacgacggacgcgccatctgcgtggtgtgcgaccgcgcccgcgagcaccgcgagcacgccgtgctgccgctggacgaggcggtgcaggaggccaagatactgggccgcctgcgcgacgtcccccacggacttggcgatgttcttcctgtctgttcggagcctctagcctggtctgcgtctccgcagctctctgcccgcgggaagtctccggcacagccacgcagccgctgcccccactcttatctctttccccgaagcgggctctgctcaaagtccccacctcgtggaactgagtgagaggacctc

SEQ ID NO: 469243 - DNA, 883 bp, Homo sapiens
ttatgaaggtttatgacaatttcaaactaaaataagccatgtaatgctaggagtggagggacataagcacccctgtggctaccactattatgactgcactgggttaaacctgaagtcagcactgcatttggtctcacccaaggcctacactcgtggtgagctcccccaggccctgagttggtccagaagtgccttccaggagtcagaggaggcagtggactctcctctggcccaaggcaggtccaaaaatgccatccagccgtcaagtcctggaattagggaccccaagagcctgtttggttctctaacccctgtagctgtgctggaacctaaggattggcaatgggcacctcgctggatcaggagcacagctgacaccctgctggatctggagggatggaagtcagcggagggtctgcgacagcggccaacagcactggtggatggttataatgcaataatgcacactaagaagtttatattcaatgtgcatggtgttattgatagagagcagagtatgcagggcaatgttcagtactctggctttaggtacacacaacgagagaaaagctcctaccgggaaaccaatggaaatcattaccaaggggctttcaataacccattgacatttagaaaagcaaaatctgagggcaggtcagagaccttcacagcagcccttcccatcacaggcccagaggttagaagggaaaaattttgtcctgggcctggctcaggacccagctgctttgttcagaactcagttccctgtgtcccagccactgcagctccagacatggctaaaagaggccaaggtacagctccagacattgcttcagaggatgcaatccccaagccttgacaactgccacgtggtgtcgggtct

SEQ ID NO: 469244 - DNA, 600 bp, Homo sapiens
aggatcctgtaacacctctacaaaagaaataaggaacactcttcaccaaacgaataggaagcaaaaatgagggaagacacaggattcgggaaatgggacaagcaggcaagagaaatctgagaataatgaatatgaaagaatctgacaaaaaccaggcccatgcaggtctgaaatccagaggatttaaaagctccaaaatgatctcctttgactccaggtctcacatccaggtcaccctgatgcaagaggtgagttcccacggtcttgggcagctccgccatgtggctttgcagggtagagtctccctcccagatgctttcacaggctggcatttagtgtctgcagcttttccaggggcatggtgcaagctgttggtggatctaccattttggggtctggaggacggtggccctcttatcacagctccactaggtggtgccccaatagggactctgtgtgggggctctgaccccacgtttcccttccacactaccctagcagaggttctccatgagtgccccatccctaaagtaaacttctgcctagggatccaggcgtttctatacatcttctgaaatctaggtgaaggttcccaaaccc

SEQ ID NO: 469245 - DNA, 2647 bp, Homo sapiens
ctcctcaagagcagccagagtggacgccgtggccgaggaggcgctgagagcatgggagggctgctagcacattgtcacctctcatcttcacatggtcttccttctttcactgtcagtgtacaaatttcctcttttcataaggacaccaatcatattgaattagggtccacacttaatctcatgttaatttcctctggcagctgtccccaaggggaccccagtgagacaagtcagaaatggctttccggaggacccacagggcttttacaattgcctcctctaccccgtatttcacttggctctccaaattgtctcacctccagtttggcactcacagtatttggctgtctcctcggtcctgcaggaaccatctgcttccttcaaagggtctgtggattctcttgcctttcctggtttatttctgcagtagttcttggagcagaagttcacaatgtgagtctccacatactgctctgtctgtcccagtgggagctacgatttagtcctgcctcttatctgccttttttttgctactaaattcttattttccattcctattggtatattattgtaagactgatttctatgttaagattttgattaaaacaaaacatcaaaacagtttggagagttatatagatttcattttgttctgtttccttttttctattttacatttgttctgattatatttactgaaatgtaattttatgtttgttgaatctaataataaaaaatttgtttctattttgtgtgtataatgtttaatctcattttattttttataacatttttattttcataattgtatcactccacaaaagactggggaaaaataacctttcagctcagacagttggaaaagcactgccattagctctttttgtggtgtggtattatatatatttgtcttatttattttttgctatatcactgccattttcatactctaaacttctagcattgcacgctgcatgttccatgcttttcggaaaagagtaatgagtaaataaacttccaaggcacttgaagtaagcaatgaattcacaacaatggttacatatggtggccttgaggttcagtaacttcaggtagcaagaaagaatcacaaatttgtgatgtacccaggatgagggataatttggagttcacaggcaaatgggaaatgcacatgacatttacagtcaaaatttggctttttcagaattacgctagctaaacaaaacatggcttcagattcaacttttcctgcattttcaggacctctggttaaaacaaaaggctttaagtaaacagttggagacaaaataagctaattaaaatgtcttcttacttttcctaaaattgcctttaattgtatctctttctacatttttagtatctatcaatctatccacctatcttcctctaaatttatccaaatatctgatatctgttaactacaatcggtctctttagctgttgttctgaacttccaggtccgtataagactcagtatccaattagtatttcaaacaccacagactaaaactgaactaatcttacttttctacaagtcagttcccaaacatgaatttcacatttttattagtgccacaatctgttattcatatttctaaacctgtagtcatctctgacttttgttactatcttttcatatactctattggtaatatcacaacatgcccagcagttacatatttttttctttattctgacctgcttgtataatttctgactcaaatgtcctcagccatatttatatatgcaaatcaaaacaatatcttaaagcccagctaaaacgtcataacttttctagtttcccttgattctctcagcataaagtagtctctccctccactttactactttaacactccattttaaacatcttttgcttagagaacaactttactgtataatgtcattttttattttggaggcagaggatgtcatttatgtctttctgtatataccatactatcatgaaaacactgtcatttgtatatggcaaaaccaaagtttgcggaaggaagtttttgcaaagatttctcaaattacgtttctcagtaattttaatgttatacaaagatacatactataagaggagaggagagtacatatttaatactttttcacttagactactaaacaaatataaaggattatattgtcattgaaaatgttgaaaattgcattccgaacaataaatgcttttatttgctgcaaaataaagtatttttaagtcatatggaaaaagttcatcatgtaaggagtcatgatgaaaaagaagcaattattgcagagcaataaataaatggttaaactgacgcagtttcacacaatattatttctttctcctgtgttataattctctccctttgtatcacatactttttacaaaaccaaataaactgtcataatcttgcgtgaataatttgcctagctgttgtcctatcttttctgtccctttacataaggtttttctgtccctctatacattttcctgggaattacaagataaacacaattttaagctttttcaattgtgaatattcctcccatagtttctttttacacttggacttcctgacagagaaaaatatcatttttaggaatgagtctgatgatcatatcattttagcaa

SEQ ID NO: 469246 - DNA, 684 bp, Homo sapiens
agtgttttattagtttagtggacctatggctttgagcaaatcactgggcccacaaggtttcatacttgtggaacagctttcctatataggcaaggtactcggtacagcagtatcaggaaaaggatatgcactgaaatgtgtcctgacagctaaggcacagacgtattcttcctcatactgttgggtttcctggacctccatgtctgaaaccatcaccagcagaagtccttcaaatgtaattgcaaagtcagagacctacagggaaatggggatcaaaagctctcatcactccagatgctacaaagccttcccttccagatgctaccgattttactccccaggtcatctgcaagttgaggagcaaggaagccagtcgtggctcagtccaagtcccaaaacctcaaaagcagggaagccgatagcgcagcctccagtctgtggccaaaggcctgagagcccctggcaaatcactggtgcctgtgtgactccactgtgagaggacttttggatacttgtacctagtttcttgtaaagtttgctgcattcaccttttacttttgtggatttatctttgtatctttttgctgcattgaataatagacatgaatataactatatgttgagttcattgagccttcctagcaaattgccagtcctgggataagtcttagggaccactgacat

SEQ ID NO: 469247 - DNA, 746 bp, Homo sapiens
aagtggttctgagttggtccatgggtcagagctattcggcaactgctggacaataacaatggcagaaagcaattctccgcggcataggttccacacagttgaatctctttcagtggatctagatgttatgatcattaacacagtcataacagagagtcagagattaagggagcaaaagataacatttggaaaacagtcagatgacaccgtggatcctatggccatgatttcattcaaagaaataagcaaattgtcctctgacagtgatgttttagcaggaagaatagcatcttctaaagcaaaatggccggtagccacagtagccagagccagagccacatccacagccatagccagttccataaccacagccatacccacagccgtagccagttccatagccacagccagagccagagccatagccacagctgtagccagagccatagccacagccatagctggagccatagccacagccataaccagagccatagccacagccatagctggagccatagccacagccataaccagagccatagccacagccatagctggagccatagccacaggagttgccacctttatataattgccaaagcatatcattcattccctgacttagccaacaaatatttaaacaatcattatgtgccagtcactgttgatcatcaataatattttgcttaaaatgagccaattattttggagactcgagtttcatttcaggaacatcattttaa

SEQ ID NO: 469248 - DNA, 2822 bp, Homo sapiens
gtgagcagccgccactccttcggcgttggctcttgcgccggggtcgttgtttcgtgacaaccacccaggtagccgtttctgagacggcagatgcggccgctttagccctgagcgggctccgcgcctccctggacggtctctgccaaaatggcggcctggactgcctcgcactggccagtgaaggggatcctgaagaacaaggcctctacagcttcctctatggtggcctcggctgaacagcccagcgggagtgtcgaggaggagctgagcaaaaaatcccagaagtgggaagaaatgaacatcctggcgacatatcatccagcggacaaagactatggtttaatgaaaatagatgaaccaagcactccttactgtcgtaagatgggtgatggtgaagatgcgtgtagtgatacagaaaccactgaagccgtggcaccagatatcttagctaagaaattagctgttgctgaaggcttgaacccaaagtatcgggttcaggaacaagaaagcagtggagaggaggctaggacctctcacctgaagaacgagaaaaaaggcgacaatttgaaatgaaaaggaagcttcactacaatgaaggactgaatatcaaactagctagagaattaatttgaaaagacctacatgatgacaaagatgaagaaatgttaaagactgcagatggagaaagcatgaagacggaacaatcaaatcaaagctctacagcaagtgaccaacggcaaaacacattcagtaagttcatagaagagctttgttcaacactgcaactgtttgctagatataaaccctgttactataatacattgcttcttgatctccacaatttatgatttaagtatcaaaatcataccagttattatatattaccaagaattaaatgatatccttagaaactgattagactgaaaatgcctaattggtatatatatcttgtgcctagtactttaccacaaatacagtgtaatatcatcagtccaaaactgcattacttttgtaaaaacactggttaatttgtgtaagatattatatagcatttttaaaggataaaaaatatctttggggaggagaactaagttattttcatcactctaaatggggcgatacctcttataagtttgttggtttgcttttttttaaaatcaaaagacaattgaacaacaggatgtataggctgataaatattcaggccgaatagtattttaacacttgtcttcaacttgatttgtctgtttaattgaaaaggattataagagttactcttgcattttctgtcctactacctttaaagttactgttgagtttctttgtatttacaaggaaaggactgaactttttctcatcaaaactagccttttttctcacaaataaattatcagtttaaacttgcaaaaaaaaaaaattaagccaaggtagaatgtagttgtggtctgaggaaattaatgttctaaaagttgtagaatgataacagggtgtgaaaagatactgttaagtcaacttaaacatgtcctgataattgaccactggattcaggtgagcagagatgacaacagcatgtgatgtttcttcagagtagaggaagcaaagtctgattgaagtttgttggagagaggatgggaagagaaagagttcagacagtaggtacagttacactttcaatgagttttgttgaatagaacagtcaagtcaggcattagaggaagaggcagagtcaatggacttttattttttttgttgctttgtttctaagcccgtagaaactgcaatgtttctatgcaaatgaaaatgcccaaataataaggaaaacattgatcatacaggaacatgacagggaagttgccggagtaattcgctttgcaaacaagaggtaatgggatctgttgcacaagtgtagagctgagacttatataggagcatatagcttatttgttgtgggaagaggataggagtataggaaggttgatagactcgatgatgggtccatgcaggcattttcttcatttactttctactttctcagtgaaataatagccatgaatatgtatctggaagaaaaatgctctagttccatagagtggggaataattggaacagttacgcagaataatgggagagcaaattgaataaggagatagagtggtatcaccctacagccttaaggaatcccttgagttcagtggtcaggatattaaaatgagatcattcaacactgttgtgaggttttctcctttaagttcacttattcgatgatgacttagaacaggtgaccagtgaaaaaccagtgaaaacagtaaacatttttttcaggaaaataaaacaggggtgttgataatggtattgaggctttatgaacaatggaaagagattataatgagtggtcataagatattatgtgatcaattttagagtaagtgtatatagcaatgagaagaatgtatatcctgtttgcaagatgaggagttctgtatatatcgatcagaaagatagtcttcaagctctgagattcttttctccacttcatctattctgctattgatacatgtcattgcactatgaatttccaatgttatgtttttcagctccatcagatttattcacattttggtgttaatcaacactttaaaatttctgaatagtattctgctttatgggtatacaatttgtttattcatttacctgttgatggatatttggaatgtttccagtttggtgctttacaaataaagctatacaaatttgtgtataaatcttcatgtgaacataaatatctaggaatgaaatgtttagaatatatgcaagtttaagtt

SEQ ID NO: 469249 - DNA, 1057 bp, Homo sapiens
ctaagggtccttctgctgtgtgctgtctagggacttggtgccctacatcccaattgctccagctgtgactaaaatgggtcaagatacagctagggccttggcttcagaggctgcaagccccaagccttggcagcttccacatggtgttgagcctgtgggtgcacagaagtcaagaattgagggcattgatgctgaagtgagaaaaggagagagaggtattgagggaggtggagctgcctgttcacagctcaacaccgatggccttctattgagaataatgagtccaggagagagagactcagaaattaaaaaatacttgaaggtgagaaagatggcctctgtaatacagttgccaagtgagaataaggtagaaattcatccagaagtgaaaactcagctagtaagatgtttgaaaataaagaaacaaacaaaattgactgtggaacagcaaacacaaagggattttggagacttagaaacaggcagtctctagctagtcctagggagatacagatagtaaactagccaaatgaagcaggagaattaaagttagaagcttcatgagagttcagccactagaaagattttgtggaaatccaggagaaacattaaataccagtgtgaatatcgggaacattgtaaattttacttgtaaagtgttctgctaaaaacgaacaaagcaaaatgcagtgtcagtgttactactgttcttttctaaaactcatagttgtttctcaaagtagtgttttacaagattatgttccacaagtgacattggatgtgtttgtgggaaaacagttttatggttatatatatatatggaaaatactgtgctaacagatttaaataaaacagaacttgcagaaaactgttaactatctatgaggtatctaaagcagtcaaatttacagacacagaaagtggaatggtggacatcagggtctgggagaagggagaaaaggagttactttatgggtagggctttagatttgcaagatgcaaacgttctagggctattttgtaacattttaatacttgatactacaaaatgtttaac

SEQ ID NO: 469250 - DNA, 3079 bp, Homo sapiens
cccttgcctggcatagacagtgggagctgagaccaaagaagtccatttacaatggtgacaaagaataacttcaatgctcaaacgtttgtgaagatcatagaagtttcacactgtgattcaaaaaagacaactactgctcctgctgttgtttccatgcctgcatgtggggccgcagacaccaccacagatctgaaaaagttttcttttcattgtaaccatcatctccatgggtggagtgtgggaatgggtggtgatgcagtagataacagaaatgctaggggcacaggtcctggcaacccggactggtttccctggatacaagagcttccctgcttggagggactgagtcatcaaatgtgtttgaatttgttcagcctcaaaaaggatgaatgttccctgaaaaatatgagaggttctatttttagaaaaatgagcatacatatgttggtttataaaacatatatgatcagattttatccagttttagttattttacagtgatcattaggaatttgtagtaacacctctttcagctataaaaaagtatctgaaacagatcttgtttaataaattgttttaagatattgcttactatctataagaagtcatccaagaatatcaacacattctatttatctgtctttgtaataagtgaatataagtctggacctaaaggagtgttataattgctatgttcagggtatcacaatgggaatcatgtcttttcattctttctatcactcatagcacatataacggtttcttacaaataatttttgtgttctttcaggtgaagctcctttctccagatcctaaattaagcaaagtaaaaagcgaactgaatataatctttaccatagcaacttatgtacctactcactaattctacatcttgagatattttaatattgactggcgtatatcaaaagtattttcaagtttgcaaatgtaaagatacttcactaagagtatattaacctggaagttcccaggtaggaccagctaaaaattgagaaagaatagagaaaatgtcagaggcagagaaattggttgtggtcaaaaatctggcttctgagcgaagtgaccgacatcctaaatcagtgtgtaaaatatcatagaaaaaataagcttgacctgatttgctgtgatgtcttcctagggaatctgaactttaggggctgagtggatgtgatatcaacagagacttctaagaaaagacaacacttaggtggttaacaatactgttgacacttaaggtggtggtgtcaaccaccttcttagcagttctttgttaagaactgtgaatcagaccacacttgctggggagagtgtccaggaactaatgttcacgtcttgaggaaagacgataaatagagcagataatgttatttcaaagcaagcactagtttgacttagaaatggtctgagcttcagtgagggaaatgaaagacaatttgaaaattgtagtgattgcagttaggatagtgtggcttggttgacactacaggacaccaagtccctactcaagcacacagaatacagggtgtttataatcatcttgctgtgggtgaaacctggaaatgtcacataagctaagtgctttacttcatctgaaatataccatgaaagtatttcaaaaccttgatgtatagaaaaacacatcaatctcacacagagactacatctcttacctgagagagatgagacagcatgtgtctgtgaaaaaaaaatggacctagggaaccatgttgtttatcgcaacatctcctgctttgcctatcagctttggttgtaagtatctttgtaattataagtaaagcttgatattctggaaagatgcctgatttctgagattctaacttgacaatttgatgcattatgttagttcaagataacatactggctaccagctgaaataaaagcttgtaagtcacacaacgaagcatacatagctttttaatttccttataatcattctgtggcttatttttacttttatctccaatttcattactggggaagttagatttcccatgtcctacttctcttataatagcaaataagtattatatcatatttttatattatattaccaagtgaggtttttaatcaattatgtaatgtaaaaattgcagtcatttggctttatagaatggaaagaaatattacgtatatctaagttataaataggagcataaaacatatttaacattatctatgaaatccaagatggactgtcccctacctacctcttcatcattcttcctcatgcttggtgctatgttcttggagtgcactggtctcattgcacttctcatgctcatgttccttccatccacaaattctttgcaaatgaaatactctatatctgtaatgtccccttttcttatactgtttaatttttcagactagttcaagcattattacatatgcaaaaccttggaccacccaaattaattttgagcataaactattactgttatgcactctcatgggactatgcaacatgatttcatagcccatattgcagttttgcttactaactaatttattcagtacatattattgaaaactttctatgtatcatatactgttctaagctttggggatacactagtaggcaaattaaacacaataattttatgtatatatttattattatttgatccatgcttgtctttctcattagattgtttcctaagagtcattggatctttatttaaaaggaaagattgcatcagcttttggtcacccttgttaccagcctaaattaacatgtgtttaacaaattaatatattaatttaattatatataaatatatataatagaaatggcctcataatcaacttaattatcttgtttagtgttactcaggcctgccagagcaaattttttctcttgacaaattaaatgtgaccatgtatcttagtgttttcaagtttatttgaacaatccagttggctagagcaagagatcacaagatattctactctttcacttttcagatagcaaaattgtgaattgaaagaagacaaaataaaagccaaagtaagcagaacaaaataaataataataatt

SEQ ID NO: 469251 - DNA, 612 bp, Homo sapiens
ggccaggctcgatggctcaggtccttcttatagactcactgaatattgaaatcgtgtgttgggcagctgcagtaaaacatgactcagtgcccacttctcaagtttctgtgtcctgccctaaacaactgtagctcatgttgtctgctggaccaggagagagtggggcctgtgcacattcaggtacccaagacaggccacagcaccattgctctgggactgaggtgcattctgaaccacaaactcccatggctgctggtacctcccattactgcctacctggattttcttgcaggggcagcccacagtataggcttcattgccctacctgagtggtttgttgggcagcctgggagcagttcacttccccaccaaagaggattgcccgagtggcctgagagctgcctctacaaccccatcaaggtcaggacttgcacccaacccaaccctatctattcctgccatcttggtgggagaacaccaggcaataatattgaaccccattccccatccattgccagggacactctgatacttccccccatcaactaaagtcacatagaattccactgccatcagcacatatgcttgtcacttgcaagtgccaactactga

SEQ ID NO: 469252 - DNA, 637 bp, Homo sapiens
aaggcattctaagtcacaggatgagataggaggacggcacaagatgcaggtcataaagaacttgctaacaaaacaggttgcattttctgagggtgtaggctgctctcctattggagtgtcaagcattgatctccactcaacactcctgagcctctggatgcagccccggggtgccaggacctgccagtggttcatcctccagatgttacgattgtgttctgggtgtggtgggggatccaaagggctctcagattgtaggactgcactcagatggagcagactacacagctgggcagtgaagattgcactgtgtacatgctcctatggggtggcctggcagggtcccgaggaaggactggcgggcaagggaacctgtaggacaaatgtgtcccagtcttgtggggaagtggaccctgctatctccccagtatttagctgggacctcagcctgtcagagagaaataggcagccctgagcgttggggtcttatgaccaggctctgtgggagctgacacagctggcaccgccctccccaacccctgaaaagttcctggctctgtgcccactgcagttccgtctttaatctccaaggagatccccctggcagctcatacatctgaatgcctacaagttgtac

SEQ ID NO: 469253 - DNA, 728 bp, Homo sapiens
ctcaaggttcacatatatgccagactcgttgaatggttttgaccaaaatgctgttaataatatggacaatgaaatccagggagaggtggtctcagatggagatgagggacttgttgataactggagtaaaagtgactcttgctgtgttttagcaaagagactggtagcattttgccctggcgctagagatttgtggaactttaaacttgagggagatgatttagggtatctggcagaagaaatttcaaaacagcaaagcattcaagaagagacttgggtgccattaagaacattcagttttaaaagggtaacagagcataaaagttcaaaaaatttgcagcctgacaatgtgatagaaaacggcagtgtggaagggaaatgttgggttgaagcccccacaagagtccccactgtggcactgcctagtggagctgtgagaaaagggccaccatcctccagaccccagaatgctagatctaccaccagcttgcactgtgtgcctggaaaagctgcagacacttaatgccagcccatgaaagcagccaggagggaggctgtaaacttgtgtcatgggggtattaataatatatattatatagcctacacatatatgcattttatgtatgtaaattacatttatataatattctatgtaggtatacataatactacccaattaaatatacaaataatgtcctcatgtctgcagtacattgagatattttagc

SEQ ID NO: 469254 - DNA, 629 bp, Homo sapiens
actttccaaccagtcccaatgagatgaaccaggtacctcagttgggaatgcagaaatcaccctttgacttacgcaagtcaatatatgcgatacaccacataaacagaattaaaataaaaaatcacatgatcatctcaatagatgcagaaaaagcatcccacaaaatccagcatcactttatgcttaaaactctcagcaaagtcggcatacaagggacatatctcaacgtaataaaagccatctatgacaaacccacaatcaacataatactgaatggggaaaagttgacagcattccctctgagaactggaacaagacaaggatgtccactctcaccacttctcttcaacatagtactatgggtcatggggctgtacagagaagcagctctacagtatttgaacttacaccctaagcttattctggctggaagcagtagcactttaatttggaagataccaggctcctacaagatttaaaattactggagcatttcaaaattttataagctttccagtaaggttgtggctgtgattctgggcttgtaaagtaaagcacaatttaaagttaatttaaataatttaagtactgcagtcttgaggggaattgttttgtctttcaaactggaa

SEQ ID NO: 469255 - DNA, 1977 bp, Homo sapiens
caaggtgatattgcctcacaccagttaggagggctaattagttggaccaggtatgacgtttcaaggaagctggccaccccaccctaatattcttattatgcaaatgcagtctttgcttggctggtcccatgttgcccgctccttactgtatgtgtggctggcaaagagaagggaagatggagctgccatattggacatggctagctccagggatgaagccgacttgatcgtggtggataaactttttgatatgctgctggattcagtttgccagtattttattgaggattttcacatcgatcttccttgcattgggttagaacatgctcctttagctcggaggagagaactcgagcactgttctgggagatccactgccctcttcagtgctggtaggcgggaatgtttaaatctgctgaagctgtgcccaccgccgccccttcccccaggtgctctgtcccagggaaatgggagttttatctataagcccctgtctggggctgctgcttttctttcagagatgccctgcccagagaggaggaatccagagaggaggtttagggtatgatatttatggaattgtgaggggacaatggcctggcattcattttaggagtatatttcagatagatcttttattttattgcctaagagaataatacttaaaatccttaataacaatattaattatatattgctaaaatttatttgcatatgatcagagtgatctgtatgatattaaggttttaaaatattttagagactcatcttttggctgaaaaataagtttttacatgtttcataaatacttgaaaaatgttcactgactgttagagtcaagatttaaacatatccattagattaagaatgttaattatgtgcttcaaatgtgtcgcatctttctctgtcctttcttttatgatcgttgggagaataattgccaaaagctttcactatgctaccaagcatatttttcttattatgtcaccttttctgaactcttagtttgggttaagtttcttataaatgccataaaattctaactatgttctattagctaaccttctttaagtataaagtttagtgtactaatttcttggcttaaactccatatttataaatgcttatgactcaacaaaactttatcttgaagtatgcctttcctcagaattttaggtttatatatccaattgccttcctaatattacaaattagaattcacataggtatctcagcatgtacattttagaagcatactttggatcttctccatccaaaatttcagtaattttcaagtaatgtaaatggcagaatgaaacaaaacaaaacaaaacaaaacaaatgtgattgccttattgaggtggttgaggtggttgaggtggttagagagtaggtaacaaagcctccattatctcaggctggaaagctgtcaactcataaagtggcaactcttattttaagatagcaaagtagtaaaatgtttgtttaaactgttactagctgttccttcgtggtgcaaacatcatttgaagctgtagcaccaggaaaaattataggaaacattcagaccatagcaacctattgactgtttttcaaataattttattagaaatatacggatttatgccagagcaagccggttggcaaagaagaagaaaggaaattactattaataaagattgtgctcattgtctatgtccaacagtatttattgaggtatacttgacgaataatacttgtgcatatttaagtgctatcccacttgtctatttttgcatttgttgcctaggtttttggtgttatatccaaaaatatcattacccagatcaatgataagaaattttttctctaggttttcttcccttaattttacagtttcaagtcttatatttagtttttaattgagttgatttttgtatattgtgtgatatagtgtaaaatttcattcatttttatgtaaatacctagttttcccaa

SEQ ID NO: 469256 - DNA, 532 bp, Homo sapiens
tctctctccgcgccatgctgccagatcacagctcctcgccagcaatggaacaaagctggatagagaatgactttgacaagctgacagaagtaggcttcagaaagtcgataataacaaacttctctgagctaaaggaggatgttcgaacccattgcaaggaagctaaaaaccttgaaaaaagattagatgaatgtctaactagaattaacagtgtagagaagaccttaaatgacctgatggagctgaaaaccatggcacgagaactatgtgacgcatgcacaagcttcaatagtcgatttgatcaagtggaagaaagggtatcagtgattgaagatcaaattaatgaaatcaagaagagaagtttagagaaaaaagagaaatgcaaagaacaccaccaagatactcctcgagaaaagcaaccccaagacatataattgtcagattcaccaagattgaaatgaaggaaaaaatgttaagagcagccagagagaaaggtcgggttacccacaaagggaagcccatcagactaacc

SEQ ID NO: 469257 - DNA, 1386 bp, Homo sapiens
cccagagcatgtatcggaagatatgtgttctctgaacacatcttgtagtcatcctggagcacagaggggggtgtccactccagcagtgaagagcaaggaacgagggcagaggtcaggtggcatgggagagagataccccagcctacaggaagtggaagctaggctggaagtggccccaaacagcatggattctggggggagaaagtgtggtaagaagggaagcaagctggttgctgcaaagtttgatgcagggccggctccatctggtcacataacacggtccactccacacagcccatttaatacattaagaagggataaggagaaggctgtgcctggaaaagctgtcatcaccttcattgatgagccaagagcttctattcatggaacacttagaatatacctattttattttagtaacagatttcctaatatcgaatgatctaggcattgattctagcagattatgtctatgggtattttatttaagattttgcatcagtattaataaatgaccatggtctatgggtttgcttttttgtgtgctatgtttgcagagtgtttgtagtttacaagagatttttgcaaacttctatttatgacaatatggtagattatatatctgaaaaaaaaaccttctcattacagaacatatacaaaactgctgaataaaacgaggcaaccaacattttaaatatatggttaataaggttttatatctgttgtggtgtcattttttggaaattttctattgtcataaacaattatacattatctctcggttcccaaacttatttgcagacttgaagtactcttctgtgaataactcaaagtctgtgtgtctatgatcatttcctattatctttgtaaatgttgcatatttctgcttaatacttattttattaaattagtctctcatgagtgtagagtagtgttttcttgaggctacaggatatggaataacatgatgagtctgaaaaataatacgatatgtggtgatatactcttgtgttctaaaattttctcaattttaatttcaaatgtgagttcatcaatagctcctaaattgtactcacattttttctgcttattcatattccatttcaacacttatgaaataaactattgttatgagggttagctaacatttcataaattttccccaaatgttccttttggttcttttcataaatttattctttattatttttcttttatctatgcattgcttttttatacaactacccaaatattttattttctttgctaattataggggctaaaacaaacttgttaagttagattgaattgaatgaaatagatatacacatactaatacagtatttttttcctcacaaaaccagttgaattaactgggctgtcttc

SEQ ID NO: 469258 - DNA, 766 bp, Homo sapiens
ggccagagccagagccagagccagagccacagtctgaaaagaagccaactctgagccagggatgaaggaagatgaggaaccccaggacccagagatatgccaaaccaggaaatggaaatgcaaagacaatacctaagcaggggcaggacctggggacagaatgtgcccagatgcatggggaggagctgacacagttctctagagctaagcgaaatccaagaaaggcaatgggaatctttcaccggcatctaccacaagaaattaaccacatgaaatgtgaggaagtcatgatccaggacacaggaaatttacagggcacttggaaggaggaattcaatagagctggagaactagaagcaataaagacaaaacgccttgaatatgggaagtggagaggaagtcttagcagtccccgcagccagcaagcttctggggacagtgtgacaagcattccctcctgctgccgcacagtgcggctgaaccctctggccttccgaggtcaccgtgggtcctctgagagagcctttgatttaacatgtaagggaattcccactggctgattaaatatttttatattttatcatcttcctgcagctaacagcttttggcatgcagggtatttttatgaacgttataagtaaatattatggggtcagtcacagagatgaacatggatttgcaagcctagggctggaagacattaggcctcacatttaaaacaatgtgggtatggaaaaaattaaaatatcgagaacttgaaaacact

SEQ ID NO: 469259 - DNA, 476 bp, Homo sapiens
ccgaataggattgccaccactatgttgaataaaagtgggaatccttgtcttgtttcagttcttagaggaaaaaccaaaagctttattttttcccctgttcatggggatagaggccaccaggtagggcagttatcagtccttggaggggtgcatgccaggaacggcagttctgctggttgtgagagtggcactgccagcggtcctgggagtgtgcctgctggcttccctgctcttggggaggcctccctgctgtgctgtactgcttgttccttgaggtatagagcactgtgtgggctcaggtgctggggttacagctgtaccactgggtccagttgtggatgtggcattgctgcctattgtatgagtgtgatgggaagagggaagtgctccagagaagtggagatgcagaggctcttgggtcccagggaaggatgcactgtagcagtgactttgttctcaaagtaataccatgctct

SEQ ID NO: 469260 - DNA, 639 bp, Homo sapiens
ttttccatacaagagcagcaactgagtgggaattttttttttctgaggctttgagactatggaactcacagggatagccgaagttgtgccaagcgctgctgctgtagtagtgaccacatcagatgtgactcctgttgtcatgaaagttacagtagagcaggaggcaactttaaacaagtcatcgcaatgtcaattcatgtcttctaaattagcaagtccgcataaagtgtttcagtggacaccttcaatgatgagcgacgaagcccccagtcctggtagtttcggcagctctctgatgcccttcagtagggttttcattacaggcaggagtagtgtttggctgcaaactccttacagccaaggacttctgacagcaaacccagggcttttcccaggattgtcacagctaagcgtccgctcaggggatcctgagctaatttgcactgatgacagtggaaagcaggcaaattcatgtagaggactttatctctctgtgggcatgtttcctctgttttagactttaaaaagccctgagctcaaagcctgaagccttgtccaactcaaattgccttctctgaggtgagaagatttttgcagggtgggagaaagggggacttttttttccctatcctgaaatgt

SEQ ID NO: 469261 - DNA, 589 bp, Homo sapiens
gccaattccctgtaacacgtaactgttcattttatctaaggtatgccgagcctcttgtacatggtgcatttcgatggcagagtcgagcttaacttcatgattcattatttcactcggaagaatgaagaagccggtagggctagagcagaaagagctgcaggaaaggctgcagagaaaagctcagaaatgcaagaaatggtggtgggagcaatggataaagctgatgaaagcagttgtgttccagatacactggacattgatggttctctgggggaacctatgtggagggtcagaaaaggagccaagacaaatcgatggtccatgaagctaagaggctggagtctgaatagaggagagattaaagagctatgcccctgcctacttaaacatttacagtttatagctatgaaaggaaaacagcaaagaagactgaaaaggaacagctagaaaagcagtgtgaaaactggtcaagtcctggaaatgaagaaaagaaaattattcacaggatccacacagttaagtgctgcaggaggtcaagtaatatgataactgagaattaaccattgggtcggtcaatgtggaggtcatc

SEQ ID NO: 469262 - DNA, 717 bp, Homo sapiens
acctggatcctggtggcctgccagctgttacccatcacatcacaaacattaccatcttatatggtactctccttaagacaaaatgtgagtctggggcttcattcccgaagtcagcaagaccacgaacccacagggaggggcaaacaccttttaaagagttgtaacactcaccgcgaggtccgtggcttcattcttgaagtcggtgaggccaagaagaaactccggacacatctgaagaaaccaagtccggacacaatgggttctaagaagtcagtgacaatttttaaattggagagcagcgagagaagcacgtgcagtaagcctgactgcaaggctgttaatgctgaaaagaaaggaagagcaagcaaattattacgtgcagagagcccagaaagctcctctttgctggaagtcagacctgaaaacaggaaagagatgaccgaactgagcatgcccagttctttctcccaactcctccgtcagatattgggtcaatttgttacttagtatgtgcaaatcttctatactttattaactttttgtccgctggttgacatttggttctctgattgtggctttatctactttcccttttaattcagtgatttttttccttatatattttgaggctatgtttttagaaacataaatctagaattgttatatattcttggtgagttgcccattttatcatgataaagtgtttttcttcatgtc

SEQ ID NO: 469263 - DNA, 788 bp, Homo sapiens
gtaatgatgatagtagtagtagtgatgatgatgatgatgatgatgcgatgatggcagcttgctccatgtcaagtactgctcaagtgccttatgcagagtaacacacttacccctcacatcaaccctctgagtccccagttgtcctctgtctctagaacctgcggttgctgcaaggttgcctccagctggaaggagcatcccttaatgtccaatcaccctctttcccacttgatggaagatttctactgatttatttatgcatttctactttatgaccttctttagtctaggtggaattaactttacccttgcttgggacaataagccttggaaatttaataggatatatttcagaaacactgttctcaatgtctacagggggcgagatatggtgccaaccacaagacacatattattagatttgctcctgctaaaaactaataataaactcattttacagtctgtgtttgagggctttttcctgttgaatgagcgtcttctctgtactcctctgatgcaagtcaaagccacaaccatgggccagtgctggatttcagagaaatgtgatgtaggtgtttatggcaatgctggtaataaccatgactcatcttccaagacagacctactatgtggggtagaggagaagagtggtttagagtcagagacctgagttagaatattgtctgtatgacttaatgagtagtatgacctttcttagtttcttaatttggaaaatagtgaacataatatctcctttatagcttattgtgaaggttatgtgtatagta

SEQ ID NO: 469264 - DNA, 729 bp, Homo sapiens
gagaaacttgtgtttcaaatactgatctgaaaatgtccagcatctggttttccccactggcactccctgctcaatgctaccaccaccatgttcagacagccactcctgatgtcgttgttgattgcacaccaatctgcagatattgtgggttgtaatgaacagcaaggcagaagagaccaccaggggaatgacggttgcaggagggcccctggagtctctaccctgaaagctgagcttgccaagtatgaatgtggcccttgtcctgagggatggcgcacaaggcaagttcctaaacagtcctgtgtaaacagccatgaccttggaggattctccttgcacgttgctagccatgagagtacaggagcctgcctctggaacccagggaaattgcctccggtgaacacagcttttacacaagcccagctttactgtgcatcaagaacagttgtttccaatcagccagagattccaggacccctgcctggggccgccttcactcagcaggtttacgaaggctgaagatggtaaacacaggttaggcaatatgggtgggcattatatagtcatggtttttgattagagcttttattagcttttgatattaatatgatataattatataatatgtatttatataattttttatatatttatttatatatttattatataatttatatattttttataatcagttatataatacatatttataatgtatagtaaata

SEQ ID NO: 469265 - DNA, 530 bp, Homo sapiens
tgaagctcatcagacccaagccatgggcgggcctagaagagtcaccacgaattcccactcccgccagagaaaatggcagcacagcccccagccttcaggtgctccctggcctgagggcgaggccttactggggaccctgcccccttccgcccaggactctatcttcctcctgctgccattcatggtcctggggcttggttccaaccctgctccgagatcagagtgggtgtggggagtggagagaggccaggcagtgagagcagacacccctgagcctgcagggacaggtgctgcgggtgctgcagctgcagctacacctggaagggcagatcctacttgttcccagctctcccaagagtacagggaggctcggatccattgctgcattttgggcggctgcagccctgcccaggagggtggggcttctgcctgctcggtggagtagagcaggaggcctggatctgcagggaagcaaaagttacagccaaaaccgtaaatcaatacatggaggttatacactagtttagccc

SEQ ID NO: 469266 - DNA, 2160 bp, Homo sapiens
tcacacttcaacatgagatttgagcgaggacaaatatccaaactatgtcaattagtaatgtttcagagtctttgtgtggaactgaacgcagtttgtaaggctggttgggaagtggtggaagagaaaatggttattattagggataaaagtgctcctacattttttcctacacttgatcctgaaaaagtggagtcattgagtttggagatttcaagagactcattaatcatgttaagaattaagtttcatttagtacatgctgagaaattggggataatagaagagtcaagggccattaggcatgagactctgggcaggttgagttccttaaagagtttggctagtttgaatataacggtaccactggcctgcttgtttcattttccagaggactgcggcttctgcggctccaagccagcgggtcctgtgaaggcgagcagacgcggagaaaggacgcgggagtgagagaggctgtacagttttggtgttcatcttagaggattcttcagcagaagtgatatttctttactgttttgtgaggtaatactgattttgaaaatatatataagctaaaaacagtatttcgttgatatcagtagtcattgtgttaactataaagtcaagtgccagcaaagaactttaaaactgtaaagctgtgtatagaactgttttgtgtagcatggaaatattctgtcagctttttaaagtcactaaatgttcttgattatcagcttgaaggtatttttgtattacaagttgacagttgctgggtgtagtggctcatgcctgtaatcctagcaactcggggctgaggtgggaggattgcttcagcccaggagtttgagaccagcctgggcaacatagcaaaaccccatctctacaaaaataaaaaatatgtctgggcatggtggcccaagtctgagtcccagttacttgggaggatcacttgaatgtaggatcacttgagtctaggagttcggggctgcagctatcatctgcagctataatcatagctcactgcagctatgatcatgtctcagcactccagctttggcaacagaacgagatcccatctcttagaaaaacaaagttgatagttaaagaacataagtggatgatggcatttgaggccactagtgaaagtatgttttctctaaaatatttctctaatagtgatataaatggctattttattatgatgtttgtatgtgttttgtatttctctgtaaaccatgctccagtctttgtttttctgttaccataatgtaagagaaggtcctggaacagagactaaatcccacgaaactgacattgttaaacacactaaaacagaagtacttacctcttgaagatttaatatataatggttgacatgatacatgtacatgatgaatgaccagatgcttatggtctacattttcctttatcctgttagtattaccttccttaatctttgttcattaacatgctaattcctcttcagtgtttattttctagtgacagaatgctaacatttcttacaccctggcagaagggagagaaatgtgttttggggtgggtaactaaatttttgagtgaaatatcataagatgagaatggaaagagggagacacaaagagttataacaaaaaaacaatggtttttttagccatttgactggctctttaaatagtctacaagacattcacgtttaacatcacttttagtgaaataaaatgtgccatactagtatgtgcttcaaaagggcaaatgtgctttagtgccctaaggctaaattttggtcatttgacatcagagatgttgtaagtattgcacttaatacgcacctatttctcaatagtgttattttttggctagcattttctttaccactatcttgttgatagctttttgttctctaaggttgaaacatgacagtgcttatctcaaacagattacccatctgcagaactaaggaaagcaatttatgtatgaaagaaattcttgaattcgtcattctcaacctttgaattaaagcttagactaaatagtaatatatcgtgggaaggattttggttttgtgatatttctgtgaattaaggaatagatgttaaccattattttgtagaaaagtgatttgtatgtggttaattataaataaaactggtaccagaacttatg

SEQ ID NO: 469267 - DNA, 713 bp, Homo sapiens
gcacagcacctactcacttcagagtttaggcttcagtaccatttatgtccctgtttctgcttcacctctgccatgagtaaaaagctccctgaggcctcccaagaagaaaagcagatgccagtggcatccttttatagcctgcagatctgttttggatttcttcatagttcaatcttggatggtgagttctcccaggccccaggcaggtccagagatgctgtctgggagccagggattgcagtaaaaaccttacaagaagtctaccttgtgtcttattctactgtgactaggctggcacccaaaccacaagacaaaatccttcacactcttccctcccctttccacaagcagaggggcctctccctatggcctctgccaccactgacccatggcgaattctgtcagaccaccactagtgttcacttaaggcccaagggctcttcagtcagctgtgacaaatgttgccaggcctggaactcacccctcagggtagtgaaatcccctctggcacagtgcaggtccagaaatgctatccaagagcctggacctggggaccccaagagcccgttggtgctctacaccatggccaagctgatacctgaggctggcatgtccgagtctcactcaaggtccacagcatactgcctgtgcatcgctgttggttactcagggcccatgggctctttagtcagcaggtgatgaaacctgcaaga

SEQ ID NO: 469268 - DNA, 908 bp, Homo sapiens
gattggaatggaatggaatgcaatggaatggaatggattcaactggaaaggaatcaaatggaacggaatggaatggaatggaatggaatggaatggaatggaatggaatggaatggagtggaatggaatggaatcaatggaatggaatggaatggaatggacaggaatggaatggaacggaatggaatggaatggaatggaagagaatggaatggaatcaacccgagtggaaaggaatggaatggaaaggaatggaatggaatggaaaagaatggaatgcaatggaatgcaatggtatggaacggagtcaacccgagtggaatggagtgcaatggaatcgattgcaatggaatggaatggaatggaatggaatggaatggaatggaatggaatggaataaaaaccggtggaaatgaatggaatggaatggaataaacccgagtgcaatggattggaatggaatggaatggaatggaatggaatggaagggaatggaatgaaatggaatggattggaatgaaatgaacacgagtggaatggaatggaatggaatggaatggaatggaatagaatggaatggaatcaacccgagtggaaaggaatggaatggaaaggaatggaatggaatggaatggaatggactagaatggaatcgaatggaatggaatgtaatggaatagaatggactggaaaggaatggaatggaaggaagtcaacacgattggaatggaattgaaagcaatggaagggaatggaatcaactggaaaggaatgaaatggaatggaatggaatggaatggaatggaatggaatggaatggaattaacccgaggggaatggaatggaatggattggaaagaacacgagtggaatggaatggaatggaatggaatggaatggaacgggac

SEQ ID NO: 469269 - DNA, 946 bp, Homo sapiens
tggaatcaacccgagtggaatggaatggaatggaatgaaacgacgtggaatggaatggaatggagtgaaatcaacccgagtggaatgcaatggaatggaatggaatgcaatggaatggaatggaatggaatggaatggaatggaatcaaaccgagtagaatggaaaggaatgcaatggagtggaaaggaatgcaatggaatggaatggaatggaatggaatcaaccggattggaatggaatggaatggaatggactggaataaacacgagtggaatggaatggaatggaatggaatggaatggaatagaatggaatcaactcgagtggaaaggaatggaatggaaaggaatggaatcgaaaggaaaggaatggaatgcaatggaatgcaatggtatggaatggagtcaacccgagtggaagggaatggaatggaatggaataaaatggaatggaatggaatgcaaaggaatggagtggaatggaataaacaccagtggaatggaatgcaatggaatgcagtggaatggaataaacaccagtggaatggaatggaatggaaaggaatggaatggaatggaatggacaggaatggaatgaaatggaatggaatggaatggaatggaatggaatggacaggaatggaatggaatggaatgaaatggaatggaatgcaatggaatggaatggaatggaatggacaggaatgtaatgtaatgtaatttaatgtaatggaatggaatggactagaatggaatggaatggaatgaaattaacacgattgaaatggaatggaatgcaatggaatggaatggaatcaaccggaaaggaatgaaatgtaatggaatggtatggaatggaatggaatggaatggaatcaacccaagtggaatggaacggaagggaatggaatggaaaggaatggaaagcaatggattggaatcaacc

SEQ ID NO: 469270 - DNA, 1319 bp, Homo sapiens
gactggaatggattggaatagagtggaatggaaaggaacggcatggaatgcaatggaatcaattagaatggaatggaatgggatggaatggacaggaatggaatggaaaggaatggaatggaatggaatggaatggaatggaatggaatcaacccgattggactggaatggaatgcaatggaatggaatggaatcaactagaaaggaaacaaatggaacggaatggaatggaatggaatggaatagaatagaatggaatcaactcgagtggaaaggaaaggaaaggaatggaatggaatggaaaggaaaggcatggaatgcaatggaattcaatggtatggaatggagtcaacccgagtggaatgtattggaatggaatggaattaaatggaatggaatggaattcaatggaatggagtggaatggaataaacaccagtggaatggaatgcaatttaatggattggaatggaatggaatggaatggaatggacaggaatggaatggaatggaaagaaatcaacctgattggaatggagtggaaggcaatggaatggaatggaatcaattggaaaggtatgaaatggaatggaatggaatggaatggaatggaatggaatggaatggaatggaatggaatcaactcgagtggaatgcaatggaatgaaatggaatggaatggaatgtaatggaatcaaaccgagtggaatggattggaatggaatggaatggaatggaacggcatggaatgaaatggaatcaactagaatggaatagaatggaatggattggaatggaatcgaacggaatcaacctgagtggaatgggatggaatggaatggaatgaatggaatggaatggaatggatactattggaatgtaatggaaatgaaacaacccgagtggaatggaatgcaatggattgcaatggaatggaagggaatggaatggaattcaatgtaatggaaaaaaaccgagtggaatgtactggaatggaaaggactggaatataatggaatggattgaaatcaacccgattccaatgcaacggcatgtaatggaatggaatggaatggaatggaatggaatggaatggaaaggaatggaatcaagtggaatggaatggaatggattggaatttaatgaaatggaatgtaatggaatggaatcaacccgagtggagtggaatgcaatggaatggaaatgaatgaaatggaatggaacagaacggcaaggaatgaacccgagtgaaatggaatggaatggaatggaatggaataaacacgagtggaatggaatggaatggaatggaatcaaccc

SEQ ID NO: 469271 - DNA, 1500 bp, Homo sapiens
ggccgaataggaacagctcgagtctacagctcccagcatgagcgacgcagaagacgggtgatttccgcatttccttttgaggtactgggttcatctcactagggagtgccagagagtgggtgcaggacagtgggtgaagtgcactgtgcactagctgaagcagggcgagtcattgcctcactcgggaagtgcaaggggtcagggagttagttccctttcctggtcaaagaacggtgtgacagacggcacctggaaaatcgggccactcccaccctaacactgtgcttttccgacgggcttaggaaacggcaccccaggagattatatccggcacctggctcggagggtcctacgcacacggagtctcgctgattgctaacacagcagtctgagatcaaactgcaaggcagcagcaaggctgggggaggggcaccggctattgcccaggctctcttaggtaaacaaagcagccaggaagctcgaactgggtggagcccaccacagctcaaggaggccgtcctgcctctgcaggctccacctctgggggcagggcacagacaaacaaaaagacagcagtaacctctgcagacttaaatgtccctgtctgacagctttgaggagagcagtggttctcccagcatgcagctggagatctgagaatgggcagactgcctcctgaagtgggtccctgacccctggcccccaagcagcctaattgggaggcgccccccagtaggggcagactgacacctcacacgaccgggtactcctctgagacaaaacttccagaggaacgatcagacagcagcattcgcggatcacgaaaatccacggttttgcagacaccactgctgatacccaggcaaacagggtctggaatgggcctctagcaaactccaacagacctgaagctgagggtcatgtcttttagaaggaaaactaacaaacagaaaggacatccacaccaaaaacccatctgtacatcaccatgatcaaagaccaaacgtagataaaaccacaaagatggggaaaaaacagaacagaaaaactggaaactctaaaaagcagagcgcctctcctcctccaaaggaatgcagttcctcaacagcaacggaacaaagctggatggagaatgactttgacgagctgagagaagaaggcttcagacgatcaaattactctgagcttccccaatccagcaaagcaagccaacattcagattcaggaaatacagagaacgccacaaagatactcctcgaggacagcaactccaagacacataattccaaactaagcttcataagtgaaggagaaataaaatactttacagacaagcaaatgctgagcgattttgtcaccaccaggcctgccctaaaagagctcctgaaggaagcactaaacatggaaaggcaaaatcggtaccagccactgcaaaaacatgccaaattgtaaagaacatcaagactaggaagaaactgcgtcaattaacgagcaaaataa

SEQ ID NO: 469272 - DNA, 5176 bp, Homo sapiens
tggaatggaatggaaagaatggaatgcaatggtatgggatggagtcaacccgagtggaatggaatggaattgaatggaatgaaatggaatggaatggaatgcaatggaatggagcggaatggaataaacaccagtggaatggaatggaatgcaatggaatgcaatggtatggaatggagtcaacccgagtggaatggaatggaatggaatggaatgaaatggaatggaatggcatggaatggattggagtggaatggaataaacaccagtggaatggaatggaatggaatggaatggaaaggaatggaagagaatggaatggaatcaacccgagtggaaaggaatggaatggaaaggaatggaatggaatggaaaggaatggaatacaatggaatgcaatggtatggaatggagtcaacccgagtggaatggaatgcaatggaatcgaatgcaatggaatggaatggaacggaatggaataaacaccagtggaatggaatggaatggaatggaatcaaccccagtgcaatggaatggaaaggaatggaatggaatgaaatgaacacgagtggaatggaatggaatggaatggaatggaatggaagagaatggaatggaatcaacccgagtggaaaggaatggaatggaaaggaatggaatggcatagaatggaatggacaggaatggaatggaatggaatggaatggaatgaaatggaatgaacacgagtggaatggaatggaatggaatggaatggaatggaaatggaatggaatggaatggaaaggaatggaatggaatggaatggaatcaacccgagcggaatgcaatggaatggaatggaatcgaatggaatggaatggaatcaacccgagtggaatggattggaatggagtggaatggaatggaatggcatggaatgcaatggaatcaactagaatggaatggaatggaatggattggaatggaatcgaacggtatcaacctgagtggaatggaatgaatggaatggattggtatggaatggacagtaatggaatggaatggaatggaatggaatggaatggaatggagtggaacggactagaatggaatggaatcaactcgagtggaaagcaatggaatggaaaggaatggaatggaatggaatggaatggactagaatggaatggaatggaatggaatggaatagaatggaatggactggaaaggaatggaatggaaggaaatcaacctgattggaatggaattgaaagcaatggaagggaatggaatcaactggaaaggaatgaaatggaatggaatggaatggaatggaatggaatggaattaacccgaggggaatggaatggaatggaatggaatggaatggaatggaatggaatggaatggaatggaatcaacccgagtggaatgcaatggaatggaatggaatggaatggaatcaacccgagactggaatgtaatggaatggattggaatcaacccgattacaatccaacggaatggaatggaatggaatggaatgtaaaggaatggaatggaatggaaaggaatggaaagaactggaatggaatggaatttaatggaatggaatggaatcaacccgagtggagtggaatggaatggaaaggaaatgaatggaatggaatggaatggaatggaacggaacgaaatggaattggaatggaatggaatggaatggaatggaatagagtggaatggaatcaactcgagtggaaaggaatggaatggaaaggaatggaatggaaaggaaaggaatggaatgcaatggaatgcaatggtatggaatggagtcaacccgagtggaatggaatggaatggaatagaatgaaatggaatggaatggaatgcaatggaatgcaatggtatggaatggagtcaacccgagtggaatgcaatgaatggaatggaatggaatggaatggaatggaatggaatgaacaggaatggaatggaatggaatggaatggagtggaatggactagaatggaatggaatggaatgaattcaacccgattggaattgaatggaatgcaatggaatggaatggaatggaatcaactggaaaggaatcaaatggaacggaatggaatggaatcgtatggaatggaatggaatggaatggaatggaatggaatggaatggaatggaagggaatggaatggaatcaaccccagtggaatggaatggaatggaatggattataatggaatggaatggaatcataccgggtggaatggaattgaattgaaaggagtggaatggaatggaatggaattcaatgtaatggaaacaaaccgaaacgtaatggattggaatgaaatcaacccgattggaatggaatggaatgcaatggaatgtaatggaataaactggaaaggaatcaaatcgaacggaatggaatggaatggaatggaatggaatggaatggaatcaaccccagtggaatggaatggaatggaatggattataatggaatggaatggaatcaatccgggtggaatggaatggaatggaatggattataatggaatggaatggaatcaatccgggtggaatggaatggaatggaatggaatggaattcaatgtaatggaaacaaaccgagtggaatgtaatggaagggaaaggactggaatgaaatggaatggattggaatcaaccctattccaatgcaacggaatgcaatggaatggaatggaatggaagggaatggaatggaatggaatgcaaaggaatggaatgaactggaatgaaatggaatggaatggaataatgcaatggaatggagtggaatcaacccgagtggaatggaatggaatggactgtaatgacatggaatggaatggaatagagtggaaccaaaccgagtggaatggaatggaatggaatggaaacgaatggaatggaatcaacccgagtggaatggactggaatggaatggaatggaatcaacccgagtggaatggaatggaatggaatggaatcaacccgagtgcaatggaatggaatggaaaggaatggaatggaatggaatggaatagaatggaatggaatcaatccgagtggaaaagaatgaaatggaaaggaatggaatggaatggaaagaatggaatgcaatggtatgggatggagtcaacccgagtggaatggaatggaattgaatggaatgaaatggaatggaatggaatgcaatggaatggagtggaatggaataaacaccagtggaatggaatggaatgcaatggaatggaatggtatggaatggagtcaacccgagtggaatggaatggaatggaatggaatgaaatggaatggaatggcatggaatggattggagtggaatggaataaacaccagtggaatggaatggaatggaatggaatggaaaggaatggaagagaatggaatggaatcaacccgagtggaaaggaatggaatggaaaggaatggaatggaatggaaaggaatggaatacaatggaatgcaatgaatgcaatggaatggaatggaacggaatggaataaacaccagtggaatggaatgaaatggaatggaatcaaccccagtgcaatggaatggaaaggaatggaatggaatgaaatgaacacgagtggaatggaatggaatggaatggaatggaatggaatggaagagaatggaatggaatcaacccgatggaatggaacggaagggaatggaatggaaaggaatggaaagcaatggattggaatgaaccgaatggaatggaatggaatggaaaggaatggaatggaatggaatggaatcaactcgagtggaatgaaatgtaatggaatggaatggaatggaatggaatggaatggaatggaatggaatggaatcaaccggagtagaatggaatggaatggaatggaaaggaatggaatggaatggaatggaatggaatggaatcaaccggagtggaatggaatggaatggaatggaatggaatggaatggaatagaatggaatcaattcgagtgcaattgtaatggaatggaatggaatggaatgaatggaatggaatggaatggaatggaaactactggaatggaatggaaaggaaacaacccgagtggaatggaaggcaatggaatggaatggaatggaatggaattgaatggaatggaatggaatggaatggaatggaaagaacccgattcgaatggaatggaagggaatggagtgaaatggaatggaagggaatggagtgaaatggaatggacggaatggaatggaatggaatggaatgcaatggaacggaatggaatggaatgcaatggaatggaatcaacccgagtggaatggaacggaagggaatggaatggaaaggaatggaaagcaatggattggaatgaaccgaatggaatggaatggaatggaaacgaatctaatggaatggaatcaactcgaagtggaatggaatggaatggaatggaatggaatgaactcgagtggaatggaatggaatggaatggaatggaatggaatagaatggaatcaactcgagtggaaaggaatggaatggaaaggaatggaatcgaatggaaaggaatggaatgcaatggaatgcaatggtatggaatggagtcaacccgagtggaagggaatggaatggaatggaataaaatggaatggaatggaatgcaaaggaatggagtggaatggaataaacaccagtggaatggaatgcaatggaatgcagtggaatggaataaacaccagtggaatggaatggaatggaaaggaatggaatggaatggaatggaatggaatggaatggacaggaatggaatgaaatggaatggaatggaatggaatggaatggaatggacaggaatggaatggaatggaatgaaatggaatggaatgcaatggaatggaatggaatggaatggacaggaatgtaataatggaatggaatggaatgaaattaacacgattgaaatggaatggaatgcaatggaatggaatggaatcaaccggaaaggaatgaaatgtaatggaatggtatggaatggaatggaatggaatggaatcaacccaagtggaatggaacggaagggaatggaatggaaaggaatggaaagcaatggattggaatcaaccgaatgaaatggaatggaatgga

SEQ ID NO: 469273 - DNA, 1244 bp, Homo sapiens
ggagagtacatgctgattggcttattctcaggatcataaacatgcctagggcatctcaggtaataggagttatttgtaaggaagcaagaactgaggttgctgtaaacccgtacggattcgccgctggtaactcagatacattccactgggacagctggaaccaggtcacatgtggtcaggactctttcccctcttgtctccatccacgggttgacttcaccatctcagactcatttcctcctgagtatggagtatgggacactcagcgacagcagttttcaagcttacattattccagttttatcactttccatggttgcaacttgaaaaattgggagaagtcctccagtcggctcagctcgtgtgaagtgtccttctttgggccaattaccagttacagcatagtgaaacttcaagaactaggtttttctggaccatcccagtgcgcatgaatcagatttaaaaagaaagaaacatacaagaaatacataaatcatactatatgacgatagcccagaagattgcatggaggatctttgtgtttcctgtagaagaaaagaaaaatggaatttccatctcttgcatcagcacttgacagctggagttattgttgaccaggcatcaagaaaggagggatatgcatcagaaatcattttgcctgaaataagcacaactccatggaggacaatgacacattttctctggtgatcttgtaattggggatgatgtaaacatgagtctaatctgcattttgtctaagaaattcttcatcatgagcatcttccaataaaacgtggttccttacaacatgagtttgcatgacaacttcttaccacttacttcatgtcacacttatataatggagactcatgtctcaatgaacgctttccagataaacagaagcacttctccaagagtaataaacacctgccatacaggttgctaagagctcaaataaagataaatttgttggcttgacccaaacgttctctggatctcaaattaatctaatgttatcagacatttggcactttctctatctcaaccaaaaagaccagtctttgatcatggtctcatcactctttttcaagaagtaattgttatttttcttcctggtgttcacgtgctgcttcagtagggtacatcatgatctccaaacgtagcacccaaactcgaacagaatataattcccagtcaaattgaatgtttgcttcttggaattactgttaatgaatataacacaa

SEQ ID NO: 469274 - DNA, 1612 bp, Homo sapiens
ttgatgggtgccacgggccagcatggcacacgtatacctattggcacctggaacaccagtgagacagagccgtttacttccccggaaagggggctaaagccggggagccaagcagtctggctcagcgggtcccacccccacggagcccaacaagctaagatccactggcttgaaattctccttgccagcacagcagtctggggtcaacctgggacgctcgagcttggtcgggggaggggcgtccaccattgctgaggcttgataacctgtgcagggggagcctctggtggggccatggtctcaaccaggatatccgggagactaagacgtctgctgagcactcccggtgtaccttgggaccaccacagaaagcaaaagagttggaactggttccaggccaaccggccaaccaacgctcccaaacccgaagggtcaggggttgtcacagagcccttttccggacagcctgacacctgtgtctttagtccggtggccgtgctaatcgcctttaagtggccaacagatgagaaggatgagcccattgaaataccatcggaagacgatgggacggtgctgctgtccatggttacagcccagtttccaggggtgtgtgggcttcgctacagaaatccagtgtctcagtgtatgagaggtgtccggttggtagaaggaattcttcatgcccccgatgctggctgggaaatctggtatgagctgcggcagttcttctgtcagtacggggaagtggtggatgtcgtcatcctcaagccattcaggacgtttgcctttgttacatttgcagatgatcaggttgcacagtctttttgtggagaggacttgatcattaaaggaatcagcattcatatatccaatgccgaacctaagcacaacagcaatagacagaaagaagtggaagatttggtggtaatccaggtggctttgggaatcagggtgaatgtggtaatagtagagggggtggagctattttgggaaacaatcaaggtagtaatatgggtggtgggataaacttgggtgcattcagcataaatccaaccatgatggctgcagcccaggcagtgctacaaagcagttggggtatgatatgcatgttagccagccagcagaaccagtcaggcccatcgggtaataaccaaagccaaggcaacatgcagagggagccaaaccaggccttcggttctggaaataactcctatagtggttctaattctggtgcagcaattggttggggatcagcatcaaatgcagggtcgggcagtggttttaatggaggctttggctcaagcatggattctaagtcttctggctggggaatgtagacagtggggttgtggttggttgatatagaatggtgggaattcaaatttttctaaactcatgataagtatattgtaaaaatacatatgtactaagaattttcaaaattggtttgttcagtgtggagtatattcagcagtaaggaggtatacctaatgtaaatgacaagttaatgggtgcagcacaccaacatggcacatgtatacatatgtaacaaacctgcatgttgtgcacatgtgccctagaacttaaagtatacatatacatatgaagagct

SEQ ID NO: 469275 - DNA, 718 bp, Homo sapiens
ataaggggtttgagcaacagcagtggccagagaagccacacccctgtcacacgtcttgcaagggggatcagggaaccctctctcctttgctatctgaatgatcaacttgtcttctattgtcaatgacaccttccctgctctgtatctttactcactgagtgttcttcatcttctccctagtgagggtttttgcatttctaaaaaccatacagccccacctggacctgccaaccaggaactgactcagcctgtgctattcggctataattcatctttggggaaaagggattccagatgtaaaggtcaaaccactcggaagctgcgttggcatctaacagagagattctgtgtcctgggacatctaccaaaccctccagtgaaagttattggtggagaaagaaagagaggcgttaaatgggaagaaggaatgaagactttactgtgtaaatcggagctggttcctctcgctaaaggcaagggctgctcagttctgggccctctccagtgtctccctgcgtcctccccatacagagtcaggcaccccttcctcttcgagacaaacctggaggaaaagaaaatgcactattcggagttgcaggcggtgatataacatccctcagaggctcattctgacaactcacaaagacttgtgtgaaaaagaaattcctttgataactgcttgtctggagatgactgacacctttcaaaggaaatgagg

SEQ ID NO: 469276 - DNA, 1424 bp, Homo sapiens
gtcctcctcctcagcctactcaacatgaagacgatggggatgaagacgtttaagatccactttaatgcaacgaataaggagtctgcagggccggtagttcagaggcttctgtatgcaggcctattgtggtggtgtcctagtaacaaagcagggtcacaaactggaaagatgagcactctctctgctgcttccagaacacagtgtgcagctcaaggcagcaccgaagggaggcaccaggtgccaacagaccacctgtggatacgccgtctagggctccccaaacaattgctgggggtggtaaagcccattactctcagcggagacctagcagaacttatgaagacaacagagaaatctgttgaagtaactaaagcatctttagagaatgagaactatagatattttgacatattactattttataaggttatctccacatctaattcatcaacatcatattctaccttcaaaacagattttaaatctgttgactttgttgctgcgaacaccgctcaatcctagttctaccctctgcttctgttccaatctaggactaccagtaattaactccctgtttctacaatgtactaaatagcagtccaagtggtcttttaaagcacaaatggaatcctgtggcttccaggattaaacccgtttcagttctttggagtgctaattgccacctgctatgtggaagaggacacccgtgacagctccatcttccttctagtaccctagcagtaaatggtgttcagtgcaaatttttacacgtatgctaaaatgaccacaataattctttaattgtgtttggagttttacagagggtatgtattttcctatataattatatttatttttgttcatgttaggatctgagctagttttaataaatatagatgatacacatgaaaggtacaaagcaaatagtgtgtgttttcagatggtccgtgttttaattttagttttagagagatagaccatacacacagaatatttaatattattcatacagtttaaaagtaacaaaacaaaatacaataatacagcaaaatatcaattttgaatgtccttgtaaatacctccataatctcatccctttcttctcccctttacaagataactattttgagaaacaacttcaggcttgctattaggccctacacatgacatcagcaacttattataactatcataatgtatttgttgtctgattcagtaatacgctgtagcatgtgtgtagcagcattctatcaagtgtaggtggtatatgtactccagtcaatcatagattcagtctttctacacagtcctgtatttctcagagctttgttcattccttttctttctttgttctctaatcttgtctgcctgccttatttcagcaagatggtcttcaaactctgatattctttctcttgcttgat

SEQ ID NO: 469277 - DNA, 2400 bp, Homo sapiens
agctgagaggagagttaaggctctctggtcattatatccctgaccctacctgcaacttaccctcccgttactcccaggtatgggtaaaagtccaggttccacctctggtttctattcatacctgatggctggtggaggaggactgctcattactgccgggtgggggtgggagttccagctcttcactaggtctccaacgttaccttctcaactaggagggatacgtgtgcctcattactgctccccacatggggtgtatgtccctttattgctaggagagtcaggaccctcatctggaggtctgttggaattttctggaggtccactccagaccctgtttgcctgggtatcagcagtggtggctgcagaacagtggatattggtgaaccgcaaatgctgctgcctgatcattcctctggaagtttcgtatcagaggagtacccggccgtttgaggtgtcagtccacccctactgcttctttgctggaggcgaacgtttggatcaaggacaagcttcaacacctacccctcctcaggatgcacagtgcatagttagtaaagccaaaaatgaaattgatgttctctttcataaaatgccattcttgttctttactccctaaataactaaagtaaagaactttactccctaaagaactaatttattattaaaatattcagaatctcatctatagatttggaaggattgcaaatatcaaggatccaataactaacatattaacagatcattaaagcagctggtagaaatggagagaaaacaattgtagaagccaaatttggaggtcaagaatgtgaccaagtttctatatggcacattttcctgataattgactgttgttcttaccatattgccctaaaatgcttcctgtgactgataattgacattatggtggcatgtgaggggcttagagaaaatgtcacactgttccagggcttaatcttgctactgggccttcctatagtatcccattctccacacttgtaggaataaacaacaaccatacaggttatcctgggagttgcctaggaatgttgagaaaatacagaaataaaatctattaaaaccataaggaactttggacctggaaaatgatgtcttgattttgtgcattggcatcatggcaaaattaaacttagcatcatgtagccaaaggaaatattaatgagaagtcgttacctaataatacttgcaaagtcttgataggtattgaagggggaatggaggggagagcatggtccttgtccagggcataatagcaataaaagggctagcaaagcatgcttttagagaatattttgtattagcatgaggttaattacctctttcaggacattgacagaaagaacattaataagaacagagaagcagagaagccttggaaatcatgcttttatctgaatggaggaagaaataaaaggagaggtaaaatgaaatcttgccacactgcatgctccctcttctctttgttcctgtccatttctaatattaaaataagaacctttcttaactaagtatgcttcaatcacattgcagaatcttttcatgtttatcctgaatctgaagacgtgggagaattagaaatgattcactaaaaactggatccagtccagcacacccaaagcagagtgttttagagtctttccagattgagagtggatagagtgtagccatttattactttttattatggaaggcagtaatctgtaaggtccatcctgactaaaataggttctttttctccctttaaatagaatgccaaatagaattggcagtgcttccttgaaagttaattcaaatgtacgtaactattttaagggctatattgatattacatatactttctgaacaggatagctagaccacataataatgttgcagtatttataaaagtactttagtataatagcgtatgtttatggaacactacttttagtcaggcactgttctaagccttaatacgtattaactcatttaatcctcgtaacaaccctttgttgttattatcattcctcttgtataaaatataaaactaagcacagagaagttaaggttgccccaaattacacagcaattatgtactagaggccaggatttagcacgagcagtttgattccagaacccagtctcttccatgcccttctgctgctctggacacacattacctgtatctaacttataacattccttcttctattgtaatagatttcttgatcaatggatttcccatttatagtcggtaattgtgattgcagtactgcttattctattctttttcctgcctgggggataaattcatttcaaattataacataataaaatgtacatatagtaaatatggctggaatataccaggaaacaagcagttttgccatcaattatgta

SEQ ID NO: 469278 - DNA, 2014 bp, Homo sapiens
tgatttacatttggctccttgttacttatgtccctcccacaacacatgggaattatgggagctacaattcaagatgagatttgggtggattctgccaactggcttcatttccagaagattttagagtgtcaatgttcagctcacaactcctggactgagtgctctaactatggaggacttgtaacaggctctgactttgttctctggctccctgaggttagaaatacactgtactgttggtgccaagggcccctgctggcaactgtgcacccagtcttgctgttggtggtgttggtacagagttggggagctggcgggttcaggtctgtgtgcgctttctgtgtcccgcagattcccccacaccaaaccctctgggctccatatcagctggcttgctgcccctatcacttctctaagcagctctccctgccaagtcaagtgtccatggtgatcgagcggtctcctcctgctgtagttccagaggcctgtggcaagagcggaagggccagtcacaaagacagaggacatgagcagagaagcgtgactggggaaaagacatgttttggacttcatgaattttgactatctctgagagagctgagtgagggtatgtgattggacgtccgatgcacaggtatggctttcagagagagaaacacagttatgcactacataatgacattttagtcaatgactaaaatgcagagatgactgtggtcccctaagagcatagtggagatgaaaaatttctgtcacctagtgatgtcatagctgttataatgttgtagcataacatattcccttttgtatatttagacatgtttacatacacaaataccattatattagttgcctacggcattcagcacagtaacatgctatgcaggtttgtagcctagaagcaataggctagaccatatagcctagatgtgtagtaggctatcccatctagttttgtgtaagtacattctatgaggttttcatgatgacaaaatcatctaagaaggcatttgtcagaagactcatattcataattaattataatagacctccaagcagctaccagtgattgttctccagcagaaaatagggggaaacacttctgtcatccaaaaaaaaaagcatgaagaagttaattatttcttccctattgtacggaattatgttcacagtttttagttaccattgtcacgctgtgggtatcacaggctgcactaagagaactgactcggagcccagtctactagggcttaaatctagccttgtgatttacatgttgtgtgacatcgcagagatcacataacttcacctgcaacattggaaatagtaacacctaccacacaggattgctgagggaatttaatgaattaatacttgtaactattaaaacctttctcaaaataagttttgaataagtgttaaagaagattagcagttctaacttctaagacctctttaagagtcatgacttcctgaagatagctatttttggattgaaaataacatctggaagataaggtgatagattttgttcatctgtattatagagcccatgtaaatatatatcttatgaatatactttttttttttagcaaatttcattccagaaacatgttgttgagtggtaggaatccagatattccagtaaaattgagtgtaggaatgactagactaatatttaaaaatgacacttgagagctaaatatttttataaaagagctacatctagtgggaagatggacacagaattacaaacatatcctttaaaattcaaaacaaaaatgaaggggatatggaaagaacagataagaaatttatttgtagacatgccctatattggcagccttcaaagagtctaagacaatgtttaaatgacggtatggtgggaaccctcttcagtaatagaaatgttgagattttggactgtggatctgatgagaatttgaattttttttcttccagtgtcagtttagggtcctgaaacttgtttcatgataatacactcttaaagatt

SEQ ID NO: 469279 - DNA, 1018 bp, Homo sapiens
gcttccacattttcagaagcgaaaattccactgaagacaggttaagtggaagaggcatctttgaacagctgtaggactgggtgctgggctggtagaatgacagcagattcaggtccttccaagtccattagaggcactcaagtcatggctccaccgggtcccatcctggagatcacacttgttggcaagattccccagtccccaggagaggaatacaaggaagctgtgaagcaaccatttggtggagagatttgcgtgactaaaagagagctgagtgctaacaggcaagacaatgggacaaaggccttgaaggcatttcagaaacatttcaggctccctttcccatcgcaggagggctcagaagaaaaccggaagatgtgggaaagtttggaacttcctagagacttgttgaatggctttaaccaaaatactgataatgatatggacaatgaaatccaggctgaggtggcctcagatggagatgaggaacttgttggaaactggagtaaagatgactcttgttatgttttggtgaagagactggtggcattttgcccctgccctagagatctgcggaagtttgaacttgagagagatcatttagggtatctggcagaagatatttctaagcagcacaaattcaagaggtgacttgggtgctgctaaaggcattcagttttaaaagagaaacacagcataaaagtttggaaagtttgcagcctgacagtgcgatagaaagaaaatcccattttctgaggagaaactcaagccagctgcagaaatttgcataagcaacaggagctgaatgtgaatcaccaagacaatcgggaaaatgtctccagggcatgtcagagacctttgcgctatggtaagcaccggggctatatgaagacttgttatcaaggagttcaaaattttcttggggagattgacaggtgaacaagtaattacagtctaatgtaaaaaaaaaaaatagttacatgaaaaaaaataaatagtttttgatgggagaacaggc

SEQ ID NO: 469280 - DNA, 1196 bp, Homo sapiens
cagcacagcagcaggggccgtgcgcgtcacggataagaacctcttcccttcccttgtccaagtgtgcactcacaattgctccatctatacacttccatctggcattgctgctgcctgtgaagtatgtggtttcctggttccctgtgggtacccacagccactctatttccagtctggctgctttgacggcatggggtttgcagctggagttccaggtcacttccgatacaatactgatgtcaggctgtgccttgctagacgggagtcagaactgaaaccaaagaaactagattctgttgttcttgcatttgtacaaatcttctgtgccttaaaggctgcagagattggcataaataaaaagaagccaagtgataatatcaaagacaatgggcaaaaggccttgaagccacttcagagaccttcacagcagcccctacctcatagtcccagaggccaaggggggaagaatggtttcatgggctggaccaagggccctgctaccctgtgcaacctcaggaaagtgctcctgcatcctggctgctccagctccagccatgactcaaagggaccaagactccagaatggtagattcactggcagcttgcatctctcacctggaaaagctccaggcattcaacgccagcctatgagagcagctgtggccactgtaccctgcaaagccacaggggcaaagctgccaaaggttattggaacccactgcttgcccaagtgtgctctgaataagggaccactaacccgaaaacaaatcaaagaagaagaaagagatgcagaaaaaatggaagatgttatgggagtatataaagcatactgattatttgaacttatctttccactggtttttaactttatggccaatttcttgtaagtagtttttaaatagtgacagatgttatttaataatcaaaattatctgcgtggtataacacaaagagagattctagtgtaaattatgaacattatttaataacatcaatattgggtcattaattatataccacattgattcaaaatgttaataatggggtaaatgtgtgtatttgttggaacaatgagagttgatacatatagaggctctgtactttctgccaaatttctctgtaaaactaaataaagttgctctaaaaataaagtctactaatttaaaaaaattctgttagaagttacaaaaataaaga

SEQ ID NO: 469281 - DNA, 918 bp, Homo sapiens
cagccttgttgctcacacaaagcctaacctctgttagagcagtacagaagggaaatgtggagttgaagtccaacacagagtccctactggggcaccgcctagtggagctgtgagcagagggtcacagtcctccagaccgtagactggtagatctactggcagcttgcactgtgcaaccggaaaagccacagacactcaatgccagtctgtgaaagcagccagaagggaggctgtatcctgcaaagccacaggggcagagctgcccaagaccatgggaacctacctcttgctttagcatggcctggattaacatctttctggtgaatccagaagggactgtactgaagagacccctgacccaaggaaatagactgcagcaccagttggctgactttgggaaagtagtggggtacccaagtaaagaatgggattgggaacagctgcagccacccagccatggctctggacccaggcatctctgtgttcttggggacccaggaagcccctgccccctcaggcttaaaagtgcctgctcccactccctggcctctcccagctcctggcacccgctctggggcaaagcaaagttgtggctgagcctggccactgttgtgatccagctgggtgtgtgtgcactcaggatggtgctgacatgccagccccctgctgccttggtcttctctagactttggatcctgacaaacacaggaggaaggctgaggaggggctgagggcagctcagtgcagacctgaagaaaactataaaagtgacactgtacctgtttctgtgcctacgcctgatgaaactgacagcttccgctacctgtttcttagaacaatcactcttgaaaaccagccaccatgctgtgaggaagaccaagcaatcctgtggagaagcccacatagaggagaactggc

SEQ ID NO: 469282 - DNA, 1909 bp, Homo sapiens
agagacttgtcgaatagctttgacaaaaatgctgatagtgatatgaacaataaggtccaggctgagatggtctctgacagagatgaggaacttgttgggaactggagcaaaggtgactcttgttatgctttagcaaagagactggtggtattttgcccctgccctagagatttgtggaactttgaacttcagagagatgatttagggtatctagtggaagaaatttctaaggagcaaagcattcaagaggtgacttgggtattgttaataaaggtattcagttttataaaggaagcagagcataaaagtttggataatttgaagcctgacaatgtgatagaaaagaaaagcccattttctggggagaaattcaagccagctccagaaatttgcataagtagcaagaagcctaatgttaatcctcaagaccatgaggaaactgtctcaaggccatatcagagaccttcactgcagcccctcccatcgcaggcctggaggccctggaggaaaaagtggtttcatgggcagggcccagggtctccatgctgtgtgcagcctaggaacttggtgccctgtatcccagctgctccagccatggctgaaaggggccaatgtacagctcaggctgtggcttcagaggatggaagccccaagccttggcaacttccatatggtgttgagcctgtgggtgcacagaactcaagaattgaggtttgggagcctccacctagattgcagagggtgtttggaaactcctggatgcccaggcagaagtttgctgcagggatgggaccttcatggcaaacctctgctagggcagtgcagaagggaaatgtgggagtccctactagggcaccaccacagcaccacctagtggagctgtgggcagtgggtcacggtcctccagatcccagaatggtagacccaccgacagcttgcgccgtgcaactggaaaagccacagacactcaatgccagcgcatgaaagcagccaggagggaggctgtaccctgcgaagtcataggggcagagctgcccaagaccatgggaacccacctcttgcatcagcgtgacctggatagttttatacttttatgtttatatttaattctttgatctatttttggtttatttttgcatatggcattaggtaaaagtccaaattcggggaggggggagggatagcattgggagatatacctaatgctagatgacacgttagtgggtgcagcgcaccagcatggcacatgtatacatatgtaactaacctgcacaatgtgcacatgtaccctaaaacttaaagtataattaaaaaaaaaattaaaaaaataaataaataaataaataaattaacataaaaaaaaaaaaagaaaaaaaaaaagtccaaattcattcttttgcatgtggatatccagttttcccagcaccatttgttgaaaagtctgtcctttcccccattgaatagttgtggcacccttgtcagaaatcactggaccatatagatgataatttatttatttgggggctctctattctattccattggtttatatgcctgttcttatgctagtaccacaatgttttgaatacggtagctttgtattccttacattgcaaagctaggttgttatttgaaatttctttcttttaacgtaagcatttttagaaataaatttcccctttagcagtgcttttgttgtcttacaaaagttgtggtatgtttttacttttattcatctctaactattttataatttccttcaggactttttctttgatccattggtttacaatctttcctcattttctttctgtatattatatggctatgtatgtacacatatgtttattgcgcactattcacaatagcaaagacttggaaccaaaccaaatgcccatcaatgtgactc

SEQ ID NO: 469283 - DNA, 1187 bp, Homo sapiens
tgggggtgccagagaaagccttgtccctgccgtggcccagcagcctcctgcttctgagacccccaccgggggatccaagattccttgagtagtgacatgataatctacactgtaggttattccaatgacccagataattttgaatatcagcaaatattgcacatttttcccaatgaatgtcctcatcaggacgctatttcttatgctgtcattatccagagatgccttcttcataggaatcacgctgctctcaagtgtatacatggtcattcttttgtccaggcatcagaggcactcccagcactttcacagcagcagccttatattaaggacttctctagtgaaaatggccaccaagaccatcctgatgctggtgaattcctttgtgctgatgtactcagtggacttcatcctctcatcatccacaatgctgttatgggtaattggccctgtcacctatggtgtccacaagtttgtggtcaatgcctatgccactgtcagtcctctggtgctaatcagatctgataaaagaatcatcaatattctgcaaaagtttcaatggaagtgccatctatttttaacaagttggtgataaaattttctaaaaattatttctttgtaatcaattaaattatacaaaaagcacataattttctttctgatttaaataaaacatgtgaattgtacttttataatatctcaatatcttttaattttttggtgccaagaactgtgtgctttcctcagttcaatgtccactatgattttgtattctcaaggtctgtctctcaccccttcattttaattttacctttatacaggaaaatgttattttcttcttgagtacactcttatgcggctcctattggcaagcaaatctcttagttttaatttttgaaattattttaatttttcttatttattgaagatatttagctatattcaaattctagcttgaataaaaaaaatttttaagcataattttaaaatttgtttttaattgaaaataacattgtgtaagtttattatgtatgttttgaattacatatagattataaaatgattaaatctagctaattaacaaatgcatgatctaaaagttattgttttttgtggtgaaaacagttaacatcaactaccttttcatttttcaggactgcaatatatcataattaagtatggctgcc

SEQ ID NO: 469284 - DNA, 519 bp, Homo sapiens
gcgagcgtggttctcatggtaggggctgaaggaccctcccatcctagtgacagggccacagcatgtccaaggaggccccagaggaggtcccgggagtcctgggagagcctggttagcctccctgaagggaggaagtggggttttgtgagagggatggtgcagcagcccccacacctgctactccgtgtggccggggaggtatggagcgggtccccggggccaggtggagcccctcacacctgtgtcctcaaggacccacaccaggacaatggccataggcgggcacctgcagccgccctggccagcagtgagacgggcagagagcccagccagatagcccggttcctgccccctcccgcctgcccgcacagagagggctgcatgcaggtcagcagcaagcagggaggctttgggggtgctgggggctgctttgaaaggcacccctgagctaagacttggctgttgggaaggaatcacctccctccctccagccgtaaaaagaactggacatcagcttcc

SEQ ID NO: 469285 - DNA, 1657 bp, Homo sapiens
aggtttgttacacagcctggaagagcaggaactgtgtctccttcactttccccagcacctatctcagagccgggcccgcagtaggggctcatgcatttgttggctggcgttaacgtgaaccagcacgtcggctgtggatgaataactttccaggtcccaaaattgtccacttgcttctctttcaccgttgggctgagaacgtagctactaataaacccggagtgggagggggtatcagtaacagagacaagtgtgtgattgaaatggaagacagctggagagaagagaacagaaataggcaggacgtgcacggccagcaggaagttgctgtgattcccgcaaagcatgtcttttcattcgtgaagaggggattagaaaggacaaggacaccagatgtcatcaagtcccatcctttgacctctgtaggaattccctgtgcatatttctgggttctttggagaaatggtcgattcaacatcagggataagtttggaacatcttgtcatatcagccagcaaagaaactgtcaaagacggtaaaagcatgccaaaaagacttaggaaccagagcctattggccagaggtaagacaattaccaaaacaaacaaacaaacaaacaaacaaacaaaaacaggaagaatccagaatctaatcaggacctaactactaactacaaacttataggaaatacactctaggatagtaaattttgtgtgtcaacttgactgggccatggtgtgcccagatatttggtcagacattattctggatgtttctgtgagggcgtttttagatgagattaatatttaaattggtagactaagtaaagcagattcctccctttttggatcattgtagacctcatcctacagttgaaggcctgaatagaacaaaaaggttgacccaccctaactaagagagaattcttcccatctgacagccttccagagggagcatcaacgtttttcctgtctttgaaccagaactgaaacatcagctcttcctgagttttgagcctgctggcctgtggactgaaccacaccatcagctctgctgtttctcagtttttcagattacactctcttggggctccaggtggttggctgcagatcttgggacctgtttgcctccataattatgtgacccaattctttgtaataaatccttctttctctctctttcttctattgattctgtttctctggagaaacttggctaagccacacctccacagggataaaatcaacaaaaagcagagtataggacattttataggccaacagaaagtattactcatcaacaaataaattgccccccccaaaaaaaacaatagagggaggggtaatttatagattaaaagatatttaaaaggcatattcaccaaatgcaatggaagagccttagtttggattcctatttgaacaaaccaagttttaaaaaaagtatgagactatcagggatatttggaacatttcctggatacttgatgatgttatggaaatattgttgattttttttggatgcaatgacatttacagggctatgcttttaaaagtccttaaattttagagatatatactggaatatttatgaataaaataatttcagtatctggaatctgcttcaaaataattcatcaagagtaggagtatgggtt

SEQ ID NO: 469286 - DNA, 4254 bp, Homo sapiens
tggaaaggaaacgattggaatggaatggaatggaatggcttgaaatggataagaaatgaaaagaatgtaatggaatcgaatggaatggagttgaatgtattggagtcgagtagaacagaattgaatggaatggcatcaaatggaatggaaacgaaaggaatggaattgaatggactcaaatgttatggaatcaaagggaatggactcaaagagaatggactcaaaagaaatggtcttgaatggaacttgttcgaatataatttaatcgaatggaatgcaatagtatggaatggaatggaatcgaatcgatcggaacgaaatcgaatgcaatggaatagaatagactcgaatgtaatggattcctatgtaattgattcgaatggaatggaatcaaatggaatgcaatccaatggaatggaatgcaatgcaatggaatggaatcgaatggaatgcagtggaagggaatggagtggaatgaagtggaatggaatggaatggaatggaattgaaaggaatggaatggaatcgaatggaatggactggaatggaatggattcgaatggaatcgaatggaacaatatggaatgtggaatggaatcgaatggaatggaatcgaatggagtgaaatggaatggaatggacgcgaaaggaatggactggaacaaaatgaaatcgaacgaatggaaagcaatggaatggaacgcactggattcgagtgcaatggaatcgattggaatggaatcaaatggaatgatttggcatggaatggactcaaatggaatggactggaacaaaatgcaatggaatagggattcgaacggaatgcaatggaatgggaatggaatggacttgaatggaatagagtcgaatggaatggagtcgaatggaatgaatggaatgcaatggaatggaatagaatggaatgcaatggaatgcaacggagtggaaatgagtggaatggaatcgaatggaatggaatcgaatggaatggactggaatggaatggactcaaatggaatggatggaatggaatggaatggaatggaattgaaaggaatggaatggaatcgaatggaatggactggaatggaatggattcgaatggaatcgaatggaacaatatggaatggtaccgaatggaatggaatggaatggaatggaatggaatggaatggaacagaatggaatggaactgaaaggaatggaacggaatggaatggaatggaacggaatggaatggaatggaatggaatggactcaaatggaatgaaaccgagtggaatggaatcaaatggaatggaattgaatggaaatgaaaaatcaaatggaatggcatcgaatggaatggactcgaatggaatgtgctcgaatggaatggaatcgaatggattgatatcaaatggaatggaatggaagggaatggaatggaagggaattgtaccaaatgtaatagacttgaatggaatggaatcatatagaatggactcaaaagcaatagagttgaatagaacggaatgcaatgaaatggaacgatgtggaatcgagtggaatggaatcgaatggagtgaaatggaatggaatggacgcgaaaggaatggactggaacaaaataatggaatggatcgttatggaaagacatcgaatggaatggaattgactcgaatggaatggactggaagggaatggactcgaatggaatggactggaatggaatggattgaacggaatggactggagaggaatggactcgaatggaaaggaaacgagtggaatggaatggaatggaatggcttgaaatggataagaaatgaaaagaatcatggaatggaatcgaatggaatggaatcgaatggattggaacgaaatcgaatggaacggaatagaatagactcgaatgtaatggattgctatgtaattgattcgaatggaatggaatcgaatggaatgcaatccaaaggaatggaatgcaatgcaatggaatggaatcgaatgaaatgcagtggaagggaatggagtggaatcaagtggaatggaatggaatggaatggaattgaaaggaatggaatggaatcgaatggaatggactggaatggatggattcaaatggaatcgaatggaacaatatggaatgatatcgaatggaatggaatggaacggaatggaatggaatggaatggaatggaacggaatggaatggaatggaatggaatggaagggaatggaatggaacagaatggaatggaactgaaaggaatggaacggaatggaatggaatggaatggaatggaatggaatggaatggactcaaatggaatgaaaccgagtggaatggaatcaaatggaatggaattgaatggaaatgaaagtaatagaatggaatggagtggaatggaatgcagtggacacaaatggaatggactggaatggaatggacacgaatggaatggactggaaatggaatgcaatgaaatggaacgaagtggaatcgagtggaatggaatcgaatggaatggaatcgaatggagtgaaatggaatggaatggacgcgaaaggaatggcctggaacaaaatgaaatcgaacgaattgaatgtaatggcatcgaatggaatggaatggaatcaaatagaatggacttgaatggaatagagtggaatggaatggcaccgaatggaatggaatggaatggaatggaatggaaaggaatggaatgttcacaaatttattggactcaaatggaatggagtcaaatagaatggacacgaaaggaatggtctcgattggaatttattcgaaaacaatggaatcgaatggaatgcaataatggaatccaatggaatgtacaagaatggaatggaaacaaagggaatggaattgaatggaacagaccagaattgaatggactggaacagaagtatggaatggaatcgaatggaatggaatcgaatggattggaacgaaatcgaatggaacagaatagaatagactcgaatggaatggtaccgaatggaatggaatggaatagaatggaatggaatggaatggaacagaatggaatggaactgaaaggaatggaacggaatggaatggaatggaatggaatggaatggaatggaatggattcaaatggaatgaaaccgagtggaatggaatcaaatggaatggaattgaatggaaatgaaaaatcaaatggaatggcatcgaatggaatggactcgaatggaatgtgctcgaatggaatggaatcgaatggattgatatcaaatggaatggaatggaagggaatggaatggaagggaattgtaccaaatgtaaaagacttgaatggaatggaatcatatagaatggactcaaaaaatggaatggatcgttatggaaagacatcgaatggaatggaattgactcgaatggaatggactggaagggaatggactcgaatggaatggactggaatggaatggattgaacggaatggactggagaggaatggactcgaatggaaaggaaacgagtggaatggaatggaatggaatggcttgaaatggataagaaatgaaaagaatcatggaatggaatcgaatggaatggaatcgaatggattggaacgaaatcgaatggaacggaatagaatagactcgaatgtaatggattgctatgtaactgattcgaatggaatggaatcgaatggaatgcaatccaaaggaatggaatgcaatgcaatggaatggaatcgaatgaaatgcagtggaagggaatggagtggaatcaagtggaatggaatggaatggaatggaattgaaaggaatggaatggaatcgaatggaatggactggaatggatggattcaaatggaatcgaatggaacaatatggaatgttaccgaatggaatggaatggaatggaatggaacggaatggaatggaatggaacggaatggaatggaacagaatggaatggaaatgaaaggaatggaatggaatggaatggaatggaatggactggaatggaatggacacgaatggaatggactggatggaatggaatcgaatggaatggaatcgaatggagtgaaatggaatggaatggacgcgaaaggaatggactggaacaaaatgaaatcgaacgaatggaatggactggaatggaatggattgaacggaatgcactggagaggaatggactcgaatggaaaggactggagtggactttactcgaatggaatggaaacgaatggaatggaatggaagtaatttaaa

SEQ ID NO: 469287 - DNA, 618 bp, Homo sapiens
cagtcttgtgaggtgtggatgcagtcctgcaacttcaccttcaggagaagtgcatacagatcatgcagaaggtacctccaagtttatctccacttttctttcattgcacaagctttccacaccatatcccgctgccaaggaaaaagaactccaatgtgcaaggaaccgctggggcacaaactgtggccattctggccagctcccggaggctcttgtgtcctctggcaagaatccctgaacatggcttggactccagtgtgggccctctagtgctcccagacagccatactgagaaggagcagcaggaatatactgataaatactcaacatataaagttggacctggtttaaatagtcaattatctgatggcatcaacctttgttttgatccagtcagttggaaacactatttctgtaggatctatgatgggacacttcagatcccattgaggactgtagtgaaaaaactaatatcccatgataaaaactagaaacaagctacctgtgaaagtgctttgcaatgtgtggattcatctgacagagttaaaactttgttttgattgagctagttagaaatactctttttgtagaatctatgaagggatatttcaaagacca

SEQ ID NO: 469288 - DNA, 787 bp, Homo sapiens
gttctaaatcctgaaaactggtaaacaaagcacagtgcaaatgtgcccatgttgtcacctctaaagccggctcctgagcccccgccattctcctggggaagcaggaaagcactcctccgctaaccgccttcctcttagggacgaactccctggagactttcttccttcacctacatcgggttttcccaacacgcaataaacaagtgcagggactatcctcagaacataatggtgagtacagtcacatagcaaggatggttaaagccctaagaagagatggaaccacttggactgcatggcagttggggcccaggaccaagctgtggggagctccagcattcaggggccgcagaggggacccagcaagtggaacacacagaggaggcatggcaagagacccaggcgggaagccaggaggaatgctgttcctttcatcagaggatgcagcattcaaggtaccatcttgggagcagaaaccaggcccttaccagacaccaagcctgccagcacattgatcttggattttccagcccccagaactataagaaataaatttcttttcttcaaaattatccagtctttgttattctgttacagcagcacaaaagagactacgacaaagaagaagggtaagaaaagttgggtgggagaggtattgaaatttggcagtgttgctgggcaagctgcactgaggaggtgaattgaaggaaagtctttggttaagtgagggatgagttatatggatatcgaggatagagttttgcaggcagaaggaaagcagcaagtg

SEQ ID NO: 469289 - DNA, 1298 bp, Homo sapiens
taagaagctgtgttgcagtctgggaacccagggagttttccacatgaccataccgctggcttccacacctggagcagctttccacatgaccgtaccgctggcctccacagctggggcagtttccactctaccctaccgccagcctccactcctagagcactttctacactaccctaccgccagcctccacacctggagcagtttctactctaccctaccgccagcctccacacctggagcagtttctacactaccctaccgccagcctccacacctggaacagtttctactctaccctaccgccagcctccacacctggagcagtttctactctaccctaccgccagcctccacacctggagcagtttctacactaccctactgccagcctccacacctggagcagtttccactctaccctactaccagcctccacacctggagcagtttctacactcccctactgccagcctccacacctggggcagtttctaccctaccctactgccagcctccacacctggagcagtttccactctaccctactgccagcctccacacctggagcactttctacactaccctacggccggcctccacacctctgacatatttgactatttgtttatgaaaggccaccagctaactgcatcctgatggaaaacaatttgtaagttactaggcactgagaggataatgaccttcaggagaggaattctagggtggtattcagccaaaggacagcagaaggaaggtatgccatggagagaccaccataaataattaaaatgtagcgcacgtggtgcgaaatgtactcaaagctctatggggacacagtaagaaatgaaagtacctattaaaaatttaaaagtactgactattatgaatataaatggcatttcaaatactatgggcttcaaaatgttctatcctatgcgataagaaatgaaagcctctcagtccaaaagttaggttttgaagggagatttgtacatgttttgatggacacttagtgtcatgatgaaaaataaattgtctctatttttcctttccaatgtcaataattttgtatgattatatgccttctgaaattgctgttgttctattgcattttcaaggtccacttaagtactcaaatctactcacagttatatccctgggtggcagtttaaaaaatgtaaaatattacatagcaaaacaaagtctgtctttaaagaaagacggcatttttatctccatttaaaggaaagttatagagcttttacccatctcaaaagcccagaaaggttaaataacta

SEQ ID NO: 469290 - DNA, 1495 bp, Homo sapiens
cgggaaggcagctaaggctcagtgagaaatggagcgcagcgccggtgggctggcactgctgggggacccagtacaccctccacagccgctggcctgggtgctaagtccctcattgctcggtgccagcaggtcgggctggctgctccgagtgcggggcccgccaagcccacgcccacccggaactccagctggcccgcaagcgccgcccgcagccccagttcccgctcgcgcttctccctccacacctccctgcaagctgaaggagtgggctccagccttggccagaaagtggctcccacagtgcagtggggggctgaagggctcctcaaatgccgccaaagtgggagcccaggcaggggaggtgccgagagcaagcgagggctctgaggactgccagcacgctgtcacctctcactatgaaaatgctttgaaatgcaacaggaggagatgtgaagacacaaagaacaagtgtgtagtgacacatggctatcagaacacactaaagaatccacactgcttcccctctatctagaaaaggaaggctctaagtcacctcctcagcaggaggaggtatttattcttactaaatataagatagttattacacctacagtttctatcctatttagagtttatttgaactttgaattgtgacaaatatttaatgtttctggtcacttcttttgagtttgagcgaagtacagggcaaagaatgtattcaactcagacaaaaaagcctgacattttgtcagcctagctctgccactataaatgttgagtcctgcatctctctcagctatggttcccaataagagaattgaactcgaataagattctaaagactagacttcagcagtctttgagatttttaaacttataaagaaaattttgtgaaagtgggcattatctggacagggtctgtaaccttcataaaattcttcaaaaaattcctttttttaaaagtaacttcatatccactgtgtcagattctctttcagatatctttgcattataacagtcacttttgaaaagtggattaaaggctttgaagcctctaaactgggctggaaatttaggaggtcatatggcttagcacactacaacatatagacattcaaaaatattttatgaatgcatacaaaatgttattaaatatactgagaatctggcagtaaatatggtaggagacaaatagttttcatatcattttgtggtattataaacctttcattataagcatcttataagctttctttaaaggcttttgaagggagatttttagctgaataaataaactgacttcaagatttttttaaaaaaaatgacatgtaattggaaacctggtaactccatggaatttggtttcagagtgttgctttcatttttcatatttttgtgtatatttttgagagtaaatatataggatggacttcagttttctaacatcatgaatgtgagttgaaatttatagtcttggcagatgtttcacacatga

SEQ ID NO: 469291 - DNA, 521 bp, Homo sapiens
tttcctatttgcagttacttcaaaccccaccatgctcacagattcatttccaggaaactgtgtccccatccccatcctaaacatcgtaaacactccagctgacactgggcattggaggtcaagaccaccctttgcacttgtaaagggcaacttccctgagagagaaggattctcccatcgatttcaggatatatatcccccccctgcgccctgcctaccaatgccaactgtggtgggggcttccgacaaccaaaatgcccccactcgcttccaaatactccccaagaaggtcagagcgctgcccctttggctgactcagtcccaaatcaaaggctttactgggtgtctgagagcatatgtcacctggaacctcatcacattgagaagtcagcttcagcagagactggagaatctagttttgagctttcctgcctcttcctgttagaagaggataggaaaaattttgaattagagaatccagagtccatcatattgccattgtacttataattttttgatgc

SEQ ID NO: 469292 - DNA, 544 bp, Homo sapiens
tgaatggtatgggtatctgaagatgtttggtgagtgtgctaaggagtggactggattgtcactgccaccagtgcagccggcttttattcccttatccggccccacccacatcctgctgattggtccattttacagagagttgattggtccattttacagagagctgattggttccgagctcttcccccgtaggaaggcagctgagaccggcgagaatttaagggcagcacgggcaggtggcagtgctgggggacctggcacacccttcacagctgctgggccgggtgctaaggcccttactgcccgccggtctgccgctctgcgtgcgggacctgctgagcctgtgcccactcggaactttcgctggcctgcgagtgccatggacagccccagttcctgcctgtgccttttcctccacacatcccgcaagcagggggagccagctccggccttggccagcccggagaggggctcccacagtgcatttttgtgggttcctccataagaaacatagaactttatgttatttaatatttttataata

SEQ ID NO: 469293 - DNA, 1376 bp, Homo sapiens
agtgctggacctggacctcaggtccagctatgttagaaggcattgtgatgtccaatgaaaagtggattttatatgacaaccggtgatgaccagctcagtggttggactgagaagttccaaagcccttcccatagccaaatttgcaccaaaaaaaaggtcatgttcactttttggtggtctgctgctggtctaatttaccacaactgtctgaatcctggtgaaaccattatacctgagaagtatgcacagcaaatcatcggcactggtcaacataaagggcctggttcttctccacaacaatgcctgaccacatgttgcacaaccaatgcttcaaaagttgaacgaattgggctacaaagctttgccttttctgccatattcaccttacctccctccaaccaactaccacttcttcaagcatgtcgacaactttttgcagggaaaattctcccacaaccagcaggatgcagaaaatgctttccaagagtttgtcgaattccgaagcacatatttttatgctacaggaataagcaaactaattttttgttggcaaaaatgtgttgattataatgactcctattttgattaataaagatgtgtttgagcctagttataatgatttaaaattcacagcccaaaaccacaattacttttgcaccaacctaaataatatttctggcatctagtgatatttcaatacacgggtacaatgtgtaatgatccaattaaggacttctcgtatttcaattataatctattcttaataactctagaatactaataaagataaatagagaagaataatagcaggcaaaggtaccatactggatagtttttctcattggatgtagcaacaatgaaactgctaagattttcatttcttcagttgagctaaatcaagctgtcagattagggctttctatcctctgttttttcctcccattaagtctttcacaagaacaaaatgtgtttcttgcttgcttcccctgtaacagggcttacttcattattttcaaaggacttttttgtttgcaggtcagattagggctttccatcctctgttttttcctcccattaagcctttcacaagaacaaaatgtgtttcttgcttgcttcccctgtaatagggaggagagattcctctgcctcatgtgcattttcttcagataaatgagataaagagtaacgataattggtatctaaagaaactgaaataaagtttacttaaagttatcctggcttaatatatgtatatgtgatatcaaatatgctatttttttaaatataattttatttgataatatgcatataaaatatccatgtaattgactgtttctacttctcttacccagatgtgagtcagtacagaaaaaaaa

SEQ ID NO: 469294 - DNA, 1197 bp, Homo sapiens
ccgaggccccgcggcgcagcaggctccgcaccacgtccaggtggtccgcgcccacagcggcggcgcaccctccacggtctcgccatcgaagtgcaccgagccaccggcctccacgctcgcgccgcaccggtccaccaggtactccaccacgtccaggtggccgtagcaggcggcgatgagcagcggcgtccccccgccggccacctagccagtcagctcgtccagttcctcccggctccggccgctgagcagcttctggagcagctgcagcctgccgtcacgggcggcgttgtacacggcggtgcggaggtctttggttcgggcctccgccaggccgtgagccggccgcagcgggagggggagacagaggatcagagcccagacaggcgggagccaaccttcaccgtctccctcgccgccatcttagggtgcaaaggatatggtgcagcaagtgaaagagagtgcgggcatggactgggagtctgaaagacatcccatgttgaaagctacccagggctccaagtattcacagacacagagtgtgcattctgtctccagtgtcaaccaccaagattctgtgctaggaatcatgctttcaggagggcttcgaggagaaattctccacaagccttttatgtttccttgtccatgtaatcaagctaggtttgtcaaaccaattaggccagttcaagacccctggaaatggagactaacagatttcctgcagcagctcaatggtgtcaatcacccaacttctttctgttctgccaccacagcacattccattttcattctatgtaattcctcacagttaaaagatcacacacaactaacacaacttaaataattatgtctttgaacaataaaaaccaaagaaagaaaaaatttcatatatttggccatcattttcattagagagctgccaagggactttctgactttctcactttgccttatgctgaccaactggagtctatttatcatggaacccatccacagcctttgtaatgaccatttaccttgtaccatcaaaagccaaagaaaatcgcacaatctagcatacctgttctgtcagaatcccttctatattagtttcctagggcttctataacaaaatacaataaattgggtggcatagaacatgaggaatttattgtctcacagttctggagactagaagtccaaaatcaaggtgtc

SEQ ID NO: 469295 - DNA, 1000 bp, Homo sapiens
acacggaacgcgcccagggccaccgggaggcggccggcgcgggtcagagcgtcccccagcctcaggcaccggccgcggtcgggctgcgccagccgggccagcatggagcggaagagcccgactgctttctggtactcgctcgcgcggaaggcctcgtcgccctcctccaagcgctgggcgattggcttcccgcagcagcagcccggacactggggcggcggcgggaccggctcagtgctgatccccgcggggctgcgaccgtgcgggcctggagcgaaggcgcggagcaggggcgatgagctgctgctgggaactggccggcgggagcgccgccacagccttcgcctgcagaaccaaaaaaacggttttaaaaatcttttttttttttttaattatactttaagttttagggtacatgtgcacattgtgcaggttagttacatatgtatacatgtgccatgcgggtgcgctgcacccactaactcgtcatctagcattaggtatatctcccaatgctatccctcccccctcccccctccccaccacattcctcagagtgtgatattccccttcctgtgtccatgtgatctcattgttcaattcccacctatgagtgagaatatgcggtgatttacatgtgatttttcccattattttgatttctttgttgaatttctctggtacatttctgaattgtgtctctgctttctcagtgttcaggctcttcttaaaacagccattttgaattctttgcctgccagatcgttcatctgtatgtctttaagttcagttgctgacaccttgttttgtccatttggagaggcaacttttcctaagctatcattattatatgtagatatacatctgtgtacacattaatgatttagatatttatttgagtcttctcagtttgggtgtgtttgtgactacttttaagtgggcttattaagaaattttgagcggacttatcatcgtattccattttagcgttagagagagc

SEQ ID NO: 469296 - DNA, 774 bp, Homo sapiens
cgtcgcctcagcgcctaattcaggcagtcagcgccgcagctgcagcagggcagaaacctatgccctcggcgcagtccccttggctgcacagttcccagtgcccgcgacccagaactctgggtgcaggcaaaggaagagcctgcagcagccacctgcacagggtgcgggcagcagccttggaggcaaccccagaccatgctcctacaccagccaggcggatcccagggccagacgccgcccagaggctaattcaggtggtcaggccccagctgcaggagggtgggaaccggccgctcagccatttcctgggtgctgccctgtacccagtacctgcacaccccgctctgggctccggcaagaaagaactgactctaggctgcagtggtaacctgcacaaggcgcgcagcagcagctgtggcaaactccgaccctgccagtgccaccagcagtgcggacccttgggccagaagcctccacagcgcctaagtcagggtgttggtccccagctgcaggagggcaggaactggcactcagccccacctcagaggctgcatggtgcccagagccagggcccagctcttctagcgcaggttgtggaggggccaggggccacccaggctggagggcagtgagtattaaagtgccagtgtggactgaggcaccaaagaatcacattattatgtcatataacttgccttatttgtagtgacccatgggcttggaaacagaaccatttgcagctgtcagggaagtgcacagtgcctgacctttccc

SEQ ID NO: 469297 - DNA, 1505 bp, Homo sapiens
gattgtggatatattttaggtagaattttatgtctggctttcactttagcctggtccctacctcaagcataagtcttggcagcttacatgtggctttgggcctccaggtacacagaaatcaagaattgaggtatgagaacctccacatagatttcagagaatttgtggaaatgtctggatgtccaggcagaggtgtgctgcaggggcagagtcctcatggaaaacttctgttagcacagagtggaagggaattgtggagtcaagcaccctctggggcactgcctggtggagctgtgagaagagggccaccatcgtccagactccagaatggtagatccactgacaacatgcaccatgcacctggaaaagctgcagacactcaatgccagctcatgaaagcagccagaaagggagctgtaccctgtaaagacacagaggcagagctgcccaaggtcatgggtgcctacctcttgcatcagtgagacctcgatgtgagacatgaagacaaaggggatcattttggagctttaagatttgactgctctgctggattttggatttctatggggcctgtagcctcttcattttgccaatttttcccatctggaatggctgtatttatgcaatgcctgtatctccattgtatctaggaagtaactaacttgcttttgattttacaggctcataggcagaagggacttgccttgtcttagatgagactttggactgtggacttttgagttaatgctgaaatgagttaagattttggaggactgttgggaaagcatgattggttttgaaatgtgaggatatgagatttgggaggggccatgggtggaatgatatgatttgcctgtgtccccactcagatctcatccagaattttagctctcacaatccccatgtgttgtgggaggaacccagtgggagagaatacatagtatgcaaaatacttcacacttcacacatataatttttaattgaattgttaaaaaaataagcacaattgcctctgtttcaccaatgattaaattaagatgaccataatctatggaagctgcccaaagaaaaacagtaatggagtcagatataaatgaatcagactccaaatcccaatcactttttcataaagtgtttataattcatttttagagaaatatgagttgatgtatggatttttaaaattcattgatcagtcaataagcaaatactttgctatcaactgtgacatgctaagcatattaggtgaatagtacaaaatgttgagcaagatgcccttggtcccttccttcgagagattacattcccataggagggtggtaaattcagaaatacatcaatataaatagagtatataggcactacataggtaagttgtgtgtacaaatattggcattgttttaaattgcaaataattagcgaattgatctgaaattagccaaacggtttgaaaattaatatacaaactaatagaccaagattctccaggacacttactatattac

SEQ ID NO: 469298 - DNA, 5103 bp, Homo sapiens
cagcccaactcactcagaaacaccatgagacacttttgggtgacccttctgaagacagacaccgaaagcattgaagagaaaaacagctctcaggataaacattcagaccctcgtagcagtgttccggaatcctatgtgagggacaaaaactcagaacccagcagcagtgttctggaattctgtgtgagcgacaaacattcagaacttcgtagcagtgttctggaattctatgtgagggacaaacactcaaaacccagaagcagtgttctggaatccaatgtgaggtacaaacactcagaacccagcagcagtgttctggaatcctatgtgagggaaaaacagtctgaactcagcagcagaagcagtgttctggaaccttatgtgagggacaaacactcagaacccagcagcagtgttctggaatcctatgtgatggacaaacacccagaacccatccactgtcttctggaatcctatctgagggacaaacattcagacactcgtagaagtgttctggaatcctatgtgagggacaaacactcagcaaccaggagaagtgctctgaaatcctttgtaagggacaaacaaacagaatccagtagcagggttccagaatcctttctgagggaaaaacattcagaccctcttagcagtgttctggaatcctatgtgcgggacattcagaccctcatagcagtgttctggaaaccaatggacaaacactcagaaatgagctacagtgttctagaattctatgtaaggaacaaaccctcagtaccgagcggcagtgttctggaatcctatgtgagggacaaacactcagaacaaagcagcagtgttctggaatcctctgtgaaagacaaacactcagatcccagcagcagtgttctgataccctatgtgagggacaaacactcagaacccagccactgtgctctgaaatcctatctgaaggacaaacattcggagcctcgtagaattgttctggaatcctatgtgagggacaaacactcagaaacttatagcagtgttctggaatcctttgtgatggacaagcaaacagagcccagcagcagtgttctggaatcctatttgacagacaaacactcagaactcagaagcagtgttctggaatcctttgtgagggacaaacattcagaacctagtagcagtgttctggaattgtatgtgagggacaaacactcagaacccagcagctgtgttctggaatcctattgttctggaatcctgtgtgagggacaaacactcagatccagcagcagtgttctaaaatcctttgtgatggacaaaaattcagaccgtcgtagccgttttctggaatccaaagtgagggacaaacactcagaacccagcagcagtgttctggaatcctatgtgagggacaaacattcagaacccagcagcagtgttctggaatactctgtgagggaaaaacattcagaccctcgtagcaatgttctggaatcctatatgaggggcaaacactcagaacccagcaacagtgttctggagtcctttgtgagggaaaaactttcagaccctcgaagcagtgttctggaatcctatgtgagggacaaacactcagaacccagcagcagtgttctggaatcctgtgtgagtgtcaaacattcagaacccagcagcattgttctggaatcctgtttgagcgacaaacattcagaacttcgtacctgtgttctggaatgctatgtgagggacaaacacagaaccgagcagcagtgttctggaatcctatgtgagggagaaacactcggaacccagcagcagtgttctggaatcctatggacaaatattcagacactcagcagtgttctggaatcctatgtgagggaaaaacattcagatcgtcgtagcattgttgtggaattctatatatgggacaaacactcagaacccagcagcagtgctctggaatcctatgtgagggaaaaacacccagaacccagcaggattgttctggaatgctatgtgtgggacaaacactcagaacccagcagcagtgctctggaatcctatgtgagggaaaaacacccagaacccagcaggattgttctggaatgctatgtgtgggacaaacactcagaacccagcagcagagaacccagcagcagtgttctagaatcctttgagagggaaaaacattcagacccttggagcagtgttctggaatcctatgtgatggacaaacactcagaacccagcagcaatattctggattcctttgtgatggacaaacattctgaccctagtagcagtgttctgcaatcctatgtgggggacaaacactcagaacccagcagctgtgttctggaatcccatgtgagggataaactctcagaacccagcagcagtgttctaagtgttctggaatcctatgtgagggaaaaactctcagaaacctgcagcagtgcactggagtcccttgtgagggacaaacaaacacaactgagcagcagtgttctggaatcctttgagaggcaaaaatattcagaccctcgtagcagtgttctggaatcctatgtgagggacaaacactcagaacccagcagcagtattctggaatcctatgtgggggacaaacacaacccagccacagacagcagtgttctggaatcctatgtgtgggacaaacactcagaacccagcagcaatgttctggaatcctttgtgagggtcaaacactcagactctcagagcagtgttctggaatcctatgtgagggacaagcattcagaccctcatagcaccattctggaatgctctgtgaggaacaaatattcagaccctcatagcagtgttctggaatcatatgtgagggacaaacattcagacaatcacagcagtgttccggaaaccaatgtgagggccaaacactcagaacccagcagcagtgttctggaatatttggtaagggacgaacattcagacaatcttagcagtgttctggaatccaaagtgatggagaaacactcagaaacgagctgcagtgttctagaattctatgtgagggacaaacactcagaacccagcagcagtgttctggaatccttagtgaatgacaaacgctcagatcccagaagtagtgttttagactggtttgtgagatacaaacattcagaccctcaaagcagtgttgtggaatcctatttgagggacaaacactcatcacacagccactgtgttctggaatcctatctgaaggacaaacattcggagcctcttagaagtgttctggaatcctatgtgagggacaaacattcagaaaccagcagcagtgctctggaatcctttgtgagggacaaacaaacagagccaagcagctgtgttctggaatccgatttgatggacaaacactcagaacccagcagcagtgttctggaatcctttgtgagggacaaacactcagaacccagcagcagtgttctagaatcctatgtgaaggacaaacactcagagcccagcagcagtgttctgcaatcctttgtgagggtcaaacactcagacgctcagaacaatcccgatagccctgttctgcaatgctctgtgagggtcaaacattcagaacctcgtagcagtgttctgaaatactatgtgaggtacaaagcctcagaactcagcagtagtgttctggaatcctatgtgagtgacaaacactcagaaaccagcagcaatgttctagaatcctttgtgagggacaaacatttagactctcaaagcagtgttctgttatcctatgtgagggacactcagatccagcagcattgttctagaatcttttgtgatggacaaacattaagggacaaacaaacagaaaccagcagcagtgttctggaagcctttgtgagggaagaacattcagaccctcgtagcagtgttctggaatcctacgtgcgggacaatcactcagaagccagcagcactgttctggaatcctatgtgaaggacaaatattcagaacccagaatcaatggattcctaaagtctcgtagcagtactctggaatcctatatgaggtacaaacacgaaaaacccagcagcagtgttctggaatcctatgtgagggacaaacactcagaacctagcaacagtgatctggaatcctatatgagggacaaacattcagaccctcgtagcagtgttttggaatcctttgtgagggacaaacaatcaggacccagcagctttgttctggaatcctatgggatagacgaacactcagaacccagcatcagtgttctggaatcctttgtgagggacaagcaatcaggacacagcagctctgttctggaatcctatgtgagggacaaacgttcagaccctcgtattagtgttctggaatcctatgggagggacctacaaacagaacccagtgacagtgttctacaatcctttgttagggaaaaacattcagaccctcaacccagcagcagtgttctggaatcctttgggagggataaacattcagacccccttagcagtgttctggaatcctatgtgagggacaaacactcagaacccagcagcagtgttctggaatcctatctgaaggaaaacattcggaacctcttagaagttttctggaatcctatgagcagtgttctggaatcctatgtgaaggaccaacagtcagaacccagtagcagtgttctggaatcctatgtgagggacaagaattcagacactcgtagcagtgatacagaatgctttctgaaggaaaaacatgcagaccctcatagcagtgttctgaaatcttatgtgagggacaaacactcagaagccagcagcagtgttctggaatcctttgtggacaatccctcagatcccagcagcagttttctggaaacctatgtgaggaacaaacactcagaacccagcagcagtgttctggaatccaatgtgagggacaaacactcagaaaccagcagcagtgttctggaatcctatgtgagggacaaacactcagaacccagcagaatttttctgaaatcctttgtgagagacaaactttcatagccctgtagctgtgttctggaatcctatatgtggaacaaacactcagag

SEQ ID NO: 469299 - DNA, 1951 bp, Homo sapiens
tgaagagattgtgctgattcctttaaaggcatattcccaagatgcagccagacctggtcacctgtctggagcaaaggaaaaagccatggagtatgaagcacccaggtcttactatacctgagagaattcatactaaagagagaccctacaagtgtgaagaatgtgacaaagcctttaaacaatcttcaagactgaataaacataagaaaatttatactggagatacaacctacaaatttgaagaaagtggcaaagctttttactattcctcaggccttactcaacataacatagttcatactggagacaaaccctacaaatgtaaagattgtggcaaaatttttaagtggtcttcgaaacttactatacatcagagaattcatagtggagagaaaccctacaaatgtgaagaatgtggcaaagcctttaagcaatcttcaaaactgaatgaacatatgaaagctcatactggagagaaattctacaaatgtgaagaatgtggcaaagcttttaagcaaccttcaggccttactctacataagagaattcatactggagagaacccttacaaattcgaagaatgtggtaaagccttttattggtttttaagctttactaaacatatgataattcataggggagagaaaccctacaaatgtcaagaatgtggcaaagcttttaagtggtcttcaaaccttactatacacaagagaattcatacgggagagaaaccctgcaaatgtgaagaatgtggcaaagcttgtaagcagtctttggggcttacgattcaaaagagaattcatactgaagagaaaccctacaaatgtgaagaatgtgagaaacactacaaatgtcaagaatgtggcaaagcttttaagaagtctttagaccttaatgtacataagataattcatagtggagagaaaccctacagatatgaagaatgtggcaaattcatactgaagagactgtacaaatgtgaagaatgtggcaaagcttttaagtggtcctctgagcttactatacatcagagaattcgtactgaagagaagccctataaatgtgaagaatgtgtcagagtctttaaacactcctcaaaactgaatgaacataagagaaatcatactggagagaaaccctacaaatgtgaagcatgtggcaaagctttttaagcagtcttcaggcctcactatacataagagaattcatactggagaggaatccagaaatgtgaagaatgttgcaaagccttttaccggtccttaagctttactaaacataagagagttcatactggagagatacactacaaatgtcaagaatgtggcaaaactttttcttgttgctcaagtttactcgacataagagagttcatactgaagagaaatcccacaaatgtaaagaatgtgggaaagcctttaaccagtcctttagccttactaaacttaggagaattcatactggaaaaaaatcaaacaaatcggaagactgtggcaaaatcttttaagtattgctcaaatatatccagccataattcatactaaagattatgcctatgaacctaaaaaagtttggcaaggcttatgaatacacctcaaactttcctaagcattggagaaatatcaagtggtttaatcatatgaaacacagcaagagctgccctttttgtgccttccctatcattaccaccagcaccagaaactccagttgccccaagctcaaaataaaagccctaagatactttattgttagtgtatagaaatgttactgaattttttatgttgattttgtatcctgcaagtttaataaatttgtttattctaataattttttgtgaagtcctaggtttttctatgcttaagagtatatcatctgcaaggaaaatataatttatcttcttcattttatttaagactgctttgattttgttgaataatttttctgtcttggt

SEQ ID NO: 469300 - DNA, 850 bp, Homo sapiens
gggcaggaagcgtcgcggtcgctcccggagcggggccgtctcccccgcgtcccccttagcctggctggggacaggcgctgggacccggctcgcggtcagggcggcctgggatcggcccccgcggcccctgcccagcgtcctgcgctgggaacttcgaggcgcctggggggctcgaaatggcagtggaggagaccccgcgagtgtccaggcgcccagggcccctccgcattgtcacgggggccctcacaccccggcaggtgtcaccccctggacgggcttctgccgacgatcccttgggcacctcctcttccccatcctgtggggccggctccgccctcccaggtcccaacttcaccgggctgtgcaggggcccaggcgtccccgatttcaccgggctgtgcagcggtcccggtgtccccgatttcaccgggctgtgtaggggcccaggggccttggtggcctctgactcacatggcctgttcatggcaacccccgctttgggaaagctacatcatgagggtcgctcctggcgtcctaaagtgaacctctccgagctttcagccaacgacctgcgccaggttgtcctcaggtctgtgcccctcccggacctttctgcagagatgaagcaggtgcccggacaaggtgtcagctggagaacacgccacacgtaaacaaaagacatgtatgaaaaaccacacaggagccaggacgtgtaacaagttctgaacagtagcagcaaagggatgagttgaacactgaggggtgagtgtttgtggggtggtctcgaaggcctgtgccctgatgaacaccaaggggtgagtgtgtttgtggggtgggagtcaaggctgtg

SEQ ID NO: 469301 - DNA, 1099 bp, Homo sapiens
gaccagatggcctgtgacgtgcaaacccctgccacccccacacttgtcacatgggttgccctgagggctggggagctgcaggcgaatatgtacaaaacatatgccagccgccagcactccggcacagactctatgatgaaacaaagctgaggaacatactctaagtatcatagaccatgagatttgaacacccaaacatcaatggtttgcctgctgcaggtaatcgccgccgtgtgggccacagagcagggcggggctgggtgcagagccggaaccccgtggggcagagcccgggccccagaggctcctacgcccttgaaaccctgaatggaggtcttctgagccggctggatgtggttctgcccgtacggaagctctgccacacgtgtatgagctgtgggtggaaacgctggaccagagcgctcaggcagagcctctccgcggtgctgcaacgctgtgccagagcggtccggctgtgggtggaaacgctggaccagagcgctcaggcagagcctctccacggtgctgctctcaggccgcaggccctgggctatggtccgcggcacgcaggcaggaccatcgtgagctctcactgtgttaccccagaggagatgctggaccaggaacccatggagggcgcagcacaagatttcctcctctatcacgagaggcacaccgtcccgcatagggctgctgttaggcccatgggagccaatgtctgtgaagatgcgggggcggtgctgggctcgcagcaggtgctagggaaacgcgccattgctgctgacttcctgagggatgagaatgacggctgcaaaacaacagcaacgaagcacacctcctaagttgagaaggcttgtctggcattacacgctgaagcctgtgaatactgagtgtttccatttcaggcagtattttaaggccatacagttacggccaaagcaacgaggagctgagaaatggtgatttaccctgcagacggttttgagcggcgtggttgagattcgtgaggctttaggttattttcctgagttcagaatcaggagtccttgtttcgtgtctgactccacagccctgatttcctgggcttctctgtccaccc

SEQ ID NO: 469302 - DNA, 3307 bp, Homo sapiens
gctggccaccggcaatcgccggcatgcctcagcttgtagacgcatcgccccagtctctgcctgcaccctccaagggccgattctgtactctcaaaacgctgagatccctggagcttgcagaaaagctgagcatcacagaccgtcccaaccacctcctttctggtactgaccaaaacccagtaatgatcgcgtggagggtggatgctggggacaggcacaggccctgctggtcccagagaagccgcctccatgctgtcagccccagaatgactcaaacaagcccgtcacaccttcggcaaggaccagggaccccaccctctcgttcctatggagcctaccacccgtggtgcctgaggctgtgtctgtcctgcgtggagcctggcgtggcctgcatgggggtgtgggtcctcctccctgaggctgtgttggtgaccagtaacccgtgctgaccgcgggtgaccagtaaccggtgctgaccgcgggtgaccagtaaccggtgctgaccgtgggtgactagtaaccggtactgacctttgacccactcatgtctgtttcttctgcccctttttatccgtcccatagacggtggcatttctcagggctttgtcttcaacccccttcccttgccactcaacctgcctccctggggccctcacccaggcatgtggtttctgcttcttccagcgctgacagtgcccttcccggagtgctggctgtgggcggagcctgtgcgcccgtgcgtttgtgcctcgcctgtttggtcctcaggcagtgtggcgggcagggcatgaaacagcccctgaccgagcaccctctgggccctgttctgtttccccccaaggtactcctgtcatctgtggatttttctgtttttttgataaagcattctgaaataaatcaaagccaccatagaatttcagataccatcatcacacttttcaatacgaacaataattcatctaatactctgcttcacattcctccaattatcctagaaatactgtttttcctgttcatttgctctgtttttctggaatggctttttgtgcccctgtgactatttgagtctgtgacaccaggtgaccccaccctaatgtgtgctaagaatttgatgtagaaaataaaataatattcaaagcaaagggatataaccttatgccagtggttctcaattggggacaattttgtctctggggatacttggcaatgtctggagacatcttacattgtcacggtgcaagggagctcctggtatttaattgtagaggctgtgaggtgctgccaaacgtgccacaaagtacagggcaggcctcgcaaagcaaagactcatccagcccacgatgtcaattgtgcagaggctgggaaactggcctagaagtgtcacaggacactggccacaagcccacacaaaggaggacctctctctacttttgttgtttctactgtttgttgaacatttactaaatgccagtcagtatcctacacactctggatacaacacctcatttaatcccaaaacaactctgagagccatgtattccataccattacccccattttatagatgagaaaattggagcccagagaggggccaggaaacacgagtgttccttttgtgtgaagtgtcttgccagcctcatttccctgggatgcctccatcctgtgacagccactgccctcatcacactgacacgattcctccgagctgcccaagggcagtgtccctcgtatcacagttgtgctttattcttaaaccttgtttctgttcagtttgaatttccttttccttgttaccagtttccagttctttggtgcactctgcctttgccagccaatcccctctgttgagaatgcatctctgcacaatgccgtaggggtgtccctgggagatgaggaggtggtacaactgcatgctttgctgtctgtgcaggagctcagtcacagacacagctgtgacttatgactgaggagctagcactgaagtttgtattccatgcaattatttgtagctcatataccatggtaagtgaaatttgggaaactggtgttatttaactaaactgagataactgaaatttctacacgggacaattgtgcaaggaaggtgctacaaggcacatgattacacagtccacaaatgtatgcatgtgtgtgtgtgccacgagagagactggaattaagtttcatttcctaggatgcagttgctatgtttttttggcttgctttggtttttttttaatcatatacattctttctgtttgcactttttttttaaaacaacaagcatgagttagttccatagtttaaaaaaatcttgtaaataagcatatgtagacgatgaagatttttttcaaaatttttaaactgaattattgaaataaaaaagagatcagggttaactctcagttaaccagaaaatttaaataagcagatgattctgtgtgtcattctgtatctattcaatgagaaatagaaaagatgtttgtgtgtgtgtgtgtctctgtatctgctaacacagaacctgcacttcggcaccatgcccgggtgttgcagaggcagaggaaagtttgaaaggcactcctctaacatgatctagaaaaaatgaagtcgaactgggaggggaaactgctaaaacatgatggtaaaatattgataattgccagatggaagtttgcatgagttttcttgtattgttctctcttctaattgtgtaaaggataggagttaaaaataaacccgtagtattaccttgtttggttcttatttacctattactgccaatagtcaatttccctaataaaaaagtaaattcttctcttgcatgtgaaatcacagtttattcaggtatgaatcctctctggtaaatccgaattttattgtatgtttaacctgataaatgaaggatttgttaaacactcaatgaattgactagggaaaaaatgaagtattcagcccctttaaaaaactgacaaagatctagtgtttatgttataataataataataatgcaagaaggctttcctcctattttacttcttcattctgaaaacacttctttagtgcttaccttgcaaggtgctttttacacagtttacaaacattagtccataggattcattcactcctcaaacttaccctgtgagtcaggccacctagaaacacacaggtccgaggagagcacagcatgtctgagcttgctcccagattccctctgtctgctcatatcacagagacctgaagccagggagcctgcagccctgaaggggccgctcagtgggtacaaagcccttcccacctccaggccctc

SEQ ID NO: 469303 - DNA, 691 bp, Homo sapiens
agcaggtgcaccatttatcttggtgtcctgctctccgtgagatgctggcctgcaggcgtctggctggctggctcacagatggctcttctccaaggcaggagcaatggctgtgggtacacccatgtccttgggagacaatggaggctgtggggctcatggcctctgtggagacgacgcagggacccctgcgttctgggtacctggacctgaggaaggagccctcggtctggggtggatggagccagtctctggggatccattggctgagattcccaccccattttgatggtaatttcaatggggggtcccatcacccttttggccagcacggcacctgcccagcacctcctagcaccgccagcaccactcacggcgggatacgacttcccttcaccaaccccaccctgtccactcgttatcctaggacgtgcggcccctactcacccctgggcccctctgtgcccagggcccacaatgctagagagaccttcgggggggggggggcatcaccttattggctgaaggaaaaggagcgagataacggccccctgccccggctgctgcgggtctagatgtggccacccgccttgtctcgcctccggtggttggagaggagcaggggtggacagtgtcagggatgccagcacagccttggcctggaagccagtggacttcttgatccttcatctgg

SEQ ID NO: 469304 - DNA, 826 bp, Homo sapiens
gcagtgctgtatgttggtttttggggtggaagacagaccctactcctgtctgggttcccacattttcctaatgacctgcgaatccccatggatcccagatctgggctgtgctgtccctgatgtttcttctcccacaatgcgcgcccttgggaccgtggctgccctgtctgcacttggagcaagcaccgtgtacactgttggtgctcagtcaatgcctatgaaatggacccaggtcacggcctccaatacagctacacagaatgggactggagacctgaaatgctgcctgtgcctcgtggcttctgtcagaggggtcattaccaaggaaatggagaggggctcggttcttgaccctaggaagtcatgtgaacacaacagcctgacctcctgggagctctgggaagtccaggtgtctgaaccttgcttgatctggagatataagagggagaggctcctggggcccaggggtgttgatggcttgatgggtgagaagcgcaagtggggagagtttgagaagtgaagacgctccctgcatggtaggacagtggacgaagctcgcgtattcaacctggccgctgtcttcatggagcaaagggactgattcctttttaagcataagtagatgtccaagatggcatctggcaacagattctttcttctctgtgcactaagagtggagatttctttgatctcaaaaagaggaattagaaagtagcaaacattcataccttctcttggcaagatataaaatgttgcagacatacaccataagatgtaaaatacattctgtaaaatataaaatgtgtgcattacttacttttgtaca

SEQ ID NO: 469305 - DNA, 1348 bp, Homo sapiens
tctccatagacagactggggaattttgtaagggtcagtgagacaggatggcacccttgctgctccaggatctagctaatcacagcaaagggttggcgtatcccagtggcaacccagcccccccaactgccgccgtccttgcccgggctgatcacgacaagggttggcatatcccagtggcaacccgggcccctccactgctgccatccctgcccgggctaatcacgacaagggttggcacatcccagcggcagcccggcgcccccccaccccgccccactgctgccgtccttgcccgggctaatcacgacaagcggttggcatatcccagtggcaatccgggcccccccactgccgccgtccctgcctgggctaatcacagcaaagggttgatgtcactggaatgcactcttatgttcatgctgatttatctatccaagtggtcggccattgttatcatcgggttcctttcttggtggacatggactccatggaagcctgagctgccaggggcttccctggggcagcactgcttcgcgtaggctcacgagaaacttccagggttcctgggaaatgaatgaaaataaacaaacaaattccttgcattcaacgcagcgtaagaaaaatcacatcctgttccccagtagctgaggaaagccggctcacgagagtatacagggagaagaggccagcattgtgtggctgccagcaaagctcacttgtatgtcaaatgcagcgcttttcttagcccattatgtattttttttttcttgaacactcctgtgtctactgggatctcctgtttttattgttttgggatgagattttaaaaacaccatttaatgtagcctgtgtgctcttgttcattaaaccaaaaagaaaccctggatcacggcacaggagactctcctccccgttctctagggatgcgccctcatggggaaaccctcttttctcattatttttgatggtgtgctctaacaagacgatctggaggaaactccatgttcacaggacacattcctgcaacgtggcttgaagggcccacaccagggtttggctcatccatgtcgcaaactagaggggaggagggtgctggctatttcccatctgcagtctcagtttccccaccagaggactggagggagtacttgggtgggctgtgatgcaatcccggcacgaaccccccagcactggcattggagtcggaggtttgggcatagtcgccaacatcgcacttacttccatgccagcaccaagtctgcggctccccaggccactctcacttctgaccacaagttcaaggctcccacagcctctctggggtccgtagttcactagaacgactc

SEQ ID NO: 469306 - DNA, 1578 bp, Homo sapiens
gcatcctccaggcttccatgtcctcgcattgtgcattcaccttagaaacgtcacactgggcgacagtgctccagatcctagaaatgtcaaagcgttccagcaggaccctctctgcagggtgtgtctgtgcccagaagcctcctgtgggccctgactcagggcagcacccgctgcctccaggtgaggggcttctggcccagggcggcctggggatgggtgctggtgtctggggaaactcgtggctgcacgatgcttcgcagttctcaggaaatgtggacggcagggccttcctcactccagcagcggcggggaccagcgtgcattggataaaaaagaccagaaatccccgcaaaatcagtacaagatgcagtcagtcgactccagccttcaaggaggaggcgtcctcaggtgtctcaggcactgactcccggcacctgcagcagcaccggacatgtggccagagggacagccagctcaggcacacgccagccgcaatcgggctgctctgtggtgatagcagcacctgcagagagaagaccgaaggcagtgagagtcaaaaagagggcagtgagagcagaggaaagcggcagaggaagaaaagcctgaaggcttggtgcaccagaaggctgtgcgttcctgcctgtggagggtttcgctcccgcatcttgctgatgccctcttcctgcgtctgcatgtcctacccccacgggctgtccttcggggctcaggtccactgagcaagtgtaaggatggcctctcttttgaaagcagcctctctaggcagcacactaattactcctggggagcaattttcccatgaccaattccataacaggtcaacccctccctcatccttcttttaaccaatacggtaattcaatatcctgttaggaaggccaatcccctccccactgcatggtgccattgtggtcactgatttacctagagggtgtcactgcagatattttctgacagccacattcctagtttttctcctctaactcccacaaagactcgactgcggatgattctaaggcagttgtcatattccttctcagagggttgtgaatgctcacctagttacgtattcattctggggaatgcctgatgtaccattccaaatatccatgtcccttctttctaaacatccatttaccttccaaatatccatgtcccttctttctaaacatccatttaccttccaaatatccatgtcccttctttctaaacatccatttaccttccaaatatccttttccgttttttccaaaattaactaaaccatgatttttcactgagcacattgctacactatttcctggtcttctctgcaattatatgtgaccatgtgaccaagttttttccaatgaggtgtaagcagaagttgtgtgttccatgagacctcagagtagtctcttgaaaagggaaggagtacaccatttttcttatcccctccatcctgctgttgggaacatgacttgatggctggagcatcagcagccattctggaccatgagagtaaggaccaccctgccccccaaagaatgataaagcagaaatcagggaaggttttggatt

SEQ ID NO: 469307 - DNA, 801 bp, Homo sapiens
tgcaggattcacatgctaattatggttcttttcgatgggagcctgagatcaccactgcttctagttgtccatctcggccccacgtccaccaaaacaatcttgataaagaacaaatttggtgttcaagaaccaaaccttcatatatgtgctttccacaactgtgaagaagaaggctatgattattgcagaatcaggtacttcaagaatgaaagtttgacactcacactaccaagcaaggttggaaaaagtttgaaatggataatgatggaaggaggcaagcgtgagtggacactggtggtcatgagaatgggagcatggttgaccaagaaccctagctgctgtactctggaatttatcagccacatttgcactgaagataaatttctcactgactaatcaagccaatgactgaaagtggtttgccactgacaaaatccttgattagttaaaactgacagtgcaatatcaaatagcccaagaagcttggataggcaagaggctaggaattactaattggattaaattgattcattttgctgattgatatggtttggctatgtccctacccaaatttcatcttgatatgtacctctcataatccctaagtgtcatggaagggacctggtgagagctaagttagacatagtctgtaacataaacaaggtcacattatttattactgacaaattttacacttgcaataaagttcattcattaatttctttctcctaacaaaattctaagcttgttaaaagtaggcaaaattagtttactcaccaatgcctacctaaaatagtctgg

SEQ ID NO: 469308 - DNA, 2033 bp, Homo sapiens
gaaagtttgaggagaagaaattccaacagcatctatgtgaaatgatccagtggggcacccacatctggacaaggggaacgtggtggcagccggatgattggagatgccaggaaccctcagagagccccaaagagggtgtcacagtcctggcttggggagcccctaggtctgggctccccaaagggccacagctcttctctccttcttgttgcctgcaacgtggtgaatggggggtatattgtggccctgtttgtgttacagctttttcagtcctgcatttggtgggtcctgacttcttgtcctacattcggaaagaatgaagtgtgcagacaactggagggtgttcctggaaaaaggaccatccaattggccaaatggtcatcaatgaagttctcactcctggctgcagacttcacctggaactggcagcccagtccccagccttcaggccggccctggcctgaaggtggggtttcactggggacccaccacttcccacctaggagcctgtctgccttttacatgccatccatagatcccaggctgtcagtgctgagaggtacccacgggtaaacacatataatactaatgaggtatagaaaatctcatatttattggcaaataatttatgaataatagtatctaaggtatttgaaaaacttgcttgaaaatgtgtcatcatattcaaaatgtaagaccctaaaagattaataaataataaaattaagatctagtttagcaatagaaaaaaaaatattaagttgtgctttactacttatatattgcctagaccattgtttcttaaccttaacactattgagatttggggtcatataattctttttttctatatttatatgtacaataaatatgaaataattatatagagtgtgtattcataaatatgtatacatacatagagaatgagagaaacagagggaatgagagagaaggagggagagaaaatcaataactgttgacgtgatgatgatgaaatccccattagtaatggcctagactttaagcacaaataaccttgaggttctagttcctaatactataaaaccccttcctttctcatcttttattcaaatgcctagaattctaacatatttaaacctgagcaagaagacaaatcttatgagaagtttaacatcagaatataatctctaaatatacttacatctaatatttgtggaccacagtcagattttctcaagttattaaatttctcagaaaaatattacatttacaaaggagcatcagaacatgattgttgtctattttatttaacaaagttcttcacataatatctcaccctcagaagtgaggatgaaagtaatacactgaaataatacatattcctaaactaatcactaaagtcagttcaataaagtaaaaagtcattcaacaaagtcagtgatactgttgaaaggcatataaacacatgctctaataatgaaaatctatgtacatatgtgcttacataacttttctaaagttaaatcaaattagagaaagagcattttaagttttactagaatatctttggtaatcatatacacacagaaaaaaagtttgtattttttttagatgagattttatgatggtaataacgagtgctatccctcctaaaaatgttttttttctagttttattgaggtatgcttgacaaacaaaagttgcatatatttaacatatacaatgttatgttttggtatacatatgtataaaccatgaaataattaccacaattaagctaattagcatatccatgacctcacataccatacttatgacttttgtgaatgtgtggtgagagcacttaagatcaactttttttgtttggtgaatttcaagtatgcaatatagcatcattaagatttcttttcttcttcttaacctatagaggcaaataccattcaaatttcagcattttgaacaaaaaattattaaagtattaccatactaaaattataatacattaaattcttaaatcatggcatacattagattatttggaatgacccaga

SEQ ID NO: 469309 - DNA, 687 bp, Homo sapiens
ctgggggtttgagctatggggcaccaaagaagcgagccacaccctcgtcacatgccctgaaaacggcagtaacttctgggttgtggggtccttgccatggaactcccaggtgttgctgcgtcaatggtaaactaacgtgccattaccatggcgatggtaaaaagcactgggaatttgaaagacgttcctggaggaggcagcactgaagaatggcaatgtgaaaatggattaatacagggattattagatgctggctctaaattgacactgatcttcaatgatctaaaatccaacataggccatgaatcagagagacaacttgtgcagaggcggttgctggctgcacactatgttctcctggaaaaagaagctctcacagtccctgaacttgtgagtctccctaccctgctgttctgtgtgcctcgggtcatggaagcaatgactcacacattctgcatggccgccaaggcctccttgataccagatggaccaaacctgtaccttccggtatatcccttttatgggaagtggttggcctcccctcagtttagtattttgtcagattccatggtgttgaaggagtaagcttttgccacacctcatggctacctggggagtttcttgagattacttgaatgagttcttacactttgtggatcgtattgaacccatgaatgtgatagaact

SEQ ID NO: 469310 - DNA, 1303 bp, Homo sapiens
aaccatgaagggctgcagcttcactcctgaggccagcgagaccatgaacccacgggaaggaacgaagaagttcagatgcgccgcttttaagagcttagaaaagaaaaacccattttctgaggagaaattcatggcagctgcagaaatttgcatgagtaacaaggagccgaatgttaatagccaagacaatgggaaaatgtatccagggcatttcagagaccttcatggcagcccctcccatcacagacccagaagaataggagggaaaaatgattttgaagatgagggagtttggaacttcctagagacgttgaatggttttgaccaaaatgctgaaaatgatgtggacgataaggtcctcgttgaggtggtcacagatggagatgagaaacttcttggaaactggagcaaaggtcactcttgctatgctttaacaaacagcctggtggcattttgcccctgccccagagatctgtggaactttgaacttgagagaaatgggtcccgctcctctgtgtatcctccagacttggtgccctgcatcccagctgtttcagctccagccatggctaaaatgggccaaggtacagctcaggctgttgcttcagagggtgcaaaccccaagccttggtggcttccatgtggtgttgggcctgtggatgtacagaagtcaagaattgagaggatgtatggaaatgctccgatgtccagaccgaagtctgctgcaagggcagagccttcatggagagcctctgctagggcagtacagaagggaaatgtggggttggagaccccacacagcgtccccagtggggcactgcctagtgaaattgtgagaagagggccactgtcctccataccccagaataatagatccatcaacagcttgaatggttcatctggaaaagccacaggcactcatggccaacccatgaaggagctgcccacggctttgggagcccaccccttgcatcagtgtgccctgcatgtgagacatggagtcaaaggagataattttgaagctttaagatttaatgactgctccactggattttggacttgcatggggcctgtggccactttgttttgaccaatttcacccatctgggatgggaatagttacccagtgcctgcacccctactgtggcttgaaagtaactaacttgtctttattgtataggctcataggcgaaagggacttgccttgtctcagatgagacttcggacttggatttttgaattaatgctggattgacttaagaatttgggggactgttagaaaggcatgattggtttgaattgc

SEQ ID NO: 469311 - DNA, 464 bp, Homo sapiens
ttatatcgtctgagcacacattgtagaatgtgtatattctggcaagagtttctgagggtaaagttgaaaggttggggagttcgggaaattttcgaggggtggattgcgaatactaaaaaggctctgtcaaaaaaaaaagaagaagaagaagaagaagaagaagaagaagaagaagaagaagaagaagaagaggaagaggaagaagaagaagaagaagaagaagaagaagaagaaagatggaaagcactgagagtggacagagggaagatacagaagctgggtgaaggaggaggaagtcgggagccctggacggggctactgtgcactggtactcattgctggctcccaataattcctggagaactggcaaagaacaacctacttacacctctgcactctggaaccctggaaggaggagaccccttgaccaccagagataattgagttggcagggagagctcctt

SEQ ID NO: 469312 - DNA, 2216 bp, Homo sapiens
aaaggcaccactgtcaacagatgtttctggatggcgaagagtcaaatgttaatcactgagaaaatggggacaatgtctccaggctatgtcagaggtcttcacagtagcccctcctatcacaggcccagaggcctaggagagaaaaatggttttgtttgccaggcccagggcctcactcctctgtcctctcctggggacatagtgccctgtgtcccagccatggctaaaaggggccaacagctcaggctgttgcttcagagggtgcaagccccaaaccttgacagcttacatatggtgttcggccagaatgaaaaatctaacttgcttaaagcaaaccatggacttattgcttcaccattcttgcttgcggagctgaatgatgtcaccaagacgctggttcctctgctttctgatgtcctctgtgctggtctcatgctcaatcaggatacccttaatgctgaacccttctcaccttctcaaagcttcccatgcaggagaagataaatcatagctttccaacaatggagaggtcccccacgtctggacctctatggcctaaattaggtcacataaaccattcatgagtcatgccttttgtcctgtaagataggatacactaattattacaccaatcaggactgactttgtagctggggttgtcaacttcccccatataaatgggttagataactgttttcagaacattgaactgtcttcttttcctttgtttccttttttgtcttctttttttattgtaaggaaagaaagcatattataaagaaataaccataaaaatgggcaaccagcagcccttggggctcctctgtctatggagtagctgttcttttgtccctttattttcttaataaacctgccttcactttgcagcgcggactctccctgaattcttccttgtgcgagatccatgaaccctctcttggggtctggatcgggacgtctttcttgtaacaaaactgaagagtcaatgggagcacaggaaattcaaactcattttatatgactatctctaaatttctttttttatttctctctccttattcccatccttacttccttcccactctttttcttctacttattaaaaccaggccgccaagcataaggttctaatgtgttcagatttataatgaagaatggagctttaactgagatagtgtgaagtttgccataaattttaagcaaaaatctatagaaatatataattttggttcatgtgcaaaactagctattttcttaatcacaggaaaattatatttagaaatacttgtttttcatatttgtgaaagtcacatttttctatattgtatgcaatataaaaatgtatgacattttaaagttttttttttttttaatttctaatcagccttgtttcttactgtgtaaaaatcagaaattgccttaggtaggtcagttgactggattagatacagaatatgtgttttcgtaacaagaagacattttggcatggctttgatatttttatggatgttttaactcctaaatatacgggcaacaccaacaaagataacttattactttattatggaggaaatgattgtaacaaagtttgcatagagccacactataaagctcaactcaaaattaacacattttgtttgtttgttcctaatatcagaagtcagtccaaaaacacacttttgtatgttaagattagtatgttttctgttagaacacttttcttttatcatagccatgtagcatgttatataaaacaaattatccaagtgtgagtaatgagcacttccatttggatacagtttgaaaatgcataatattcttttctcacaatgagagctaaagcttagacattgctatgattaccactagtttggcaagattttgtgagtcagtaatcttgtgtcatttctccaaaaataagaataaaacaaaatgtcagtcatttatacattaatgtaaataaaagaatagaggaaataagtgaactacagttaaattctaaattaaaaaaatattcttttctgatttacatattttaaatgctcctatttttcacatagaattgctgcctttgttacgtacattgagaagtccctaaatgtaaaactaaaattacaaaagttaaaaagcaatatattttctgattaaaaagctagaaatgttttctttgtgcgtctatgaaagtatttctcctcataggttaactaatggatagc

SEQ ID NO: 469313 - DNA, 689 bp, Homo sapiens
ggtaacagccatgtctattttctttgaaaaggatctggaatttatagaaaacagtgaaaatttttctgatcaaattttattgggcaattattacacctttccttctaacctatcatacattaaattattagaaccagagtctgagataatacttctggtggagtggctcggtgtcatccaccttcctatcatgggaaggtttcatgtctttaggcatagcagtgagctcctcaaagaattcaaggcaagtatttctacatttctcagttctggcaagctggcacttttggacactccactgattttttcagttttcatcacttcaacaatacagtctatttatcatctcacatttttaaaatctttcctatgttacaggatcaaatgccatacatccagacaaattctctcatcttatactccaataatagacttggattttcattataaattattacaaaaataccttcctatcactgtaataccattgtaccattatagcaaaatgacattttctctctcagcttaaataattatctgtaaaattaaataagatattttggttaatccagtaattaaaacacacttatttcccttgctttatatattgtcagccttaccacaaaccactttactgaatgttctatttatttatattaatattaatgtaatttctttattatttttgg

SEQ ID NO: 469314 - DNA, 1350 bp, Homo sapiens
ccattacaagtatttaatcttcgtgtttaattaattaacatagtaaatgatcacctcatttcctgtgctctattttcatgtcagagcatacagtaaaagacagcaacatccgagaggacagggggctttctgtatcctggggttcttgcgttggtgtaccggaaaaatcagatcacacgtgggcttggagaatgaatgcaaggtttccttgaatgatggaagtagccctcagcagatagatggggagccagaaggggtatggagtgggaaggtggttttttactggagtcttacccctcagtggccagactctcctgcaaccactccagccaaattccccttggcgtccatgttgttctgctggttgatggcctgctggcttctgccagtgcctgtgggtctcctcttccgctcctctgcgcctctggacatccagctgcctgtgtgctcttctgccagtgtgttcctctcgacacccggccacttgtgtgtgtgccatctagggtcttggctgattaacacaagccgcctacagatgatacaactaaaagggcacactgtaacatgcccactgtggctaggtgtaatatgcctacactgttaactacaccgtggctagcatctggtgtctgctggtaatccttgaagcttcttggcttgtaatccgtcactccaagttctgcctttcatatggtattttccatatgaaaattccatatgaaatttcacatggtattttccctgcatgtctttttacctcctgcctctgaagctaatgttctgtccatataatcccagtatcatataaaatagttttgtagggagaaatggttgacttaaattgacactagacttgatgatcttagagtactcattcacttaaagatattattttatgattacattacaatttagaaatatagttactagattgacgaatcatcagtgatccagatacatcttaaataaggtaactttttagtctgttgatgcaagcaagaaatagtacattggctgaaaattggtgaaacactaaagtacaagaacaggattcagaaagcttttaaaatgtgatgatccagtgatccaaggttggctctactaggcacatgtttcctaactgaattattcttatcaaacttatctcttgtagaattatgtcaagtaagatttggagattgagtttatgatatgagtataaacagcctatggctgactcttgcctatgtattttctttatattctggaaatggcttctttattactttatctgaaatgctacctattgaagcttctgattttcaatttttcaattactcaatcttctaaaacaggggtgtccaatctttc

SEQ ID NO: 469315 - DNA, 576 bp, Homo sapiens
gattgactttctgtgctatgagcaatgggaactagtccaaattcccagtgtttcagcaacaaactgtgtaacatttatcaagatagtagagaggatcctcctgcaccaagatatctgcaaaggggaagtggggtaactgagactgctgaaccaggcaagcaggttctccgaatgcctggagatctgcttggacatgtagcagagagggcccttctgcaccaggatctcagcacaggaagagtaagcagtgctccaaatgctggaggtctgcctgagcatagagcagagagggctcccccaacaaggtctctgcaaaggagggctggagtgactcaagttgttgtaccaggcaaacaggtgctccaaatgcctggagatctgcctgggtgtggagcagagacagtctggctgtatcagtctatgtccaggaaaggttgggcagctcaggctgctgaatcagccatattggcagctgattagatggtacccatcaagattgagggtgggtctgcctctctcagtccactgactcaaatgttaatctcctttggcaacaccctcacagatgcaaccagg

SEQ ID NO: 469316 - DNA, 1269 bp, Homo sapiens
gaattagtttaaggaggctgttttgttagaggctgtggttgcattcaaaaattggaataggaacaatgacttctgtaagctccacgcagttcaacaaaggcccctcctacaggctcttggcggacgtccagaaccggttcctgtccaaatatgactcccagaaggagaactggtaccagctagaaagcctctccaacctcctcaaggccatggtcagctacagcatgaaccccgtggacctatttgagaccaacgacctgtttgagagtgggaacgtgaggcaggtgcaggtgtctcttctcgccctggcaaggaaggccaagactaaggggctgcagagcgaggtggacatcggtgaggagtactcagagaagcaggaggggaacttcgacgatgccaccatgaaggctggccagtgcgtcatccggctgcagattatcaataaacgcgccagccagtcaggcacgactcctccagatgggtacaagcaagtgtgccagccaggtgggcatggcggctcctgggacccggtggcacatctacgacacgaagctgggaatcacaagtatgacaactcttccacgaccctgaagatgggctacacgctgggcaccaaccagagcagccaggtcttcagcctaggccgacagatatacgaccccaagtactgcctgggggcacagtggcccacggggctccctcaggtgcaggcgactgcccggggccagcggaggcccctgaatatctcccttactaccaagaggagaccagctactgaggctcccagcacgctctctccccacatggtctccctgtctgggtgtttgggactgagccaccgggctgtgggggaagggatcaaggccatatcccgatgcgtgtcgggtgagggtccccgctggcgcgtccaggctgtgggcctagctgtgctggggagacgagacctgggcatggagggaaccggtccccgaaggtttcccgttgcctcgcctcttcccccttttgtcagccgatcagtttgtggtttctgtacccgcaaaagtttcaagaagtattaacaaaagaaaaaaaaaatttttcccccaggaatggggcagggacagtgggtgctgggaaatcagtcccttgggacagggggccaggccaggatgctaaaatatctcaggctcctgagtggctggatttccctagcaccctcagaccaacagacctcagaccctcagacctacgctggggcccggtgaggaaacaggcccatacaaggtagtg

SEQ ID NO: 469317 - DNA, 2055 bp, Homo sapiens
aggacaccctaagatggcggcgagggagacggtgaaggcccgaaccaaagacctccgcaccgccgtgtacaacgccgcccgtgacggcaagggggcagctgctccagaagctgctcagcagccggagccgggaggaactggacgagctgactggctaggtggccggcggggggacgccgctgctcatcgccgcctgctacggccacctggacgtggtggagtacctggtggacccgtgcggcgcgagcgtggaggccggtggctcggtgcacttcgatggcgagaccatggagggtgcgccgccgctgtgggcgcggaccacctggacgtggtacggagcctgctgcgccgcggggcctcggtgaactgcaccacgcgcaccaactccacgcccctccgcgccgcctgcttcgagggcctcctggaggtggtgcgctacctggtcggcgagcaccaggccaacctggaggtggccaaccggcacggccacatgtgcctcatgatctcgtgctacaagggccaccgtgagatcgcccgctacctgctggagcagggcgcccaggtgaactggcgcagcgccaagggcaacacggccctgcacaactgtgccgagaccagcagcctggagatcctgcagctgctgctggggtgcaaggccagcatggaacgtgatagctacggcatgaccccgttgctcccggccagcgtgacgggccacaccaacatcgtggagtacctcatccaggagcagcccggccaggagcagctcataggggtagaggctcagcttaggctgccccaagaaggctcctccaccagccaggggtgtgcgcagcctcagggggctccgtgctgcatcttctcccctgaggtactgaacggggaatcttaccaaagctgctgtcccaccagccgggaagctgccatggaagccttggaattgctgggatctacctatgtggataagaaacgagatctgcttggggcccttaaacactggaggcgggccatggagctgcgtcaccaggggggtgagtacctgcccaaactggagcccccacagctggtcctggcctatgactattccagggaggtcaacaccaccgaggagctggaggcgctgatcaccgacgccgatgagatgcgtatgcaggccttgttgatccgggagcgcatcctcagtccctcgcaccccgacacttcctattgtatccgttacaggggcgcagtgtatgccgactcggggaatatcgagtgctacatccgcttgtggaagtacgccctggacatgcaacagagcaacctggagcctctgacccccatgagcgccagcagcttcctctccttcgccgaactcttctcctacgtgctgcaggacccggctgccaaaggcagcctgggcacccagatcggctttgcagacctcatgggggtcctcaccaaaagggtccgggaagtggaatgggccctgcagctgctcagggagcctagagactcggcccagttcaacaaggcgctggccatcatcctccacctgctctacctgctggagaaagtggagtgcacccccagccaggagcacctgaagcaccagaccatctatcgcctgctcaagtgcgcacccaggggcaagaacggcttcacgcctctgcacatggctgtggacaaggacaccacaaacgtgggccgctaccccgtgggcagattcccctcgttgcacgtggtcaaagtgctgttcgactgcgggcccgaccgggacagcagggattttgacaacaacaccccgctacacatagcagcccagaacaaactgcccgccatcgtgaatgccctgactgaagcaggggcccacatggacgccaccaacgccttcaagaagacggcctacgagctgctggaagagaagctgctggccaggggtaccatgcagcccttcaactacgtgacgctgcagtgccttgcagcccaggccctggataagaacaagatcccttacaagggcttcatcccggaagatctggaggcattcatcgaactgcactgacctgcccagaa

SEQ ID NO: 469318 - DNA, 707 bp, Homo sapiens
ttattcaatttagacatgaattacatcacccaattaagaggttgccggaagatgaaaggggacactcaccggcagttttgccatgagagtataccaaacaaaggagacagggtcatttataacctgatgcatccaccctactgctgtgtttggtttccattggccggaatgggacctcacattctgtatgtgtcccaattgtttagcaacttagaattttttaaaagagtcaaaggcagaggagaacaaaggaaggaggaagtaacttgtggaatgctgagaaaggaatcacaaatactggtgaattccatgggccaaccgactcttctatatgtcctgcttccaattgcccttttactaattgatggagttgaatcagtttcccctgtgataggggccactgatccacccatacagaccttccttgttcaagctcctataggaccctatctgtctctgtccctgttctgtcccagcaagtctctgctagtctttatcttttcctatctgtccctcgactgtccctatgggtccctataggtcctagaatttgatgccagtaaactttagttccttgaaactttgaaaacatgcttcagtttttatttagtttggaaagctaaatttggtcaaaagtaaatataacaataaatgaatataaatcattttggaagtgaattcaaattattacgtaagatattaaattt

SEQ ID NO: 469319 - DNA, 2225 bp, Homo sapiens
cctgtgtagttgacctctttctaaccgtaccatctgaaattttaccaatggtttattgccacctttcttctgaacttcagctgacccatacagttgtggatgtgacatgctataaccccctctttggggctttgcaattcctggtatctccaaactttggggcgccaccatgttctccatgtccagaccctggttcccacagtggaggcaacttgcggtatgtctggtccagccacagcctttcacagagctggtgcctgtgccagcacttggagctgcccatcctgctgcagctggcatgcctggctgtgcacagtggccgaaccctgcacttgctcactcacatgccccttactgctcctcgatttttacaaatcaaaagtaaacaaagcaaaccaaaccaaacaaaaaaagcctacagcaatgcagaatttggtttattcctgctccagtcacagtgataggatacagcagagagcattatagagacttgacaatgcagtgattagctaattaatctgggtactcagagactagttcatatgaaagtacaaaaaccaagctgactttgcagcattttctatatttgtaatgtttctcattctgaatataataaacaacttgaaatttgcataaagaaaaataatacatttatatattccctaaatatggcattttaattgtcttaatactgtggatcacagtgttagaaatagtcagatgcttcaatctgtgaaaaaaaaaaaaaaaagttcacttgaccaaataacttgtgtaaaaccaagtgactgattcccctaggctttgataaaactttgtaaacacaattaaaaaagacactctaggattgttttataattaattgttaacatgtctatgttccctggtagctattgaacttaaagacataaattatattacttggtatttttatatctaatatcctagttggcatacatctagtattaaataagtaatttgaaattatttcagttgaatatgattggctgttgttgttgggccagtggaatgataaacaccggaaacactattttccttcttcttatttcagcttagttttgaaattttatcagtcttgggattttcagtttaaaatgataggggagaaatgctgtcaaatgtagcttggcctgtgaaattaacaaacagaaaaagataaaaactcaagcatcctagatatttgtatggatagattaagaaattgcaaaaacaagaaaaaattcccactagccatgttataaacaaaactaaatcaaaatattcctatctaggctttcactcaaggcacaatagtgtttcattttacaagattaaatgcatcgaaaaaaggtgccagttctaggctcagagatccagtgttgtagattggggcaaatggttcactgataaatagatgcataaaccataaaatgcacagagcacctgacatattaatgtcatatattggaaatacattttactgagttaatgtaaactctaaaaaacaaagtattccagtgtttcttgctaattccataagcatcaccactgacttgtgttaagtttaagcatgtatgagatatagaagaaaagtgacttttcacccactggatgggtcatcagataatcagatttggtggagtcatctgttgtgatcattatctccgtgtgaacaacaaaaagctagtaaaactgctctaataattttttttaaatgatttctggattgctattctatgttatcttattaaaatatttgaatctttaccctaaagttttgattattgattatattgctattaatgtgattttaaaaaatgtctattttcatataattttacacttaaagaaaaatttaaaaataatacaaagaaatgttatattctattactaagatttatcagttgttgatatactacttttgctataacacacatacatacacacatacacatacaaacatatatatacatattattttttaatattccatgtcatatcttcagcttgcataggttctttcaagatgtctaaaattagcaagtgacattcacagaatagaataaatattaagtatttattattactaataataaataaatgattgtgtaaatgtacaaatgaataaaaagtagaattctgactgataatgtggaaagcataaaagatttatcaaatcacaatttttcaatgataatgataataattttgttaatactaatttc

SEQ ID NO: 469320 - DNA, 1675 bp, Homo sapiens
cagaagtaggctttagaagcctcctctccttccctctctcccctcccctctcctctgctttcctactctcccgtcccctcttcacttctctcctctcctcctccccttgctctctctcttttctgcctctcctctctctttatcttttcctcctctcccttgctcttccctcccctctcctctcgtcctcctcccctccctcctcatgctctcccctgcccttccattcttacccctcctcctgttttctctcctcctccccatctatgtcaacacttcaaagggatcccctgaaatgagtgacaccaagccacctactgcaagtgaaggatggaataagtttagactgaaaaatataaaaataggagaggctgcttctgccaatgaagaagttgctgccccatttccagaagctgaagaaggctcagaagaagatagaaaaatctggaaaagtttggaacttcctagagacttggaaggctcagaagacaggaggatgtgggaaagtttggaacttcctagagacttcttgaatgccattggccaaaatgctgataatgatatggagaataaagtccaggctgaagtggttttagatggagatgaggaacttgttgggaactggagtaaaagtcacttttgctatgcaaagagactggtggcattttacccctgccctagagagctgcagaactttgaacttgagagagatgatttgaggtatcttgcagaagaaatttataaccagcaaaggattcaagaggaagcggagcataaacatttggaaaatttgcaggctgacaatgtgatagaaaaaaaaacaaaccccattttctggggagaaattcaagccagctgcacaaatttgcatcagaaaaagccattagatgtgacagacacgtggactgaggtcagatcttaccaggccttggaagtcatggtcatggataattctatgatcaatgagaagatattggaatgttttaaggaagtatatttttgtttggaaggcccatatgataagttctattcaataagatgtgagcagaaatttcacatcgcttcatatcgataccaatacgaatgctggtattatgttatccagaagtctctattttcttctgtcatggcaaccagcaatgtttatgatagttcctatgatactgatgtgaactgtgaagttctacagtgaatatttccccatcctctcagtcagccctacagggtcataactatgagttgtaaattatccattgttgttttaaaccatcaaatatttgagtatgtagcgtcatcaatttccttgtgaatagtataaaaattgctacctagagtcaggatgcatctataagaacaatcataaaatatgagtcactttcagatgagaaatttgttggaaaaaagaaaattattataagaggacacatgatttccactataaggaagcaaaatatgtagtactcagataagatattaaaaaaactgaattttactgttatgggttggctccacttgtctgtgtttgaaaagacaacttttaaataattggcaccttagagttctaggtgtcaggcagtttagtttttacacctcttagcaaaattgtttcctagtttgtgccaaaaacaatatggaatatatgggacaatatgggtggagagtggtcccttcactc

SEQ ID NO: 469321 - DNA, 1099 bp, Homo sapiens
aaccatacctgaatttatgctaatgcagtcactcttaagtgctggcagccctggcagccctcccccacgtttggtgcctcctcggcctcggcgtccactccagccgcgcttgaggagagcccttcagcctgctgcttcactgtgggagcccctttctgagctggccgaggccggagccagctccctcagcttgcggggaggtgtggagggagaggcgcgggcaggaaccagggctgcgcgggcgcttgcaggccagcacgagttccgggtgggcgtgggcttggcggccaccccgggcagtgaggggcttagcactggggccagtagctgtggaggatgcgccgggtcccccagcagtgccggccgggggcactgcactggaattctcactgggcctcagctgcctccccgcggggcaggggtcaggacctgcagcctgccatgcctgagcctcccctccgccgtgggctcctgtgccgccggagcctcccctaggagcactgccccctgctccatggcacccggtcccatcgaccacccaagggctgaggagtgcccggggcagggctagggactggtgggcagctccacctgcggccccagtgggctctctgtaaaatggaccaatcagcaggatgtgggtggggccggataagggaataaaagcaggctgccccaaccagcagtggcaaccctgtggaaactttgttcattcgctctttgcaataaatcttgctgctgcttgctccttgggtccacactgtctttatgagctaggaagcagacataaaagtttggaaagtttgcagcctgatgatgatatagaaaagaaaaacccattttctgaggagaaagtcaaactgattgcagacatttgcataattaacaaggagccaaatgttaatcaccaagacaatggggaaaatgtctccaggacatatcagagatcttggtggcagcccctcccatcacaggtacagaggcctaggatgaagcatggttacatgggggagcatgctggcgatcatggaggatgggaggcagaactagattgcagctccggacagagcagcgggtgggggctcacattgtgaatgtt

SEQ ID NO: 469322 - DNA, 533 bp, Homo sapiens
agtagaaacaagacttacaaggttaagtatgcatgcatcaaatatgtgtattatacaaaaagagataaaaggagagaatctaatgccaaatattacagaaatagacgtgaaatatactaatcattctgaaaacaacattgtaccccatggtatagaacagaacaaagctccagatcaactgcaagaacaaaccagcaatcccaagaggacccacagaccatctgaaaaaagtggattgcttctgcaggacctgggagacaccccaaacactgtgaatgccccaaccgtggaagtgggaaagggagacccttctctccgaacacacacctccactggagaagctgaagcagaagctgaaggcctgtttgctggagaaggcaagttttcaaatctgtcacgccctccacctggaaacagactcagggctgttgcaggcggcccagtgggagtgagaccggcccttcagtttgtgtggaagctgggtgaggcctgtgactgctgactttgccccacttccctgacaacctgcatga

SEQ ID NO: 469323 - DNA, 967 bp, Homo sapiens
aaagtaattttttatggcatatgaggctagacaaggagagacagtgccctgtgacccagccactccagccattgctaaaaggggccaaggtacagctcggcccacggtttcagagggtgcaagccccaacccttggcagcttccacgtattgttgagcctgcgggtacacagaaatcaagaattgaggtttgggaaccttcatctagatttcagaagatgtttggaaatgcctggatgcccaggcaaaagtttgctgcaggatcggggccctcatggagaacctctgctagggcagtacagaagggaactctgggtttggagcccccatacagagtccctactagggcaccacctaggggagcgctgacaagaaggccactgtcctccagaccccagaatggtggatccactgacagcttgcaccatgcgcctggaaaagccacagagactcaatgccagcctgtgaaaacagccaggaggggggctatgctctgcaaatccacaggggcgaagctgcccaagactatgggaacctatctcttgcatcagggtgacctggatgtgagacatggcatcaaaagagatcactttggagctttagaattttactgccctgctggattttgaacttgcgtggaccctgtatcccctttgtattggtcaaattctcccatttggaatggctgtatttacccaatacctgtacctccgttgcatctaggaagcaaatgtaaaaatgcttataaataaatatagaagcatatctatctttctaattatattcatcaaatatttatattcatggataagggaaataaataattattttaaataaaaatataaagtttgaaacaggagttgaatgttcataaatattttattatttgtatggtccacttgcccagttccaaatgatttcaagttctgagaattagtctggaaacaaaataataagtaaaggttctc

SEQ ID NO: 469324 - DNA, 552 bp, Homo sapiens
ctaacaatagaagagcatcaggacaaattcttctgccagacaaatgaatttaattgagagggcagtcagctctccatttctgagggttcatgcagatatggagggcccactaaaggccatgaacatcagcagattttggtatgatgcactggcagacaaaatgaactcttgtgatttacggagacacctaaacttaaaagcagaatcaggcagccacagcaagataggagagtggtcacatgccctgcgtgcttcgaaaatgcttttgtgttctcagaaaggtgttgtaaaagtaacacaagactgccttttctacaattatcgagaagaaatcagcagcctggagaagtcaggggtggtgaggcacgaagcaccctgggaagaggttcggcagctggctgatgtaaagtattcagctgagctagctgcaaaagctcaggcttctacagcaggatggagttaattccattagtttttaagaaatccgtttattctttgtgaatgaccaaaaccaaattaagttttatgtacattccttagttcctgataata

SEQ ID NO: 469325 - DNA, 785 bp, Homo sapiens
aagagtgggtgattccaaccccctacatccctttgcttcatggtcgcaagctgctttggcactcatgtcagcacctactaaggtcactgggacccagggatgcaaatacggaagaaggaaaagaggatgttcttccctttctccctcatgtaccccagaagagttctctgtcaaatcatatcttttagtcacaccagccatcatatttgatatgggtttgctgtgtccccacctaaatctcatcttgaatttaactcccacgattcacacatgttgtgggaggaacgctgtgggaggtaattcaatcataggagttagtttttcccatgcttttctcatgacagtgcttccagttttgccagagccaaatgttactcctatgatttggttggagactggcacaagggtatgtaggaaagcccttaattttgtacattcgaatgtcaaggtgttttttctgcgtagaacatactatcaccaaatgaagagattaataggggtaaagggagagataaaggaagctttgcaatcaagacctggcgaacaagaacaacataagaaaatgtgctgatgtgtgatactacaatggagggactcagcagaaatgaacacagtgctcttcccagaggataaaaggcttaaccttttatgctatgcaatcttttaaaaagaaatatgtgagcaaagggaatgacattgggaggcaagagtgtaatggtgtcccttacacgaagtgaaattttccttttatttaacttaaatgatttttgtaaatctttgaatga

SEQ ID NO: 469326 - DNA, 653 bp, Homo sapiens
cagttctaaaaccattgttattatgtgtgaaaggagtgcagatttggttttagaatattctggtgcttttcaaaatggctacagttccgctccgcctgacagaagcatgagaagatttttctctgatattcactgtgagaacctggccacgttcctggagcaaaaacaggcagtcttttccctgatttttattggcactattgggaatgatgccaggctcatgtacttcaaaacccatgaaactaccaagggccattgccaccagaaagtgtatgagaacaaagttaatcagaggcaaacagaacaaaagtgtttggtggaattcaccagtgaaggcatcaggtcccaggcttttacttgcttggagactcttcattatggcttgcatcttgttacttgttattggtctactcaagctttggatttctttatagttcaaccttgagtatgtattttcaaatagcctgttttcaagctcactaattccttcttctgcttgatcaattttactgtcgagagactgatacgtttttcagtttttcaactgaatttttcagctcccaaatttctgcttctttttaattatttcaattttttggctaagtttatctgataagattctgaattcctttcttatcttggatttcactgag

SEQ ID NO: 469327 - DNA, 476 bp, Homo sapiens
taaggtaaagccattgggcaggatggccaaacacatgacacctgactggaaaaataacattgacagcagtttattacctgttgctggacaagtcttccattttgagctgtcagactcatttacaagcttctgctgttattttgccaataatgcaataatgctgtcttgccctaagaagactttcaccaagcagcatattaacataggatttaagaagaagggaccagaggagaacgcagtgcagcaaactctttgccagggctcagagtttggaatctgttgtttccttaactggaaaaagcctgagcttcgtgtttccccagcatcagtgacccaacaagcatctgcgcgaagaggagctgccggctacctgcagagagcgttctcgctgagctttagagtccagagatttctatctcctcctctcaaaatgcaactggttatttacttgtaaacatttaaattagttcaaactg

SEQ ID NO: 469328 - DNA, 673 bp, Homo sapiens
ggacacaccgccatccatgtaagatgtgacttgctcctccttgcctgccaccatgattgtgaagccttcccagccatgtggaactcggagtggggcattgctgaaaagatacctgaaaatgtggaaacgactttggaactgggtaacaggtaaaggttggaacagattggaggggtcagaagacaggaaaatgtgggaaagtttggaacttcctagagacttgttgaatgactttgacaaaaatgctgatagtgatatgaacaataaggtccaggctaaggtggtctcagatggagatgaagaacttttgggaactgaagcaaagatgactcttgttatgtttcagcagagactggtggcattttgcccctgccctagagatttgtggaactttgaacttaagagagatgatttagggtacctgttggaagaaatcctaagcagaaaagcattcaagatttaacttgggtgctgttaaaggcattcagtttcataagggaagcagggcataaaaatttggaaaatttgcagcctgacaatgggatggagaagaaaatcccattttcagagaagaaattcaagccagctgcagaaatttccataagcaaagaaaagccgaatgttaatccccaagataattgggaaaatgtctccagggcatgtcagaggtctt

SEQ ID NO: 469329 - DNA, 553 bp, Homo sapiens
aagttgcaagccctgtgtttaaaagtggatgcagtcaccttcccagctaggcttagggattcttagtcggcctaggaaatctagctatggagacttttgtggaggtctattagatccatttgttccaatgttgagttcaggtcctgcatatctgttaattttctgccttgatgatctatctaatactgtcagtaaagtgttgaagtcttccactatgattgtgctggagtatgctggcagaagactggtgccacctgaatttaagggcaatggcatggcagacagtgtgaatttcctgtttgcctctgctcctcttgtcctccaaggatattcctttatagcaatgctaaatggactaacacagataattggtaccaaggagtggggcattgttataaagatacctggaaatgtggaagaggttttgcaactgggtaacgggcagaggttggaagagtcaggagaaaagacagaaagatgagagaaagtttggaacttcttagagactggttaagtgattatgaccaaaatgctgatagacatatggacagcc

SEQ ID NO: 469330 - DNA, 686 bp, Homo sapiens
ggaaagaagagataaaactgagcttccctgacaccttagggttggacacccatgagaaacactgggaatctgagcacgaacaaattcaaaattgtgaaaggaccattttattctctcaggcaatgtgaagaaaataagataaaagaaggacctcttaataatgttggtaacagtgaggatgatgatgatgatgatgatgaagatgatgatgctgtgtctgctgctacaaaagacgataataacaagaggagggaagaatttcaatatgaagatgccagagagataattgataactgccaaagcaaagtctacgagaaagatgaagtatgtaatattcaaagcagaacggttggttcaggaaataccaagtccattggaatcgcaaaatgtaagaatctgctgtttctcattctctcttatggtcaatacttggatgctgaaggaactctctattttccagttgtatcagttatctagtcctgtgtaaacatctaccccagaatttaaggcttaacacaataatcagttatttcactcatgctttctcagttttctgcacattgaaagtactacttactgcctatgaaccaccttgctcatgtcataccattcttgcccatcctgactccattcatcttactcataaagtctgtgaaaatacgactaaggtaggaatagtgattggt

SEQ ID NO: 469331 - DNA, 604 bp, Homo sapiens
tgtaaacaaataaaaatgtcatttgccatcaaaatatttttaatgaactgtggaaattcactgaaagatgtcaatatgggagtaacacatttggatgtgttcccagagtggatgacacagagtaccaagggatattcagttgtgtctggagtttcttccttctggtgggatcgtggtctcactgacttcaggagtgaagccacagaccttcacagccctattcatctgattcactcctgtgcttggagatgtcactcgaggaggctggagaacagcaaagatgagtgcctgctccttctcctgggacctgtgaccttgagggtcaccaacttgataccagttctctcctgtatagggtgtctgaaaaccccttttggaagttctcacccagttgggaggcacaaggagcaggacccgtttaacagagcactttgtcccttggtggagctgatgtgcttccctggggggaatcccactcatctgagctgtctggattcctcagaactaccaggaggagaggttaagtctattggtccacagactgtggccaccccgccacctaggggctcaggcccagggagaactggattatgtccctgaacct

SEQ ID NO: 469332 - DNA, 828 bp, Homo sapiens
tatccagagctgagagaacgattggttctgaaagcacatctcaaagggtatgaagccagaaagaaaggaagcattaatgtctaactacttctcctcctcctcctcctcctcctcttcctcttcctcctcctccttctcctcctccttcttcttcttctttaccttgagggacttaaactcagctctggactaaatggacctaatagacatctacagaactctccaccccaaatcaacagagtatacatttttctcaacaccacatcgcacttgttctaaagttgaccacaaaattggaagtaaaacactcctcagcacatgcaaaagaacagaaatcataacaaactgtctctcagaccacagtgcaatcaaattagaactcagcattaagaaacttattcaaaaccacacaactacatggaaactgaacagcctgctcctgaatgactactggataaaaaatgaaattaaggcagaaataaagatgttctttgaaaccaatgagaacaaagacacaacaaaccagaatctctgggacacatttaaagcagtgtatagagggatatttataacattaaatgtccatacaagagaaagcaggaaatatctaaaattgacaccataacatcacaattaaaagaactagagaagcaagagcaaataaattcaaaagctagcagaagacaataaataactaaaatcagagcagaactgaaggagatagagaacccttcaaaaaatcaataaattcagaagctggtcaaaaccttgtcttatgtccatttttaaagggaatgcttccagcttttgcccattcagtatcatatt

SEQ ID NO: 469333 - DNA, 696 bp, Homo sapiens
ttttcctccttttttgggaatataatgacattgtcttttacaatatttggggtgttctaccccaaccccaatggccacaggtgcatacactggaagggtgggcaagggacagctccctgctcctttcctttccagctgtggaacatgatttttcttgccacatgtacatgcagcatccaacggctacacacagcaggaatgaaccacagccactgccactgcccagaacccaggatggccttggggacccatgctccacgaggcagcaaaggagcaacaccactggctgctggctgcagtctgatgagagacacctgggacttgatgagtccatgcacccttgaggcagttcttttgtcccaaactcaattccaagctcaggtcgaagccctaagaaagaaaactggatctgagggatccagaggtggacaacaacagaagttaaaagactcaaggtaactttcattttgagttacttacagtacttaataatcaagtaaagtatattcctgtgaacaaaatttggagcatatttgctcgtctatgcctgcttcctttagaatttggaaattatctagtcccacttagcttattatctgaccttgacatcacagccaagccctaaatcaaagcattttatcactctctatttttgctaaagaagatcctgaacttttattatgcaagcaataacta

SEQ ID NO: 469334 - DNA, 937 bp, Homo sapiens
tgctgagaaactacctgctaagatgcttgcaaaacttgtaggaaggccagttgtagttctaacaaaatgccaggtaaacattagcatcttcatgatgtggaaagtgactgaaatgtttgacaccagtttggcagatggtcagcaggtacagagaaagggcagtgatcttgcatggagactgctgctaatggaccattttgtgggcacaggagacctccaaactgttaccagggtaactgtgcactgcggaaagggaaatgatcagacatttcgggaactactggacactggcttcatttccccagtgccagaatgcataattggcacaggcatacttagcagctggcagaaccaccacattggccccctgactggtagggtgagggctattatggtgggaaaggccaaatggaagctattagagctgcctctacatagaagaatagtaaatcaaaaacaatgtcacagccttggagagattgtagagattagtgccaccatcaaggacttgaaagacacaggggtagtgattcccaccacacccccgttcaactttcccatttggcctgtgcagaagacacatggatcttggagaatgacagtgtattatcataagcttaaccaaatggtgactccaattgcagctgctgtaccagatgtggtttcattgtttgagcaaattaacacgttccctggtgtctggtgtgcagccattgacttggcaaatgcctttttctccattcctgtccataaggcccaccagaagcaatttgccttcagctgacgaggccagcaatatacctttactgtcctacctcagaggtatatcaactctccggctttgtgtcatagttttattcggagagaacttgatcactttttgcttccacaggatatcacactggtccattacattgaagacattatgctgattgga

SEQ ID NO: 469335 - DNA, 631 bp, Homo sapiens
ttcatcaatatgacaaaactgttttatgtcattttaagtattttagcacttcttgcccctctagaagtgctgaggcttgtgcagaggttgcaggatatggaaggctataacattttctccaatttagaacccaacaaagtaaaaatccgtgaaggcaatgaatatcacccagagcctccaagaactgtgatcagacaatgtttcttagaatgtgagaagcaatatgatgttggctatgagtttgtcatggatggttcttattattttgagacaggggacagcaggagaaatggactctctcctcaatataaaagtcaattacagccaactttagaaaacagtttggtagttcctcaaaaagctatattgcatgtgttaaatattcacatgtggttactgactattacattgaacaacacagggttaaagccctactgcacatctatgaggtaaattaacttgagcaacttgcacatctatgtgtatgtcaaagactcatgttcttttctctaaacttggcataaagatagtaactacttcacttagtgtatataaagataaattataatctatataaaatgtttgcactaaaaatgttagctaatattataattattcttgctgataaggt

SEQ ID NO: 469336 - DNA, 3812 bp, Homo sapiens
tctctctctctctctttttttctttctttctttttttctttttttttgagacagggaacacatgtccacaggaaatggcagtgtttctactggagaggtgagccccggaccggggcacccctttggtgtaggcatagtttgtggtcaatgtcacaaaggcctgatctatcatggtgctgctcaggggtgctggtggccggggcagctgcgggttggtggctcagagaagcctgtgccagaaggcagcagggccagcgaggggattgtggccaaagatctgagaggccctggcaaacccctggtacacacccagcaagaatactttgcatccttcaatccaatcaagttgacatttaatattaatcatcactctgcccattccatgatggatgtagttcagtgtaatcaagctgccaccaggttcgtggtctcgctggcctcaggagtgaagctgcagaccctcatggtgagtgttacagttcataaaggtggcactctggagttgttcatccctcccattgggttcatggtctcgctggcttcaggagtgaagctgcagaccttggcagtgagtgttacagctcataaagatggtgtggacctgaagaatgtggatcttgtagacattctagagcttgtagacacaacagagcaattaacagaatatgacccaatggagaggcatgctttcaacctagttcttgacaatgaagaggaagattctactcagtgtgaagccaatgagggtgaaggtctttatgatgttacactttcacttaatgaagagtaaatatatttttacttctttatgattttcttaatattttcctttatcttcttttattgtaagaatactgtatttaaaacatataacataaaagaagtgacatatttactgagagaaaataagttttgtggagcatggagaaggtttagaaaataaattctggagaaatgaagaggtgctaatttggaaagaataattgattttcagttaatgagtaggacccaaatgagttgacaactatgaattttttgtaattttgttctataaatttgtgaagttttatttagtaattagtataggcaaagaaaatacacattgaactaatttgagatttgaacataaacttaatcaagcatgagggttaatatcattgccatggaaaatcaccaacttagtgagcatggaatgtaaacaagtttgacacatgtaaagccttcagaaagttaaggatccatatcaatgaggtgcaggtcatgctacccccaaatacggcacattggaagacattttctgacctcctctgacctttctgtgtgtgagctgtacataaaataaccctgtgacctacatttcttaaaagtacccaataagactatcatatgccaggtgtcctgccctgtacccaacgagaaaaaatgccatatactgacagaaaagaatccgaaaaacaggccttccctagttcccttcccactccccagtttattagcattaaattgtattcgttttgtccaaacatttttttttcacaactgtacacttccttcactggatttagcaacttacacagttttctctgggtctctgggtcttcatttccaaaagatcaaatgtcacataaaactgtggtgaaataaatttgttatgcttttgtcttattaatcttcttttggttttatattaccacatgtgaacccaatggttctctccaagtatgggttgcataactgcctttaattactactctttgtcctgtaacctaagagaatttagaattctgccagggtcaactggtaatatacatttttgaggataagtttgtcacttttcagagatttattaagtaagtctagtctcattttttgcaggtgtatgacttcatatcctagttttcaacaatgtctgactctgggatattgagatacaattgtggtttacagagaaaatatatatatttttgctcatgtcaatagtttaccaaatttcttcttagaactgttggtaaacttaccaaattccttagaaacagcattatgaaagcttatattctaacattatctatatgttcaaaattacctcacaaccagtgagaatataattctttttagctctagagcaacattcattaaatgtctcaatcatactctctgataaagtgagcaacaatacctagaattgttcccaatactaagtaatgacaatgcatatttgtggagtaagtaatcatatcctagcataaagtacttataatattcaattagcaactgatcatgtatacctcatgatgtttttatatcattgttcagtgttttgcttttaaatatacctttgcaagtaggtttattttatgtatagcatacatataaccataataggtgaataatctttaatagagcaacatgtaaaacatagttacatgaacaacatagttattatttatatttataaaatttggtacaaaataaaccaataatctctgggtgatataatgtatgtttgtttattgcgactaaatcatgttatttgtaaaatccatttggagcccattatcaaaggactttgtagataatttaaaatcccagcccaagtaaattctctgttttgaaagaacaagaaaaaatataattgatctcctcatgagatgcagctttctcatctattataagacacatgatgcccttatctgctttagatgtgttaagtagtttcctcaggctttgtgctttatgtttttctctgatgtacaaaactcacctttttgatttatgacaactaagaatatagatactgtgtttcttttgtttttctgcatcttttaaaattctaagttgtatagttttgatgttcctccttttactcgttgcataacaactcattatcagacaagtttcaaattagttaaaaaagactatattctagcaaacagttactgcaaatcataaaatatgtgttcatgttcaaagttcacaataaaaatttatgagtaagcgactgttaaacttagccatgaaagataattaatcagaaatatagtattcccttcttctctattcctcggggagggaacttggaggagggaatgaaatttgatctgaagagcttaatgactaagactatctcctggagtagtgtgtgtgtatgtatgtgtgtgaatgtgtttcttgagggtgtgtttaattaagttcttggtttttaaaaaagcatttatatatcagttcctctaaatggtatgtcacttttctcaaaacgatagaaagtctaccagggtatttaagacactcttatcatctcaaaaatgtctgctgcatattaataacccatcacttctaagtttttcattttcttctacttcctcttgcttatcttactcttttcctgagagtatatccactagtcacacacacacaaatttcatttctatgaaggtatagtttagagcagctgaatcaattgctgtgggtcaaatgtggggtttttttttgggggggtgagtttttctgtcaaagtttcttttgggcaaaaactaaatttcttgtaaactatacttacatggacaatatagaaaatttaggcagaaaataaatgtattgtttatttaccaggaatcaggaatttgcaacatacacatgcctaacatttatctaaatgtattgctttcagccttttctctgaattgagaaacaagttgccaatcaagtataccatatacagtatgatgactttgctacctttttaggacaatagcattattttataatattttccataaatgtcataaaaagaataatttttctatatatagtac

SEQ ID NO: 469337 - DNA, 981 bp, Homo sapiens
aagaaacttacaatcatggcagaagaggaagcaaacatgttctattttgggaatcaagggacaggagagaccaatgggcttagaggaggagagaccaagaagggcaaaaccacaccagccaggcccacctacagtttccccaatggcaagcacaagcaccagttccacgggggtatccagtgggaggctgccaagtatccagaggtgtttgtagagatggagttgtgtgagtgtgctgagagagtgtgcagagagtgtgctgctacaccaaggtctttgcatagcaagaggggcagctcaggctctccagtgaaattcaacacttttttactcacaaggcagacagtgttccattttctaactggagaagttacttgcattttcctcggtacagctgaatattcttccactattgatcgatattagatctattaggaatcctacaaataaaaggtgggaaagacttaatatttcctggtacttttatgtgtaatctatatacattgtaaacactaatcttacatagttataaatagataggaggaataagttcaagagatctattgtacagcatggtgactctagtcagtgacaatatattgtattcttgaaaaatgctaaaggattggatattaagtgttctcatcccaaaaatgataactatgtgaggtaatgcatttggtaattggctagagttaactattttttctttaatgtatatatgcttcaaaacaatatgttaggcatgataaatacatatagttttacatgtcaatttaaaaacgaataaattagcaaaaaattaaaaataacaaaattgccaactaaaaatattttgaaaattttacacccagaaatatgaaattttctaagatcagaagcactgagttgtaaactaagcgtaaaattcaacttggctgactaaaagtatattctattaaacaatggatcatacatactctttacgttatgcattcattt

SEQ ID NO: 469338 - DNA, 546 bp, Homo sapiens
ctatatgacattatcctatggatgatatggaatgacctctgtgaaagggccaagaagccctggcaaactcctggtgtaagtccgagagtccaaaagctgaagaacttggagcttgatgatgagggcagaaagcacccagcacaggagaaagataaaggccggaactctcaaggcctaagtgtcttgggtaaaaggcagctatcatccaaggctccggttgcttggtcatttggaggtcagtggcctgaagatacaacgggggtacaaaaattgggtaaatacagccattccaacctggagaaattggccaaaacaaagggctacaggccctatgcaagtccaaaatccagcaactgccaaggtttggggcttgcaccctctgaagccacagccctagctctgtgtttgcccctttcagccacagctggagtgactgggacacaggccaccaagttcctagcctgcaaacagcatggggaccctgatactgtccactggtaacaatactttggtgggggtggtgtcaaaatgcttcatcaaggtgac

SEQ ID NO: 469339 - DNA, 745 bp, Homo sapiens
aggccagtctctctccttttcacatttttctgcctgctttatgttggctggcagcagagcagagggggtcctgctacactgtgatctatgcacaggaaaggtgtcacggcacaggctgctgatacagctcagactgctggtccaagcaagtgtgcgctctgagtgcttagatatctgccttgatgtggagtggagagggcctcagtggattgcaatcttgagggagcaggctagggcatgcagcaatgacacacagagaccagttccaggtcaccaagctggccctaggcctgtgattggggagagcacaattccagtacctactgctgaggcaatttcaacagttctgctatggaggtaccaactgcattgcaaagcaagtgctccaatctttggcctgagactaaaatgccttcacagccatgctgctgggttgccaaaaagtgacagaactttgaaagtgagacctttgaaagatgcacgcagtctagaagttgctggagcctaaaatgtgcatctggagaaaggatgctggtcatattggtttagggcacagactactcatctaatgttaacttgaccacctctataaagactttgtctccaaataagatcatattctgatgtactgggagttaggactcttaatattttgtgagctgggagagaaagtgggtgggacacaatacatccatgacatcgtaggtactctaaatctgttcttttataaaattattttggaaag

SEQ ID NO: 469340 - DNA, 629 bp, Homo sapiens
caaataagaaacaaactgcaactcagtaaagattataatgaggagccaaatgttaatcaccaagacaatgaagaaaatgtctccagagcatttcagatgtcttcaaggcagctcgtcccatcaaaggcctggaggcctaggaggaaaaataggcttcaagtgtcaggcccagggctttgcttcttcatacagcctcaagactcggtgccctgcatctcagccatggctaaaaggggtcaaattaaagttcaagcactcacttcagagggtccaacccccaagctttagcagctttcatgtggttatatttgccttgtatattagtccatttttgtactgctatgaagaaatacccaagactaagtactttacaaggaaaaacagctttgatggactcacagtttcacatggttggggaggcctcacaatcatggcggaaggtgaaggaggagcaaagcacaaggcttgatgtagcacagatattagatatggatatttgttaatgtccttagtgccaattgataccttctgccaaggccaaaagggttgaatagtgaagactaaatagaaagagaaaactctgcaaccatttctacacttcagaattctttccaatttcaactcgattc

SEQ ID NO: 469341 - DNA, 720 bp, Homo sapiens
cggcagttaacaaggatctgaatttaaaggagtttaattgagcaatgaatgattcgcaaattgagcagcccccagaatcagagtggattcacagagattccaggggtacctagtagtcggaacaaatttatacacaaaaaaagaagtgactgttttcacagctcgcattgccatttaaagccacagaaacatgcatgccactccacaagtcttcctgtacaaaatgaacaaggggacattgtgagccacaaaaaggctcatatcagttgccaagatcttgtctctaaatatatgaaaaaggttgatgagcttacccacatttctgcccttgcggtagagaataagaataagctggctgctggactcattcttgaccaacatctgctcctggtgttggcccatattaacagctacacactggggcctgctactcctcatctccaaggacttgttgtattttcaaactttctgccttgtcctttactctgccctgcctatcccaatgtggaacaactggattttgatgttgccacagctgttgttgctggccccaggacaggggccctcaactaatgtttccccttgtctgtccccttggggatgctccccacaactttgggccaccctcccatggacacagcatcccttcaaaggctccttaactctcttcctccagttaatgttactaccagaatgaacgtgctactggccaccctacac

SEQ ID NO: 469342 - DNA, 1916 bp, Homo sapiens
tgaccaatttctcccatttggaatggatgtatttccccaatgcctactgtacagaaagcatggtagcttctgcttgtggggaagcctctggaaacttacaattatggaagttgaagggaaagcaggtacatattacatgccagagtgcgaggaagagataaagaggggggaggtgccacacacttttaaacaaccagcgcttatggtaactcacttactgttacaagagcagtaccaaggagatggtgttaacccattcatgagaaccctccaccatgattcagtcacctcccatgaggccctacctccaaccctggggactgcaattgaacttgaaatttgggtttccacagtgggtgtaattaatcccaaagtaagatttttaccaattacttccagggctacatccaaacttggggagaaagaagacttatggcccatagtatattcatattctatgactgccatcacctatcacaacaaactgggtggtttaaaatttcagaaatgcattctctcacagatcaagcatccagaagcctaaattaagtttctggcagagccatgctccccctgaaagctttaaggaagtattcttcctatgcctcttttatgtagccatcttatgtaattcatttatttaggattaagctttcaaactaagatgcgctattttgaggcattttttttcaaagagctactctaaaatcctatcatttaaagacaactattgttaccaagcatatactttctcttcctgttttatccccagttctacagaaaaaaatagtctaatatcaaaatgaatttgtacttaggattccaaacacttaaaaaatgtttagcagacacaatagttgagaaaaaaatagtattgttactaaccatatatgttttaccaagaagtaattgttagttggatcactatcaccaatattaaaaatattagaagaacctaatcccagtatattaaaaacagatttcttgaatttgcaaatttatttagaattacataaagggttgcttctatttaaaattaagaaagtagataaatcatttatcacagaggtgcttactttatccacgtataaaccaaaatcaccctgacatgctctctgcattcaagaggttaattgttttggagatatgggcttaagtgagacataagcaggagttgaaatgaactttagaagttcacgttgcaagtactccaacaagtgtataattcaatctgccttacctcaacttcaaagaaatgtttatacctcaacaccctattcaacccatagaccttcataatgtgaagacactggcaatgtgaaatattttcaaattcaggttaccttttagtcattaagtcccaaattaaataagcccttattctcattttaagtctgttacagtgagtatataatgttaaattgcttgaccatgggagtcaataacaattcaatattacgataatgaatagaatctattttgttaattgcttaagacacaactagtggtcatgtgcctttaggaaatatagtaactgcttaatattattttataatatattatcaataatgtattaaatgataatcgtctgattgacttatgagctctggaaatactataatcaataactttacgtacatagggaaaataaactgacaaattaaagaaatatccttcctttaaatgtccccttaccttctcttaaagagtaatttaagagaagaaaggaaatttttgaatattagctcacattaattccatgaaatagctcatttccatttgtgaaaatacagaaaagttccttcttataacaatttgttattcacaacctttgcagtaattacactagaaaaatgatggaagagtgtgattaatgataaatgaacttctattatctgccagttactttatatatg

SEQ ID NO: 469343 - DNA, 665 bp, Homo sapiens
gacatcttgcaccgtgcgcctggaaaagacgcagacaatcaatgccggcccacgaaagcagccagaggcgaggctgtaccctgcaaagccacaggggcagagctgcccaagaccatgggaacccacctcttgcctcagcatgacccagatgcgagatatggcatcaaaagagatcattttggagctttaagatttgactgcccttttggatttcagacttgcatggggccggaagcccctttgttttgtagacgcctgagattcaagcatcactgtgggatcattgagccctcaggtcctagatctagatgcttgagtaagttcagagaatccaaagctgagacactggctgcctcggaagaggaagatgaaagagggcacacatatgagggggtgaaaccaggactggggaccaaagatgctgaaagtctctggaggctgcttcgagcgggattaggggtagcgtgggaacctagagtgggagagattaagctgaaggaagattttgtgactgaggaccgtaagggatataaacgtttcactggatactacgagcctgaaaaactgcttggctgatttgactaataaaagccggtctgctattagactgtatagaggtgggaaggccaaactgaggaattatgtctgacagaagggaagaaatg

SEQ ID NO: 469344 - DNA, 725 bp, Homo sapiens
aaacaacacctcagaaagacttaaatgtccctgtctgacagctttgaagagagtagtggttctcccagcacggagtttgaggtctgagaatggacagactgcctcctcaagcgggtccctgacccccgagtaacctaatggggaggcacccctcagtaggggcagaatgacacctcacatggccaggttcccctctgagacgaagcttccagaggaacgatcaggcagcaacatttgctgttcagcaatattcgctgttctgcagccaccactgctgatacccaggcaaacagggtcgggagtggacttccagcaaactccaacagacctgcagctgagggtcctgactgttagaaggaagactaacaaacagaaaggacatccacaccaaaaccccatctgtacgtcaccatcatcaaagaccaaagaaatatgggactgtgtgaaaagaccaaatttacatctgattggtgtacctgaaagtgatggggagaaaggaaccaagttggaaaacactctgcagaatattatccaggagaacttccccaacctagcaaggcaggccaacattcaaattcaggaaatacgagaatgccacaaagatactcctcgagaagagcaactccaagacacataattatcagattcaccaaagttgaaatgaaggaaaaaatgttaagggcagccagagagaaaggtcgggttacccacaaaggaaagcccat

SEQ ID NO: 469345 - DNA, 1638 bp, Homo sapiens
ttcttctcctataaagcaaaccactgtgcgtgcagctctgttttccagaaacatgttatcacataaggtgatccaccctaccacatattgtctcctaatggccgtccagtttatcctggagcccttgcatgacacaggcctatcgaagcataggaggatttcacctcgttgcgtatcagggctttatatttccttggtgtgtcaggatcaagtactcaatagtgtaccaggagctgtttctcaaacagtgagaatttctgtgactcagaagagcaacactctccactggaagaaagatgtcacatgttccaaagacccattaaagatgctcaagggaccaagaagaggtcccaaagcctccttgctggagaaggtggttctaatgaaagaaaggaggcacccaatattggaaagactggaaatttggtgtttcacttctcgtcagggtatttttatttaaaagtaggtctcagaacagattgatggtcaaataaggtaataaatcaggaacagtgcaaatttagcagggcatagcaagaaggcctttgccaggtgctatcccctcaatcttggacttcccagcctcccgaactgtgagccaataaatttctattcattataaattatccagtctgtagcattttgttattgcaatataaaacagaataagatattgttgttgctgctgttgtaattgttatttttctcacttttggttaaaggcagatgaccttcaaaataaaataacattcaattggatttatttcctctgatctaaaaaaagggtgttttcttgttagcttatattttctttgtcctttgttagctcatctgtacattgcatatgctatattatgtatgcaacaggaatgcatatacattcaatgttattctttccattttgtaccaccattcacacttattatggtcacttttaattctaattctattctccaagatatcagctatttcttccacttgatgtcatcagcagacttaataagcatacttgatattctatcatcctggtcattggaaaaatgttaaatagcactgaactgggaactgacccctgcagaacacttcttgttacattttccctttaattcattcccaaattgatacttattatctgtatctttagatgtgtaccagtccaaagatataaaatagttgctgcttccttcttcattttctaatgagacaatggaaggtactgcttatcaatcatggtactcttgcatggagcccacatgtgacctcaaaatcttctctgatatagtaacccagatgtttacaacagactgaccaaggatgagagatgtcatctgagcatggataatcatagaagctctatgtggttgagctataatgagcttttcagtactttccccaaagaacaatgttaggcagttcctaccatctcaacatctgaatatttttgcaacactggccccaaataaatgcttttatccggagtcactcttcttgtcctggtgattacaatagcaaggtagagaaaaataaatagggcctgctgtgcaaactaacattgtaatgaagatctaaatttgctcgttatcccttgaaacagcagttaggaggtacagaggggacgggatattgctgttcttttgc

SEQ ID NO: 469346 - DNA, 549 bp, Homo sapiens
gacagtctggacttctgacgtaaggccattatctgccatgctagtgccagctcaccactgtcaatgcctctcgttgacaggatcctcagctgcaggtctgttggagtttgctagaggtccactccagaccctgtttgtctgggtaccagtagtggtggctgcagaacagcggattttcatgaaccgcgagtgctgctgtctgatcgttcctctggaagttttgtttcagaggagtacaatgtgcaaaactttgtactttctgaggtgtcagtctgcccctactggagggtgcctcccagttaggctgctcaggggtcaggggtcaggggtcagggacccacgtgaggaggcagtctgcccgttctcagatctccagttgcgtgctgggagaaccactgctctcttcaaagctgtcagacagggacatttaagtctgcagaggttactgctgtctttttgtttgtctgtgccctgcccccagaggtggagcctacagaggcaggcaggcctccttgagctgtggtgggctccacccagttagagcttccc

SEQ ID NO: 469347 - DNA, 940 bp, Homo sapiens
tttggaccattcatttccttagggaaatggttccctgtgagtatgcagctagcccaggttagatagaatgactaggacagtgaacataagactaatgactaatgcggccatacaatggctccttcaggctgaattgagaatgagtttgatactttccaggatccaggaattcaaaagggcaaaccttcagtcttcacacacaggcagtgatgagaaagctgtgaccttcagtactagacagcagaaaaggagacaatgggaaaacatgcaatgggctggagattcaccgaaagtgaaaattctggggccccaccataaactttctgaatcagaatctctgagcaggaacactattgtgaactgtgcatgcgagggatctaggttgtgcgctccttatgagaatctgatgtctgatgatctcaggtggaatggtttcatcccaaaactataccccctaccccaacctcgtctgtggaaaaactgtcttccacaaaagtggtccctggtgccagaaagattggacaccgctgctttaggatgcccagagtctggggaacactgtcttttgtcgtctactttccagttgtgcttgctcaggatttcagctcccccttccagccccctcatccatctccctccagcccatgcaccctgctttcttatgaaattgagggtcctactttaaccttccaaaactaaaggatcaataattaattcagctaaagttatgtaggttaggagtcagaattgggatcttttgaaaatttatttttgcctattaaaaatgctaaagaagaagttcctgcaagatctatgtagtaaggcatattagtgagcatttgtgatggtacattgtctcagctaaggcaagataaacagacaagctgtgaaaggagaatgcaaattagtaattaccaccatttgtcctgattctgcagga

SEQ ID NO: 469348 - DNA, 1425 bp, Homo sapiens
aagcagcttttccacacaaagccagtctgcaaagactggaataagtcctcactttctgaatgtgcagtcatccatgtaagaaggattggtaccagctcctcctcgtacctctggtagaattcagctgtgaatccatctggtcctggactttctttggttggaaatggcacaccaggagattatatcctgcccctggctcggagggtcctacgcccacggaggcttgctcactgctagcacagcagtctgagatcaaactgcaaggcagcagagaggctggggaaggcgcgtccaccattgctgaggcttgagaaggtaaacaaagtggccaggaagcttgaactgggtggagcccaccgcagctcaaggaggcctgcctgcctctgcagactccacctctgggggcagggcatagctgagcaaaaggcagcagaaacttctgcagacttaaaagtccctctctgacagctttgaagagagtagtggttctcccagcatggagtttgagatctgagaacggacagactgcctcctcaagtgggtccctgacccccaagcagcctaactgggagacaactcccagtaggggctaactaacacctcatacagccagatgcccctctgaaatgaagctccaagaggaaggatcagacagcaacatttgccgttctgcaatatttgctgttctgcagcctccactggtgatacctaggcaaacagggtctggagtggacctccagcaaactccaacagacctgcagctgagggtcctgactgttagaaggaaaactaacaaacagaaaggacatccacaccaaaaccccatctgtacgtcaccatcatcaaagaccaaaatagataaaaccacaaagatgagaaaccagagcagaaaagctgaaaattctaaaaatcagagcacctcttctccaaaggaacacagctccttgccagcaatggaacaaagctggatggagaatgactttgatgagttgatggtgatggaacttgacaaaacatttaacaaggaacacaaccagtccttttgcacaatttgcttggctggcattcgtccattttatataactacatataattatcccacagcaattgctgctcgtgtcacaaaggcctccaacatgacccagagaaggagcactggcaaagccagtgacaccaatggcttacacattgtgtcatactgccctgttcagttacttttcttaatcaaaggttttgatggtaaagggaataggcttgccacagacttattgcaagtaacattaaggaaccgcagacattcacatgtttaaataggtatgctaatcagactgtacattgttcaccacgtcctggatcctcttggcaaaaaaaaaaaaaaaaaaaaaggcttatctaaaaataacatggcatttcatttatagaaaa

SEQ ID NO: 469349 - DNA, 999 bp, Homo sapiens
atcctgctgtggctgaaatccttgcagcagctgctccagatgggctgctgctgccatcaatatggtcatatcagtacacagatggagatccccagccaacaagtcagaattcataagtatatctcaaataaatatatttgacaacatacttgagaactttatcctggaagggtaccaccctcctgatctgtctgctgtggacattaagaagttgacagcaactaccacgtacctctggtcgaacccaaactttaataccaaaaccaaacagaaaacattacaagaaagaaaatttcagaccattatctcttatgaacagagatgcaaaaatcctgaacaattcaacaacaaaaacgaaatagtgggctgtgggacaattttaaagcagtttattatatacacaattggaatttctgaagcagtagacagaaaaaaaactgataaaataatgaccaaaaatattcaaatttgaagaaaaccataaacttacatatccaagaagctcaataaacctgaatcattaaaaacataaaataacattgcagcaaagaattaaattgttcaccataggtgataaagagaagatattttaaacagctagtgtaaatataaacattaaaaacagtaaaaaatattaagataattgtatatttcttattggaaacaagataagtgaaaagacattgaagcaacatcttaaatgtaccaatagaatcgtcagcctagaattctatgcctagcaaaaatatccttcaaaaacaaagatgaaatagagatttgattgtcataaaaatgttgacagacttaattgccaaaaaccctcactgtaaaaagtattaatttcttcaggtagaagaaaaatgataccaggtggaaataggaatctatacaatgcatgatgaacactgaaaatgataactacaggaataaatagtaccagtttttcctgttatttaaatcaatttaaaaggtaattgactatttaaatacaaataataa

SEQ ID NO: 469350 - DNA, 437 bp, Homo sapiens
atgtacactttcttatatggcagcatgctggtacacccagccatggcacatgcagactgtttcctaggatcaagttggttctggctacaagtcttgccatccaggaaaaactgcagctgtagcagctctcctcctgcctcaggcttacaacaggggacagcaccattccagtgcttactgctgaggcacttcccacagttctggctgtggaggcctttaccccactgcaatctctggcctgagggatgctccaatctctggcccgagactaatgtgtctgtgcagccacattgttgggtccccaaagaatggctgactttgtatgcacctggattaaaaatggcatcttcttccaggtcctgggtctgtgaaaatgcctgcagctttttccagtgtctttccctctcagagcctccaagcctctccccaagttagct

SEQ ID NO: 469351 - DNA, 817 bp, Homo sapiens
cagagacagcaggaaaaagctgcatgaggggagtccattcagctggccttgataaatggggcaaagcactgagcaaggacatggtgagggaaaaggtgtatgatgagagaaaaggggtcctgtggagaaaactgggaggaaaactcttttggttggttgggaaaaatgggaaacaaatagttgggagtgtctggactatctatgtgagaagtaggaccagatgctttcggagttgctcatgtgctctggggggaagaggaaaagttcttcgtttgaataatttggtccttgctcttttaatcaattcagcgcgtcaagaagaactatggtttggtaaggtccttgccctgggagttagtgacctagtctcagctgtgtgtcgtctccctaaagatttgtcgtatatgcacccacagaaccctggtgaaggtggatgtgctttaagacctctgtaaggctctaggtctccactgttccaagaaacaatttcttttatgtatttattcttatttatttatttatattatactttaagttctagggtacatgtgtacaacacgcaggtttgatacatagcctgggtgactgagcgagactccgtctcagaaaaaaaaaaaaaaaaaaaaaaaaaagcaatgacctctaaaggttaatgtgtctttccaatgtttccaactgattgactctcaaggaaaaactcatcttttttagcaaaatcacttcacaaatgctcgtgttattctatacaccatccagatcacacaggtaggcctcagtgtctgttgtttctctctgtgtccatgtgttctcatcattt

SEQ ID NO: 469352 - DNA, 1064 bp, Homo sapiens
cccaccgggaggaatggaaaactccagacgcgccaccttaagagctgtaacactcaccgcgaaggtccgcagcttcactcctgagccaccgagaccacgaactccaccagaaggaagagactccgaacacatccgaacatcagaaggaacaaactctggacacgccgcctttaagaactgtaacactcacagcgaggggattaagcaacacctaaactgtctgcaagggaaagcattttctgctttgcaaaggtggtcactcatatcccagtattttattattaatatgtgtgaagtttttcaatatgtattaaggacatatacaggattttcttgtgtaatgagaataatggaaataaaaacatgcatatcagctttggagtttgattgccttatgggcataaagctttgcatatttactgcccatgaatcataccgatgcaacactaaaggtgtaatccatgagagaaaaagaatggataaactggcctttgctaaaacggaaagtttctgttctacaaaagacactgcaaagataagaaaaagacaagccacagactagaagaaaatgttttcaaaagacgtatctgatgaaggactgttacgtaaaatatcaaagtaactcttaaaattcaacataaccaacaattgactgaaaaaatgggttgagagaccttaacagactccccatcaaagaaaagtagcataatgaaacttatctattggtttaggataatagcattgcacagtcatgcacaacacattctcattccagacctggtgaaaaatgaatgataaatatcaatataaattatgtcctatggttagcagaaattaggttacaacatcgtccttgaaaaatttcatcacattttctgcatcttgcatattaaaagcctgaaatttgaaggcagtgtttacctcaaagttgttccaccctgtaccatttaacaatcagatatgaaaatagtacagttttgcaaatgtgcttatatttgatggttcataaagttgatcattagatctttctttttaagttgtgattggatcacctaccaatattc

SEQ ID NO: 469353 - DNA, 656 bp, Homo sapiens
tctcttagtcttcgggcaagcagccacatctacgtacagtgccatgatttttcgaaatttaacttgtgaactgcttccaagaagtctttccttgcacttccaggtaaagttctcatctctgtgcttcctctgcatcgtacaagcctctgttagatcatgttcccttggatatatcagctgccttgtctggcaatatgcattagagaaggagctcatacccaggcctctgtttgtgaatccacagatgagttcaaagagaggagatggagggcagaaaaggatggagagccctagataccacagaaatcctggtgctgaccatcctctgctgctactccaccaaacaactcagggtgtacacactgatgatgatgatgacctagtctatccttggaaagatgggactgaggaagaggcctgtacagaacctatcaatgagatcagggccatattaatacctggaatatggtccagaggggatgcatggagtctggtgatggcattaagaggtgattatgtcacaagggtggaaccctgacgaatgagactagtgtccttataaaataaatcaagaagagaaccctcacccccttcaccagataaggacacagtgaaaagatggctgtccatgaattaaaagatcatggagaagcatc

SEQ ID NO: 469354 - DNA, 1022 bp, Homo sapiens
gtttggagtggaccttcagcaaactccaacagacctgcagctgagggtctgttagaaggaaaactaacaaacagaaaggacatccacaccaaaaccccatctgtacatcaccatcatcaaagaccaaaggtagataaaaccacaaagatggggagaaaccagagcagaaaagctgaaaattctaaaaatcagagtgcctcttctcctccaaaggaatgcagctccttgccagcaacagaacaaagctggacggagaatgactttgacaacttcactatccgatttgatcaagggggagaaagggtatcagtgattgaagatcaaatgaaggaaatgaagcaagaagagaagtttagagaaaaaagagtaaaaagaaatgaacaaagcctccaagaaatatgtgactatgcgaaaagaccaaatctatgtctgattggtgtacctgaaagtgacagggagaatggaaccaagttggaaaacactcttcaggatattatccaggagaacttccgcaacctagcaaagcaggccaacattcaaattcaggaaatacagagaacaccgcaaagatactcctcgagaagagcaactccaagacacataattgttagattcaccaaagttgaaatgaaggaaaaaatgttaagggcagccagagagaaaggttgggtttcccacaaacggaagcccatcagactaccaacggatctctcagcagaaactctacaagccagaagagagtgggggccaatattcaacattcttaaagaaaagaattttcaacccagaatttcatatccagccaaactaagcttcataagtgaaggagaaataaaatcctttacagacaagctaatgctgagagatgttgtcaccaccaggcttaccttacaagtgctcctgaaggaagcactaaacatggaaaggaacaactggtaccagccactgcaaacacatgccaaattgtaaagaccatcgatgctaggaataaactgcatcaactaacgagcaaaataaccagc

SEQ ID NO: 469355 - DNA, 479 bp, Homo sapiens
tccctgagataaatccaacttagtaatcatgtatggtttttggaatgttcatagagtccctactggggtaccacctaatggagttgtgagaagaggaccaccatcctccagaccccagaatggtatatccactgacaccttgcactgtgcacctggaaaagccacagacactcaatgccagcccatgaaggcagctgaaagggaggtggtaccctgcaaagtcacagaggcagagctgcccaaaactatggaaacctacctcttgcatcagcatgacctggatgtgagacatgaagtcaaaggagatcattttggagctttaagatttgactgccctgctggattctggacttgcatgggacctgtatcccctttattttggccaatttttcccatttggaatggctgtatttacccaatgactgtacctccattgtatctaggaagcaagtaacttgcttttgattttacaagcttat

SEQ ID NO: 469356 - DNA, 544 bp, Homo sapiens
tcctcacaatcatggaggagggtgaagaaggtgcaaaggcacatcttacatggcagcaggcaagagataatgagagccaagtgaaagggaaaccccttataaaaccatcagatctcctgctgatccaggtgagtggctgctccagatgcatggagatctgcttggggacagagcggagagggcccgactgcacaagatctctgcacaggaagggtgggacaactcaggctgccagtcagtgtgaccaatctggaccttacagcaagtctcatcgtctaggaaaaactgaagctgtagcagctctccttctacaccagcctctccctaagttagctccagagtttaagagacaaagtgctcttcctcagcctgggttgctcagatccccagtggaaagcctgcctgtgacctcactgattccattctgctgttgagatactctaatgaatttttcagttcggcatatatatttctcagctcaaagatttctgtttcattttttatttacttcaatctctttgttaagtttctctgataaatttcc

SEQ ID NO: 469357 - DNA, 753 bp, Homo sapiens
cgggcacgctagcaatctgtgcttctgtggctttgaggacttctttaacagaagctttcagaagagcatgttctcagtaaaagaactgaactaaacaaattctgtctagctcatcatgctatctctttgccaaaaggagtatatctgtatcctcaatggaagtaaaaggcaagcagggggttttgtatttccaaaagtatacatgagtaaagactactttgttgtcatctttctggctaaatgtgtgaacctgattcagcagcatattctcaaatatctcagtatcatttgggacgtatgtctgaaggcctccccactgaatcctccagaggtcatctttcaggtaaaatgctctcagcaggtgcccttcattggagagcagaccatttcactggtgaccatctcctatggtgggaagactcttccctaccctgaggcacggcagctgttgctgttactattgaggctggctgcagctgcagtgtcctcgtcatactcttacagagcatcaagtttccactggccagagttagaatgcaagctgtaacctaccagtcgtcctggaatgacccccgatcccttcctgtttcattgcattctacagatgaacacaaagacgtgtgtccttgttcccactgtgcacacacgcttctcctcacaagttctcattggattctcctaaaatatattttagctcagtcctcaccctaaagctgcctgtatagaacttactagtcagtgtgctgcaagact

SEQ ID NO: 469358 - DNA, 690 bp, Homo sapiens
agagccaggactgtcttccgagctatatcacgtaaagcctcttaggccatgacgaaatttttgggtcgcattctgagtgagatgggagcctttggaaggtttgagtggaggggcagtacaagactggagatgcttccctcaagaagagctggttctccctggagtgcagcaaaactgccactcactgcaggcatcttgctccctagaggaacagggatagagcagaaccgagctggtccagatgtttccaaacaggaacatggctttggggacatggatgaagctgcaagccattatcctcagcaaactaatgcaggaacagaaaaccaaacatggcatgttctcatttataagtgggagctgatcagtgagaacacatggacagagggagaggaacaacacacactggggcatgaaaaaccggttcttgtcacacgacaaggaacaattaagtttgcagacacttcgaaagaggcctaagtttaatcaaggatttcaaaacataaagttgactgaaaagttttgttgagtaaagtgtatatttcaatcagtcataacttttacctgtgaaatttaagaaaccatatccattaatttcatgaaagaattttaataattagaatgcttttgagatttactattttaaatgtaatgactcattttaaacattttacattttagaaattaaga

SEQ ID NO: 469359 - DNA, 2371 bp, Homo sapiens
ctcctctggagtgtgtacgctcaagaatgattactctgccatacctcattgccaccgcttgggataactttccaaatcactacctgcatgcaagccttgatcttactctgctttgtggggagcctaagaaaacctctggcaaaaagagactctatgcagatgaggaatcaaagaggagaaattcctggtcagaaagagtcatgtttgtttttgccttttcagcagggctgctgaaacagtcctgccgtggaggatggctgttctcagccacccacacttctcagaggctgcagccgaggctgacggcaaaagcttctcaattgtattgtaccttatttcttgaatttgaaaaagctatgataacggctgaaactgaatgcagcctccaacacctgcaggatctgctcctcctatccctcagcctaatccaagaccttgctctacaatgaccttactgaagtcccttgaatgtggtccttatcacttcaccttcatccatgctattccctctgcctggaacactcctccctcaccactttgccaagattataaatttgaccatgcattttatgttttgacatatataatagcatttcattgacattaatttcaaaatatctttcattttatcttgatttccaatttgggctattttagagagcagctattatattttcaagtgattatatttgcaggatacttttcaatataacatataagatttttttactatagaatttatctagttgactagtctgattgtcatatctggttgactagtatatggttgatttttggtatgttttctatgaacagttgaaaatgatacatttgacttggatttggagtacaatatgtctatattaagtctcttctgcaccttttctctttgtcaacaccagccattaaattctaaaaaattttgttaaatcttctactctggctgtggtttggttgaattctgcctgaatttctaagaaaatggttgatagaaaattccattcgttggcttcttcctttagcccttttctaggattttaactgttattcagagttggagctgttattcttggtggcctttgattgtgagtcagaatattaataataatagttctcaaggaatattgacattttacactattgctcagaagcattctatatctctccattctatatatactttccaattcattgccataaagttatccagaaagaataaagtatacacttcactcttttcagtcttctccacatttctagttatattcattttcttatcttaaaattttgtaattgtgtttagtttaggttagtgttttggtcacactttccagtggtttgtctgttttcatggcttatttttcaatacatgctttttaatgttcagatattctaacatattacccttttctaattattttgctcattagtgagtatttaaccagtgaaggattgggtatatattaatattttcttcagttaaaaacaaattttaaaagtctattatgaagaaaatatatcggaattaagtttccagatattccaaacatgtgctgttttaaagaagtgcttaaaacaaaatgcctcagaagtttaaaataaaaggaataatgaaggtatatttaaaaaggtaacagtacagaatttgatgccaaatgcactaaataggccaaacagaataattatatgttcataaaagcatatatagtaaaataaatgtaaacctgggtgcaacaaatagcatggcattaaaatatatggaacaacggaaagaaagaaagaaatgaacaaaacaaaagataggcaagctatttaaatagagtactttcagtgtgtaagagattatggagaaaaaaaattgtattatttatccaaaaataccctacttgaaatcacaaaagaacctcaagaaattctacaagtatatttttttcatactatactctaactacagtacaaaatacctagaaatcaacattaaatgtgtaattttaaaacatatctgaagatttagaaaccccttctgcaaactagtgggtaaaaaaggaaattaaaataattacaaagtatttagaaaataatactgtagtttatatgaacacaaagtatatagaaaaactcataatgaggtaaattcttacccttaaggatttcataaaggaagaaagaggtataataaattaaatatgcctttgtgctgaactaggcaatcttcaaaatgtctgccatactcatacccttttgtgaggttaactacctgctcataggccctactgcccacagtgaggctctgtaccctataacctccttccagagatggctaattaaatggaccaggagtcagcttgttatctaagacctactcattctt

SEQ ID NO: 469360 - DNA, 3642 bp, Homo sapiens
tacctaggatgggccactcggaggggaggcagctctcctcggccatcacagccagaaagtgggctttgagtgttccgtgcggtgctgccaccgtgtctacacccacctccaccgtgtctacacccaccaccgtgtctacacccacctccaccgtgtctacactcaccgccaccgtgtctacacccaccgccaccgtgtctacacccaccaccgtgtctacacccacctccaccgtgtctacacccaccaccctgtctacacccacctccaccatgtctacacccaccgccgtgtctacacccaccgccactgtgtctacacccaccaccgtgtctacacccacctccaccgtgtctacacccaccatcgtgtctacacccaccaccgtgtctacacccaccgccaccgtgtctacacccaccaccgtgtctacacccacctccaccgtgtctacacccacctccaccgtgtctacacccaccaccctgtctacacccacctccaccatgtctacacccaccgccgtgtctacacccaccaccgtgtctacacccacctctgccgtgtctacactcacctccgccgtgtctacacccaccaccatgtctaaaaccacctccactgtgtctacacccaccgccaccgtgtctacacccaccaccaccgtgtctacacccaccaccatgtctacacccacctccaccgtgtctacacccaccgccgtgtctacacccacctccaccgtgtctacacccacctccgccatgtctacacccaccaccaccgtgtctacacccaactccaccttgtctacacccaccaccctgtctacatccacctccaccgtgtctacacccaccaccaccgtgtctacacccaccaccgtgtctacacccaccaccaccgtgtctacacccaccaccaccgtgtctacacccaactccaccttgtctacacccaccaccctgtctacatccacctccaccgtgtctacacccaccaccaccgtgtctacacccaccaccgtgtctacacccaccgccaccgtgtctacacccaccgccaccgtgtctacacccaccaccgtgtctacacccacctccaccgtgtctaaacccacctccatgtctacacccacctccaccgtgtctacacccaccgccgtgtctaaacccacctccaccgtgtctacacccaccaccactgtgtctacacccaccaccgtgtctacacccacctccgccgtgtctacacccaccaccgctgtgtctacacccaccaccgtgtctacacccacctccgccgtgtctacacccacctccgccgtgtctacacccaccaccaccgtgtctacacccaccaccgccgtgtctacacccaccaccgtgtctaaacccaccaccgtgtctacacccacctccaccgcgtctacacccaccgccaccgtgtctacacccaccgccgtgtctacacccacctccaccgtgtctacacccaccaccactgtgtctacacccaccaccgtgtctaaacccaccaccgtgtctacacccacctccaccgcgtctacacccaccgccaccgtgtctacacccaccaccgtgtctacacccacctccaccgtgtctacacccaccaccgtgtctacacccaccaccgtgtctaaacccacctccaccgtgtctacacccaccgccaccgtgtctacacccaccaccgtgtctacacccacctccaccgtgtctacacccacctccaccgtgtctacacccaccaccctgtctacacccacctccaccatgtctacacccaccgccgtgtctacacccaccaccgtgtctacacccacctctgccgtgtctacactcacctccgccgtgtctacacccaccaccatgtctaaaaccacctccactgtgtctacacccaccgccaccgtgtctacacccaccaccaccgtgtctacacccaccaccatgtctacacccacctccaccgtgtctacacccaccgccgtgtctacacccacctccaccgtgtctacacccacctccgccatgtctacacccaccaccaccgtgtctacacccaactccaccttgtctacacccaccaccctgtctacatccacctccaccgtgtctacacccaccaccaccgtgtctacacccaccaccgtgtctacacccaccaccaccgtgtctacacccaccaccaccgtgtctacacccaactccaccttgtctacacccaccaccctgtctacatccacctccaccgtgtctacacccaccaccaccgtgtctacacccaccaccgtgtctacacccaccgccaccgtgtctacacccaccgccaccgtgtctacacccaccaccgtgtctacacccacctccaccgtgtctaaacccacctccatgtctacacccacctccaccgtgtctacacccaccgccgtgtctaaacccacctccaccgtgtctacacccaccaccactgtgtctacacccaccaccgtgtctacacccacctccgccgtgtctacacccaccaccgctgtgtctacacccaccaccgtgtctacacccacctccgccgtgtctacacccacctccgccgtgtctacacccaccaccaccgtgtctacacccaccaccgccgtgtctacacccaccaccgtgtctaaacccaccaccgtgtctacacccacctccaccgcgtctacacccaccgccaccgtgtctacacccaccgccgtgtctacacccacctccaccgtgtctacacccaccaccactgtgtctacacccaccaccgtgtctaaacccaccaccgtgtctacacccacctccaccgcgtctacacccaccgccaccgtgtctacacccaccaccgtgtctacacccacctccaccgtgtctacacccaccaccgtgtctacacccaccaccgtgtctaaacccacctccaccgtgtctacacccaccgccaccgtgtctacacccaccaccgtgtctacacccacctccaccgtgtctacacccaccaccgtgtctacacccaccaccgtgtctaaacccacctccaccgtgtctacacccaccaccaccgtgtctacacccaccaccgtgtctacacccacctccaccgtgtctacacccaccgccgtgtctacacccaccaccgtgtctacacccacctccaccgtgtctacacccacctccaccatgtctacacccaccaccgtgtctacacccacttccaccgtgtctacacccacctccaccgtgtctacacccaccgccaccgtgtctacacccactgctgtctgcttcatgactcgggggtctaggctgcttctttcctctctctctgcatttcaagaagatgagagcgagaccatgatgctccgtgtgagtgtcatttgagattaaaaacatcctcccctaacttgtccaatattccttttgaaaagaattccctaaaaaatttcttgtattgccttgtgggctaaagtactgtctttcctgaaagtctgacatgcttccttttatcagataatgtgacttgtgtaagattcatatttccatatttcccttttcaccttggctatccggaagctcagtgtgtagctttacgttc

SEQ ID NO: 469361 - DNA, 1029 bp, Homo sapiens
ccgtccagtcctagtctaggctcgtgttttcagtaaagaaactgtgtctcccaggagttgacagcatctgcttgagggtgtacagctccgtcgtcactggggaaggctggacaaagcagagatttaggtgtcggaaaagcactgcaggcaccttatccctggaccagagactcccttggtctgctttgtttttaaagtagaaacggtcattgtcaaaatggccctcaggcacaatatttacacagcagagacccagtcgcagccgcctcacaccgaggtcaaggggcagagacagcaggaaccgtgagctctggttcctgagccagtgtctcctccctctaccgaagccctcgtgtttgcactctcttgacgaaacaccgagctatttaagtgggaataatatagttccttctgtagacagcacagctgatgccgtggtcaaggacaaaaatgttaaaaggtttggcctttagtcgaggacgggcagttgttgctttcctggaggtagctggacgcaggcgggttttcctcccgagctgtttactgccctgtgagagcttcctgacagcagcttcactggcccccttccaatcgagttcctgccctctcatctttgtggagaccacgctgactatgatttccgaaaatttacttgttctctgccaaatccaaggattcccactccctcccacccataccctcgctttgcttcttcccggctctgcacactccccaacttgcttctgcaccaggggcccctctggggaaaagcagatgtcccttgagctaaagaagttgcagttcacccaggctgggctgtcctggaggttgtgggcacgtgagcgtgggaggggtcgtgtgttcctccacgctcacccagagcagccccctctcggcttcgcagcccatggctggcatcttgagtgccaataacgtgctccctgaagctttccctggtggacacgaagcagcacttcgctcgtgatggctgattgaaaacatgccggtgaactggacgacggtgagcac

SEQ ID NO: 469362 - DNA, 1888 bp, Homo sapiens
gtcagtcaagtccaagagcagacgtgagtcgagtggtcagtgggttgcaggtaaccataggccagccgagggtggcagccgtaggtggacagctgggactccttccctgtgggtgacagctgtgggtgacagccgtgggtggacagcatgggtggcagccgtgggtggcagctaggactccttccctgtgggtgacagctgtgggtggacagcatgggtgacagccgtgggtggacagctgtgggtgacagccgtgggtggacagctgtgggtgggcagcatgggtggcagccgtgggtggcaactaggactccttccctgtgggtgacagctgtgagtgacagccgtgggtggcagccgtgggtggcagccgtgggtggcagctaggactccttccctgtgggtgacagctgtgggtggacagcatgggtggcagccgtgggtggacagctgggactccttccatgtggatgacagctgtgggtgacagccatgggtggacagcatgggtgacagctgtgggtggacagctgtgggtgacagccgtgggtggacagcatgggtgacagctgtgggtggacagctgtgggtgacagccgtgggtggacatcatgggtggcagctgtgagtggacagctaggactccttccctgagggtggcagctgtgagtgacagccgtgggtggcagctgggactccttccctgtgggtgacagctgtgggtgacagccgtgggtggacagcatgggtggcagccgtgggtggcagctaggactccttccctgtgggtgacagctgtgggtggacagcatgggtggcagccgtgggtggacagctgggactccttccatgtggatgacagctgtgggtgacagccatgggtggacagcatgggtgacagctgtgggtggacagctaggactccttccctgagggtggcagctgtgagtgacagccttgggtggcagctgggactccttccctgagggtggcagctgtgggtggacagctgtgggtgacagccgtgggtggacagtgtgggtggcagccgtgggtggcagctgggactccttccctgtgggaggcagctgtgagtgacagccgtgggtggacagccgtgggtggcagccgtgggtggcagccgtgggtggcagctgggactccttccctgacctgagctcacttcatttgaccaggagcatcaaaaacagtgtgtgcatccaaaccactgtgaatccccacactgtaaaaacaaaaacttcaaacgtcacatattttgtccactttgccctcaatgcacgctttatccatgtgagtgtgagcagacatagagcacagccctcactcctccatccaccaaccgatggcagcagcaagcacagtcaggcttctcagcacacaggatgaaggaacaagggaagacagccccacggtctgactccgagtcccagctgaggaaccagccaatagcatggacagcactacttcccatcagcatgactgtcagcgtctccaggtctgcaccaggccccagctgctcctctgtctggaatgagcaagacgattttgttgctgagatgcacggagccccccggctgacctttccctgtgccagtgagtacctgtggcatgcaagggagaaagcctatcaggaccacaggagaaagcacagaccctttaccggtgtcgggctggggtacagtcaggtctttctcatcccacgaggccgtatttcagactatcacatggggagaaaccttggacaataccccgctttcaagggcagaggtccctgcggctttctgcagtgcattgtgcccctggtttattgagactagaggatggcgatgacttttaccaagtatactgcttgtaaacgttttgttaa

SEQ ID NO: 469363 - DNA, 645 bp, Homo sapiens
gggctcttgtgcacctcacaggacagtaggaaacggaggcactgggaggtggcagaacttggccaaggttgcacagaccactaggtccagcatctttctggaaaaaacaccgaaaatcatgtacccctgcatcctgtgtgggtcccagcctgggatactgctcagcaatgcagatgcacaccagaagctgcagccaagtgcatgggctctgctccccacagctcctagtcgaagggccttcttcctggaaggggcagggccttacttttctcatcttgtctgcagttgcctgttgctgagactaaatcccagagagaagatcgccattgttcccactccgagctccagggctctgagattttgcccagaggaagaagcagaccctcaactaatccacaagttcaacaaggttgcagaatacaagatcaatacacaaaaatcaattgtgtttttatatacttgcaatgagcaatctgaagaggaaactaagaaaacaattccatactcaaaagtatcaaaagaataggtacttaggaataaacaaaggaagtacaaaatttatactccaaaaactacaaaccgtcatccacaaaaattgaagatctaaataaatggaaaaatatcccacgtgtatggattcagaag

SEQ ID NO: 469364 - DNA, 1266 bp, Homo sapiens
ccatggtatggagctcaaaggtggtgtgaagactggggcagggctgagaagtcccgggtgctggtgtggaatctccctggagacagcagatacgcctagcaaaaaggaccatggaccccacccctgcacaaactccagaaccacagaccccacccctggacaagctcaaggaccacagaccccacccctgtggaagctccaagaccatgaaccccacccctgcacaagctctaggatcacgaatcccacccctatggaaactccaggaccacagaacccatccctgtggaagctccaggaccacagaccccacccctgtgcaagctccaggaccacagaccccacccctggacaagctccaggccaatgaaccccacccctgcacaagctccaggaccatgaaccccacccctatggaagctccaggaccacagaccccatccctgtggaagctccaggaccacagaccccacccctggacaagctccaggaccacagaccccacccctgtggaagctccaggaccacgaaccccacccctggacaagctccaggaccacaaaccccacccctatggaagctccaggaccacaaaccccacccctggacaagctccaggaccacagacccccacccctatggaagctccaggaccacagaccccatccctgtggaagctccaggaccacagaccccacccgtgtacaagctcctaaccctaaccctaaccctaaccctgaacgagcttcagaaccacagaccccaaccccggacaagttctaggatcacaggctctacccctgcgcacctacttgaagtagcacctcattgccttgccccctgcagtttccacagcaattacaaaatattttatacagatttgccttaatttatttaatcagtcccctaattattgaaatttaggttgttttcagtttttcgatattccaagtgaaactatgatgatcatcttaacccatatgtatctttacacaaaattatgctgtaacttatattcctagaaggaaaatggttaaatcaaaggtaagcacatttagattttcaatggataccacctaattgccccccacaaacagtctagcaattttcacctctgcttaaagtggtcccaaagtgtctgtctcctcataattttgccaaccctgggtagtaaatatatttttaaactttggaccatctgatttcttcttgtatgaattgtctgttcatagcctttgaccaaattcttatcatatgttacttttc

SEQ ID NO: 469365 - DNA, 815 bp, Homo sapiens
aacggggagatctttggaaacatggctacagaacatgttaatggaaatgatactgaagagcccatggatactacttctgcagttatccattcagaaaattttcagacattgcttgatgctggtttatcacagaaagttgctgaaaaactagatgaaatttacaacaaaagtgcctttttatgtggagtcatgaaaccttataggcagagagaaaaacaagggaccaaagtagcagattctagtaaaggaccagatgaggcaaaaattaaggcactcttggaaagagcaggctacacacttgatgtgaccactggacagaggaaatatggaggaccacctccagattccgtttattcaggtcagcagccttctgttggcactgagatatttgtgggaaagatcccaagagatctatttgaggatgaacttgttccattatttgagaaagctggtcctatatgggatcttcgtctaatgatggatccactcactggtctcaatagaggttatgtgtttgtcactttttgtacaaaagcagctcgggaggctgttaaaactgtataataatcatgaaattcgttctggaaaacacattggtgtctgcatctcagttgccaacaataggctttttgtgggctctattcctaagagttaaaaccaaggaacagattcttgaagaatttagcaaaagtaacagagggtcttacagacgtcattttataccaccaaccggatgacaagaaaaaaaacaggcttttgctttcttgaatatgaagatcacaaaacagctgcccaggcaaggcgtaggttaatga

SEQ ID NO: 469366 - DNA, 555 bp, Homo sapiens
gtctaagacatgttggctgacagagggcttttagaaagacatgtgtggtttgtctgtctctctcattcttattccacacacactacgtacatgcttaaaccgttggctgccatcataaaaatggtcccaaccaggaaatgtgcaaaaaggcaggacagtgaagttgaccctccagaaagatggaccaaggatattctgctctttgcatcctccctgcacagaattgagtctgtgcctactcccgtttcagaagcatgtattagtggagtactgagtgatacaggagccagaaggccagagtgggaggaattttcttctctcatctgggatgaggctctggcaaagtcctttgttcctggagagaccacaaaaagatcttcctcaggttctcaaaaggagaacatggtagggttcctggagggcaagttcatgaaagtgtgaggcctatcatgggtgcagccccagaagtttctctccccttgtgctagtctacactgtcttcagcaattcatccaaattaccatttaaatgttccccttagtttctgcctccagc

SEQ ID NO: 469367 - DNA, 775 bp, Homo sapiens
aaccataagtgtagcattttttctgagttctttgaggagtagtaggaaaccctgaatgtgtagccagttggtcagatgtgcaggtggtctgggaagcccacagcctgcagctgtctccttcttcctcctcctcctcctcctcctcctccttcttcttctccttcttcttcttcctcacacatctttaaaaacaatgacatccctggtccccttgctggcatttggattatgtctgtgactggtctggcttggctttgtcaaagggcatctgtgttccctagatggctctgcctcacctgggctccctctgcagagactacagcacctgctgtgctctctctgccaccttctgtcagcctcattccacaaccctaccaagcgaggtcccagagaggccccaggagctttcagattagctcccagaccacatgggaagcacaagtaggcagttcaagaaaacgggacctccctgttgctcctcagtattatcctcacttatcccacacacctcatctctccaactgggaaaactttccccacggagagaaacatcaaggtgtatctcattacattgctttctttcctcctcctgccttccactccaccttctggaaatcaaaaacaggcaagtgttttaatgcacttccctcatgccattcttctggattccaaacactccttaaaattatagtggctggaattgcaggtgcgccctaacacatgaggcttctgcagggcatggcgagtgcacctgtaaattccggctactcaggac

SEQ ID NO: 469368 - DNA, 1575 bp, Homo sapiens
aggagggagaaagcagtaacaggaggcacagcacgtcctgcagggccatatgggaagcaccagggctgatcggggagcaaaggaagcaggaagaggatatcttggacaagagcctttattgtggtttctgtgggaaggaacaggcaagatagaagctatgaaacttggttgctggatcgttacactgaggctaataatgaaaggaaggcggaataaagggccttggttagctacaggatcctatcggacaggaaggattgctgtttggcagagggtgggcatttctgaagatcttcagggagtaaaggagcatgatgtctaccacttattctcaaatgggttgcaaaaaattccttttagagagaaaggagaaaacaaatgggaaacaatttcagttagccccaatttggacgtggataaaaagtaccttggaggtgttggtctgattctggcaacttctctggagggttaaaaataaatcaaattaaaaagttgtacaaaagaaaaaaacctttctcaatatttaaaggtgcaaaatatttcgatgtgatataattacaatatgttgttgcagtactgtgaaaccaaagctttatacttttaaacagttaagtctgattaatgaaagcagaaaaaaaaaatccccttagacttagcaacaaacagactgtacccctggacaacactgatgttgtagctctcagtgttcttcccagttttctgttgtaggtcagctatgcctcacagtttaaaattgcgaataggagaaagagaagagcacctagcatcttaactcctcatgctgaagaggaaatagttctgagcaattatttatttaaaatattaaataatatttaaaatattaaataatgtttaaaatatttaaaatattaaataatgtttaaaatatttaaaatattaaataatgtttaaaatatttaaaatattaaataatgtttaaaatatttaaaatattaatgtttaaaatatttaaaatattaaataatgtttaaaatatttaaaatattaaataatatttaaaatatttaaaacattagtggtggtaaggtgaagaaaaaagttaagttggttgttttctacaagttaaatagataagttttgtggttggtaattgaaatagggagcaagctttttgtgaaagctttaaataaacttttagagttttaaaatgggaaactcaaagtatattttgggaaaatgtacagtttagtacaagccgtgagctgtctcatatgtttagagcaaaatgctaattgggtaagtacttggagatgaagctggaaagagaagctgagcttgaagagccttgcttgcggaggtgagagagtggactcttgttgagccagtgggaagctggcagtggttttggagaagaaggataaattcaccagagtgtaaatatattcttattactggattaaatcacttcaaataatttcatctggtaaaaacttgaatttattcctagttctttgtgacaagctagcaacttgaattttcttttctttttttaaagtagttaaaaaaaactacaggagagccagatctgacaag

SEQ ID NO: 469369 - DNA, 507 bp, Homo sapiens
ccagatgtgtcccgtgcttggggaattaaaatgatcggcactcttgggctgcatgctctaaccctgggggactgggaccaggcccacagctttgttctttggctcctcaaggatcctgtttcactggaggggctgaggtattcccagtccactggtaacaaccctcttaagggggcgtgctggcaaaagtacttcactggggaagtggcagtgagcttcatgctttcaatcaccaacgaagtggtacaagaaggctgtgagcaaaagcacactggcgaagcagtgtgggctgctgtcagcaggtgcatgctgggagtggcccatctgcagaagctctctgatgatttggtggtatctgccagtgaagatatggcagtgaccactgggaaatgccacagttggagatctcagactgcactactgggagaggccagcagacagggggctctcagatcagactgtccccatcccatgagcagacagtcctgttccacccatgtctaatag

SEQ ID NO: 469370 - DNA, 539 bp, Homo sapiens
tcctttaacatggtctttgcattaaaggtatggaagagttatcttctctttgtatcttccttgctgaacagttctcatcacaggtctcagcacagcctaagcctggaaatcaggaagagggatggcagggtccaggtgttgtttcacggaaagggaaattcagggaaagaatttggaggaaggccagtgctttctggtgaaaaaaacagttgcttggaggctgcgcttggtggtttgcgcctgcagttccagctacgggagaagctgaggctgcgatggaaggactgcttgagcccagaagggacgattgctgaacttttccaggaagctccctctctgtgctgcaacccagaaattttctctgtacagtacaccgaaccaggcattccttcaaagagccctgtatcctttaacaggagaacagtattagaaaccaaatatgggcactagatatgctcattgctagtgggttgtgattgcttccagaccattttggctatcacaacaagaaaatatgtatgtatacccaattaatcttc

SEQ ID NO: 469371 - DNA, 938 bp, Homo sapiens
aaaatttctgatgtttctagaagcagccatggtagcatggtggagagtacacatcagctgggtgaggtactgtcagaagtggggctatagcatttctacatgtacttgcaccagcacagaggacagggttaccagcgtctgtgctcatattcacaccatcagctgtggggatagggccactggcgtctgtgagctcgttcacaacagtggcaattgtggtgtgcagagggtggcagagtcaccaccgtctatgcatgtgttcataccagcaatgacagtgcgactgagtgcccacacattagtggtgtgggggggcagcatgttgcttcacaccagcagcagcagtggggtgtacatgcaaatgtgcaatggcagagcgaaaatgaggtctgcctctacatgcctgctcctgatcttgggccagcaattccttactgtcttgaaggctctctaatattttaaatcaaattagagagttacttttttcatatttcactctgtagtaactaggggttatgttctgcatattaaaatttacgtaagacagaaatatgaccctgaatattcaacaatgtataaccctaacactttaaaatgctgagtgttttttgtattatgtacagtgaatatatttattttgtaaggtacaaacagaaagaaacaatagaaaaacactttaaagaaagtggataggtgacattaatcagctattaaacacttttatcattttgcactaagaaagttattccaaggttaaaaaatatttatgggaggtgagagagtcttaggaaacttatttgctataagcttttaaatgtttggttagtgttctttcaacaaaagaaaataatatctcattgacagataaaaatttcaataaaacaaatataattttttaaattactgattaattttgctcatcaattttgataattata

SEQ ID NO: 469372 - DNA, 682 bp, Homo sapiens
aagggatcttgacctctgtgcataagctagagcacaaaggccatgctgctagttagggcagggtggttccctgccctaatggtaccaggtgagaaagagagagaaagaggacagagaaagaaagaaagaaagaaaagaaagaaagaaagaaagaaagaaagaaagaaagaaagaaagaaagaaagaaagaaagagagagtaaggagggagggagggagggaaggaaagaaagaaagaaagaaagaaagaaagaaagaaagaaagaaagaaagaaagagaaagaaagaaagaaagagaaagaaagacagacagacagaaagaaagaaagaaagaaagagaaagaaagaaagaaggaaggaaaaaagaaagagagagaaagagagaaagaaagaaagaaagagagagaaagagaaagaaagagagagagaaagagaaagaaagagagagagagaaagaaagaaagagaaagaaaagaaagaaaagacactggaaaacagatataccttgagaactattgcaaacaaacttggaatcataaaatttcgaggcatactttgtggaaatataccataaattgtgtaaatatctgagtataaagtggagctgtttcgagactgactgtatttaagtaatggagatgcatataaaacttagattttaaatattttattaatcttggcat

SEQ ID NO: 469373 - DNA, 713 bp, Homo sapiens
acagtggcacccgaaaacagagatgccagcaactgcggagccccaaggggtgttaacagcttttcctcggggagtcctgaggtctgagccaccagggaatgccacagctcccttgctctcattcccaccgcccatggcttggctaataggggcgtgttataactctggctcgggaagtcccgaggtctggaccctcttcactcccatagtccggcaaatgggagtgtgtcacagcgcttttcattcatgctgtccacagcttgagaagccagacaggagtatgttacagccctttttcgctcctgccgttcagcggttccgagtacttgtccacaaccaagaagaaaggagctatgtggacactggagaagtaactgtgcactggggaaagggaaatgatcagacgtttcagggactactggacactggatctgagctgacattgattccaggggacacaaaacgtcattgtggtcctccagttgaagtaggggcttatggaggtcaggcccaccagaagtaatttgtgttcagctggaaaggtcagaagtataccgttactgtcctacctcaggggtacatcaactctctgactttgtgtcataagcttagtaagagagagcttgatcacttttcacttccccaagattatcacaccaaggtaattgaccaatgtaatggtccaatacattgatgacattatgctgactgga

SEQ ID NO: 469374 - DNA, 3022 bp, Homo sapiens
ccctgagctgccaggataggctctggcttcccatcaccctgaactggaatctgcagtctgaaactccaaatgccttgtgaaactggaactgtgaatttgaaaatgcgattcatcttcctggcagcagtgtctttaaccttaaatactaaactgagcattcttaaaactctaagtgactggtttcaaagcttcaaagaactggctgactcattcagacttaatgcagctgttctaatatgggcaaatgctaccaaacagcagcaaatgctatggagaaatctttcacaaaaagaagagtcagtaaatgtgacaaattccattgttgtcttaaagatattgctacagccattccaatacacagcagccaacactctgatcagtcagcagccatcaacatcaaggcaagaccttccaccaataaaaagtttatacctctctaaaggctcagatggtcataagtatgttttagcaagaaagtatttttaaatcaagtgtgctttgatttcttgcaatatgattacattatttaaaaaggcaacacaagtttagatttcttcaaatggaaataaattgaggtaatacttgttgtggttgctattgctttattgctgtagctttattaaataaattttaaaaaagcttaagtttgaaggcttcaaatgcaggatcctgagctatgaactgaatgtagaaaatcagtaaggtatgaaatagcttattgtgtttagagaaatgcagtgttttcaatatgagtaggacatgctatgtcagcttgtgtttgaaggtatatgttctgggctggagctgggaatttgaggaaataaaagttagattgactagagcctgattatgatggatattgcatgctatactaaggagtatgggctttgtccccaaagccttaaaaaaatagtaaaagattctaagcaccaattaatatttgggttttgcactttttcccattgtactttttattttttaagtttttaaaaaactgttcacttttaacacaatttaaaggaaaacaaaacataaacaaaaatgaattctactctgattatctgtgaagtttgattttgttagagaaagaaataaaataatttataatggagaagctaaatctaataaccgttgtttaataaaatatatttaataccacaggagatacagtttacttcagatactgatatactttcacttactcatacagttctttctattaacagttcccttctaaatagaaacagagatttttattaatgattctgtagaaaatcacatattctaataactaaaattaaactatttaaaataataaataacatgtttagttgagtaatatcttccaggcacagtgctaagtttttcatatctatttaaattaatttgcctattaaggagaactctaggaaggagtttgccgaggtttagtctccctgcataccacctattatactggcagacatatacttgtctgctttgacttgcctcttggacattcagggacattttttgggggaaaaattaattccttactcctgatacttccttatatgtgtataaagtttcaatattgaaaaacttcctgaccctgcttcaccatttcattttgtcactaagaagataaagcaatgtttttgattggtaaacgagggaaaaaaataaccatgtattggccagatgcagctttctttctattggaaccgagaaatcatcagggagtaaatcagggaataagttttaccctctcttgcatccctagttcttcactctgtgttttctctttattgctgcaaaattaatagaagatacaatttaaacttgggtgtagcaatacaatagaaatgattttttaggaggcaattgctttaagatccaagaagtcataagaaagcaaaacaagtcttgtataaaaagtaaggatatttgtaatccttcaaaccttagcaatcaacataatttaatagacattacaaaatgacatattttgcctttaaaatctagtgctttcagctgtgaaatagaagacatgaatttattaaatgagggtaaactaatataaattaaaagttcagccttagccgtgatattaatatctgttcaacctgacctgtctatttttctcccatttctgtaaaacacactatcaaaagtggagaatatgtattcaaagatagccctcacaatcagggtcagagttccgttctgaagactttaaagcaacaagcatacaaaagtgtttcaagggcataacattccccacagaagacctcattggttgcttctggtcatcctgagcattctgctgaaaacatctgtcctcctagatgtccaatatcctaccatctgcttagtcagctatattcttaaaggcacaatatgaaacattgaaatcagcaaattaaaaactcaggccttaaattgaaaattcagaataaaacagtaagaaattatgaaaaatgtctctaatccaggaggtgctaaaaaaaaaatacatgaattaatcatcaaaagcacagaactgattacatacagaaagttataaaagaaaatgtgttcaaggtagaagttccatacagcacctgggggcggattataatgttttctttttaaaacagcacattaatatagtggaacaattcacatatcattggatttgatgacttaagctgcagccttactattttaattccattagaagccaagttctgatccaatgctctattctgttagaaatacaacagaaaaatactgtgccaaattctggtacagtatacgtagcctctcctcatagagctcatcctgccaacaaaatgctcagtccaaatcaataagtaaataacaccaggaaaatatagtttgaaatgaattgaaacagagttacagtgtagcggacaaaaataaatcctttcacaaaactgagagctttctgagttatttcaatcatggaatgcacctgcatataactcacttaaaattgtggcatttgtgaattatagatctttcatacatgtgaaaaacc

SEQ ID NO: 469375 - DNA, 1141 bp, Homo sapiens
aacatttggctcctcactacttatgcaactttctgcagcaggcttgaatttctcctcagcaaaatggagcccaaacccctccactacacaatatatccatgtaacaaacctgcacatgcactccttgaatctacaaacattaaaaaaataagtattaagggttttggcccattgtacctcagagtctgtgatggtattgacatagaaaaggacagctggaaaaatttcacatatgaggaagaatatcaaaaatacttaacaaaaacttcaatgttctgtgatcaggctgttgcttataaatctgaagcttattctcaggagagttacaaaccactgctcaacgaaataaaagaggacacaaacaaatggaagaacattccatgtgaatggataggaagaatcaatatcgtgaaaatggccatactgtccaaggacataggcatgggcaaagacttcatgactaaaacaccaaaagcaatggcaataaaagccaaaatagacaaatgggatctaattaaactaaagagcttatgcacagcaaaagaaactatcatcagaatgaacaggcaacctacagaatgggagaaaatttttgcaatctacccatctgacaaagggctaatacccagaatctacaaataacttaaacaaatttataagaaaaaaagcaaagaactccatcaaaaagtgggcaaaggatatgaacagacacttctcaaaagaagacatttatgcagccaataaacatatgaaaaaatgctcatttcagtgggattcaatgtgaataaaacaatttaagatattcaaatagccatgaattcaatttatctttttgagactgtaaactgaactcatccgttcccacaatatttatttattttatatcccttgtaaattttggaagatgaggagggatttttgtattctagtatacacttatatggcctttctatataaaaatcatgatttacagcatttataaaaaatcagaaaagaagcccacactatgtagaaaataaatctgataattgcatgtttcataaacggtatgagcgttagaaaagatgaatgacagagctataattcagtgtatcatagtgagtatataaaaatgaaacatatttttatgttttatgatacc

SEQ ID NO: 469376 - DNA, 597 bp, Homo sapiens
gagctataacacaaacaaggctgaaacatgacccttgctcaccatgttgcgggtgatgagaaggagggaaaaaaggggagagaacagctgcagagacagtccagacctagaagtttcttgagagagcccagacctacgagttccctgagccagggctgtgataccctttttggggctgtgcggttcctgaagtctccaagtttccgggctgcccaagtttccgggtgtcaccgcattcccggtgccagctgtggaagctgcttgcagtacacctggtcaagctgtagcctcacaaagagccagtgccgggagctgccagccccgctgcagccagtgtgcctgactgtgtgcggtggctggaccccatgcttccttgcgcacacagccctcgctgctccactagctcttgttcccagtaaaagagatattcaaaattgtaattattcttgaagaattgccttaattattcagttagcacttgtacagatatccttaaaaaaattagtataaactataatgccaacggttttcaaactttttgctcacgaagcacctaaaagaatttgcaaaaccatgtgctcacttgcacattttctg

SEQ ID NO: 469377 - DNA, 718 bp, Homo sapiens
aactgcccaagaccatgggaactcacctcttacatctgcatgacccagattacgtagttaccaccttgttgggaggtagaatctttgagcctcttgtggttctccatatgtttctggatggtccaatcgaagccctgagcactctcttacctgggtcatttctcagagttttttacacagttggtatccttgacagaggcaagagacatagctttctggaggaagaccagattcagataagggatgactctctgggatccagtagcaaacgctcctacacatgtggggaggtcgtgcctatattcaatgggaaggaatttagagttcacctagtagatgggaaaagtaccaaagaagtgcaagtaagcctctggctaagagcaggtcttcctccagggatccagaaaccacacccagcacctcagaagctcggcccagttcagtaccaggattcaacaatgtacgtatttgaataattctgaaatatatttttatttgagtcatccacagagatttccaaccaagtgatttttgtgagaaataggtaccaacttatatttcacacaggttaaaatgtattacccctatacagaattaaatattaaatatggactactttgatctaattcagttccattaaaactgctatttagtcttgtagtaaggcaagatttctaaggtttatttaaatttagaagagcttataagataatttaag

SEQ ID NO: 469378 - DNA, 5373 bp, Homo sapiens
agacactaggctgtctggcagatattatttgcaactgttagcagtgacaaatccatgcaggtctgcagcaacctcaattcctgcctcctgcaaagaaagaatttgacctaggggtaaaaagcagacctgagagagcaagtatcacacggggggtgtacaccccctgcgatattgggagtaaatcaggctctcccccgacccttgatattaggaaaaatatcccaccgtgtgtgtacacctcctactatatggggaatttcttatatacctggagggagacgatgatactaatggcaatgtcacagagggtgtacaccccctttgtgatattgttccgaatctccagaggggaagaaaatgatgttactcccaatatcgcagggggtgtacatccttctgtgatattgtggggagaggatgatattactcccaatatcgcagaagttgtaaaaccccttcgatatttttcctacaatctggggggagaggatgatattactcctaatatcggagaaggtgtacacggccactgtgacattgttcccaatatacacacgttgacagacaatggtattacgcccaatatcgcagaggatcagtgtgagaacagactaatacagaaggtatctgcagacattgatgcatacattaatgtttttattaatggtttcaagaaagaaagaaaggaaaaagaacatgtcactgtttggctggccaaacttgagtaactttaataataattcgttttacaattgcactattagttctttcctatactttaagttttaaaatgcattttggaagctaatggtacggacaatagctttgaaagatttactttttgaattgcaagtacaaaccgacatcctaattcaaagaacttggaaatatgtgtgatcagataagatgagtttttctgacttttcgagactacataaagagcgcatagctaataaggaggactaaaaaagaaaacctagatgaagaggcaagaaaatagatattgtaatatttttgaagacgatcctttaacagtggtaattccaaagttggtaagcaattgaacttcccacaaagcttgcaggtctgaaaatgtagaaaggcaaatccgtaatgtaaggatgttatcttagtcgtaactgtagagagaaaaaggaggtacattttaaattgatttgttttaattgcaaaattgactaagtgtgctctgaatttacaatgattgcctctatctacctcagatggcataggctctgaaaagaaaactaatttagattttgaaaaaataaaattatgcatttacacttcagccatctctctctctatatataatatattatatttatataatttatatattatatattaaattatatattttaaatattgtacatgtataatatataaatagatataatatatttatatatatttaaatttttatattttttatttatattttatatattttatatgtattatatatataatctataaaatatatattatatattatatattctataaatctatattatgttatatattatgtataaatatatattatatattatgtataaatatatattatatattatgtataaatatatattatatattatgtataaatatatattatatattatgtataaatatatattatatattatgtataaatatatattatttattatgtataaatatatattatatattatgtataaatatatattttatatatatttcatatattttaaaatatattttatatattatatatttcatatattttaaaatatattttatatattatatatttcatatattttaaaatatattttatatatattatatacaaatcatatatgtttatataatttatatattttatataaaattatatgtaattatgtatagattatatataaatatagattaaatataaataattatatatattctatatataaattttataaaatatatgaaaataatatatatgtttaatttatgtactttacataaaaattatatataattgtatataattaataatttatatattttatataaaaattatatataattatataaaattatatataattatatgaaaattatatataattatataaaagttatatatatgtttatataatttatatattttatatataaatgttatatatcaatatattatataatatataaataatatataaatatattatataatgtataaatatattatatagtatatagatatattccataatatataaatagatttatttatacataattatatatttatttataagttatatttatatattgatatattatatatgtttatatattatataacatttatatacaaaatatatacattatataaacatatatgatatataatttttatgtaaaatatataaattatataagcatatattatacataatttatatataaatatataggaattttttacaatatataagtatattttatatactatatcaatatataatataaaacatattatatatttatgaaatatataaatatatgttatatattataaaatatattatatatatttatgaaatatataaatatatgttatatattataaaatatatttatatatttatgaaatatataaatatatgttatatattataaaatataaagataaatatataaacataaatatgtaatatgtatagatatgaatattttataaatatatattatatataattatatagtttttatataattatatataatatgtaattatttatagaattatatgcacttatttttgtatgattatatataacctaatatataatattatatattatatataatcataaatacatatagatatatgtgaagcacagtaaagtgaagtataataaaataatgtatgcctgtacattggtggttagcagaagctgagaaaaatacaaatattttcttaactactttgataattatggccatttagatgttttataaataaatacatttctgttttttagaaagtatgctttctttacaataaataacatgtgaaaagtaatgaaaacttgtactgattataaatgtgggaatactcaagtataaattccatgaggacacagactatgcctacctgaccagcaatattttcctggcattctcacaatgaatgagaggatggatatatggatacatttgtctcacaaagctctttgcagtctgactagattagctgtagaaaaagttacagggaaaatttcattttatactttccaaagccatcataagatacattatctaaatatgttatttttaaataattagtttacaatgacagtagcagtagcagttgtattaatactatggcttatagagtaattactgtgagtcttctaagtactttaatatattaattcatttagtattaatgttattaatatctcagttttttgaaagaagaaactcaggtacaggaagataaattatcacacccaaggttaccagaatgaaagattgtgaggcaattatacagaatccatacccttaaccataacactacactacatctcaaaaatcaagtgaggcagtggtaataataccaactcctgaatatcaacacaacaagtaattaagaatatgcatatttaacacttgtacttttatctatctgataatgttagtaaacagtgatttacagtaactcatataaggaaaagacaatacctttcttccttattttatgaggcagatgtttgcaaattattgttgtgaaaactatagatccacagttttcttatattagcaaactagcaagcttgctagatattgtgacttttaatttatacttagaatcatgttgattaaagcttaaatttggcaattagactgaaatgtattcattggaaatgtctatatgtcatttcagtaaaatatatttagatgtgatattaaatacaaatgcatcaagtgtaaacctgtccagctttgtctatatattttatattttgattcctccacaaaagtatctaacacatcaagattccaatgtgtttccaatattgccagtttatactcattcctttagtttaaggcaatgatttgaaaatgtgattctcaatacaccaaatggtttacaagttgtttgatggtttcagtgaaggaagtgatagaataagtattctcatatgcatttcacaaatttgaaatgtaagattaagataattgttaaaaagcttatatgccacctaaaaagctaacaacacataatagatttgggggcaaaaagcaaaacaagattctggaaaaaatagctttacaaaattgcaagcttgactattcaaagcaataacatataatattttagagtaattactatcaaaagttcagcttacaattaaacaaacacattaatatgaagagtatatggtacctcttggaaatatgttttaatataggaaagaaaagtgctttacaacttttcgttctatttattattgagaatgtatgctacaggaacaatattaatattaatattaattcctaataatttttctcaatgtttacagaaccactatgtgtgtagaaaaaaacttaatatagacataaaagatcttacatctaaataccaataaaaaaactgccctatttaaaacataattgttagtcaaaaatatggtctttctttgcagtcagtgtagacaaaaatagtgcaaattgctagtcaaaatatcatggccacatgtgttttttaaatacctgtttgaataagtggatatataacaaattattttctaatttagaatgttctcatggtagtgaaacacatgttcttaagaatgtctgagttaggggatgcaattgtaataatttcttcatgatattgttaatacagtaaagaaaaacaatgcatcaattgggcttttgacagttggtgtttatcaatacatgttctgcatcctgaatggactaaaaacttgagtaaggtagaaatcatggccaaaatatactgacctttaacatgaaagtaaagcattaggttatttaatatgaactaaattccaatgtttcagtctctgaatttaactcctcaccatcaacagattattttcttcacatatatgaagacagtaacagtgatgacatattaacaaaagtctacaaccaaagactaaattaacaaaagaaaaaacttcaaaatctgaagttgattaaaatatacactttaaattcatttttcagtatttctagattctccttatagcttatgagagaaacacgatttttgatttggtgtctgatggagtgccaaagtggtctttagtgagaatttttgccattactttt

SEQ ID NO: 469379 - DNA, 1879 bp, Homo sapiens
taataggaaataagatttaataaacaatttattctgcaacagaaattgtgattaatggtttccaaagacctgtgtaactttgaactagagagagatgatttagggtttctggcagaagaaatttctaaccatcagcgtgttcatgaggaagcagggtataaaagtttgaaaactttgcaccctgatgacgcagtagaaaagaaaaacccattttctggggagaaattcaagccagctgcagaaatttatataaataacaagaagctgaatgttaatcaccaagacaatagggaaagtgtctccagggcatgtcagagatctttgcagcagccctcccattataggcctagaaacctaggaggaaaaaatgattttctgggctggtcccagggcctccttgctgtatgtagcctagggacttggtgccctccttcgcagctgctccagaggccaagggaaagagaatgtggatactatgtgaaagatttgtatggggcagccccggaaagggcatcaatcatattgtaactgtcttattggctagaactcagtgaggtggtcaagactcactgaaagagagtcttcatcaaagagtggcctggttgcatccaaggaggaaagaaaagtatatatacataaaatttatcatatattatatataataatatattataatatatgatatattatattatatatattatatataaatatataatatataatataatatataatatataatatataatatataatataatatatattatgttataacatatattatatattttatgtatatatattataacatatattatatattttatgtatatatataatattataacatatattataaattttatgtatgtatacttttctagatctatatataaatatataatatataatatatgatatataatatatatcatatattatatattatatatttatatgatatataatatattatatatttatatgatatataatatattatatatttatatgatatataatatattatatattatatttatatgatatataatatattatatattatatttatatgatatataatgtatttattattattaaaatatgtattaaaatatatattaaaaataatatatataaatatataaatatatattattattaatatataataatatattaattatatctaatatatattatattataacatatatattttatgtatatattataaagtatattatatattttatgtatatatatattataacatatattataaatgtattatacatattatatataacatatgttataacatatattataaatgtattatatatattatataaaatgttatatataatatattatatatttcatcctcattgaaattagggagtccattccatggaattatagctctttctctgctagcttacaaacacaaatacaaaatgttttttcaataatggtaatgctcccctcaccaatatatacctcagttctactatataaagtttatctattgtactttattatgaaataaaggttacattttatacttctttataaaataaatttattatgaaatatgttttattataaactcatgtcagaattaaacatgataaatctactcaaattttatataaacctaaatgttttaatttttaacatcaaaagggttttttttaaaccgtgtttattccatgtttctattgaatccaggtttcaaccaatcaaatatataagtggaataatttttagtaatgcagccgtaaatattacagtcagaatctctgaaagtttcaatttggttgatagttattacttagtcactgaacacagaatgtgagaggagctt

SEQ ID NO: 469380 - DNA, 684 bp, Homo sapiens
gcaataagatttaagggggtggaatgcagcgagtccgagtgagttgtggttgtccctgccagcaccgaaccagccagctggttccagagctcatgtactctagttcctgcctcattctcttgcatgttcccaccgacgaggagttgagagcagcaggctgagtgaacggtgtaccccggtcatgggtccagcagagggatgcaggtgcccacagcggaagctatgtgcagtacatctggtacagccacagccttgcacagagctgcctgtcccaccgcagcagccagtgtggctggctgtcggcagtggctggaacccatgcttgctcacccacacactttttgacactttgtgcctggctcacccttggcaggcaaagggtgcaatctgccacgtggaaataccattctgtggtctggagggcagtggtctccatcccatagctccattaggtattgctctcatggagactctatgtggggtctccaactccacatttccccttgtcattgccctaggaaagttcctctctggggccttcatttccatggtaggcttctgcctaggcatccaggcttttctacatgtcgtctgaagtctaagtggaagccaccacacttccttcatgcttctattctgagcatctgtagactcaatatcacatggaagccaccaaggcttatg

SEQ ID NO: 469381 - DNA, 766 bp, Homo sapiens
tacaaaaataaaatggactttgcttctctgatccttgattggaatcactcgccacaagtccaaactctcgagtgtggggtctgcccactgagcacagtcagacatgctggctgccacagcggggagggcagctccaagtaccggcatgggcaccagttctctgtgaggctgcggctggacctggcgcactgcaaacagcttccacagctgccaccgggaaacgcagtggtgcccggaagcttagagattccaggaactgcaaggccccaaagaaggagtcacatccctggcttggggagctcccaggtctgggggtccccaaaggattacagctcttctctccttctcttcacccacaatgtgacaataaagggtgtgtttagccctgtttgtgtcacagctcttatagccatgccattcagccagtcccaagtccttgtcctgcatgcaggaagaatgagcattcaggccctccctggtctgaaggtagagcctcaccagggacccgtccccttccacccaaaaccctgtctgcctcctgctgccactcatggtgtccaggctgcattgagagctaatcaaggaacttccaacatttacctggcaggatttcagaattgacatgaatgagggcttgcttttgccttttattttatccctttttgaatgtgaggatctatagtggattttctatgcatatcccatgattatattttgtgtgggtgagggttgaataaattgttaaatgtcataggttatgagaaac

SEQ ID NO: 469382 - DNA, 1778 bp, Homo sapiens
gtaacattcccacgagtcctacttaactctacatcctcatctctcatcagaatggggccgaatccaggaagccaagcagcattgttctgtgggccccacttccacagtgcctcacaatttaagacccactggcttggaattcagctagccaatggcagcaggttgaagtccacctttgatggatccaatttcccaggggcaaccaccaagtctgtggtttggtcaactcagccactccagcctgctggctttggagaatacagccatctcctacatgtgcatgtgggccagcaacaggtcagtccccttctgggacaaagcttccagaggaaggagctggttgacatctttgctgttctgaaaccttcattcgtggtacctccaggtatgggagaaactgaggcaactggagtctggagcaaatccccagagaactgcagcagccctatgagagctgagtttacagggcaatcaactatcccacaatttaaagaaagggaagcacctccaaagcaacaggactgcaagcgcttaattacctagggcggttttagctggacaacaagaagatgatttagatagattaaatagtttgttgttaatgtatagaaatgctacggatttttagcatgtaagaactatgtggatacctgaaaaaaaaattgaaactgttcctcagagaagacggcttaggagaaaataaccatgtgtactttatactataagagcaaaagaggtatgtctttatcggcagcatgaaaatgaactaatacatacagttataatttttataattacccttatgtggggtggtgaagttttttatttgaagattaaaactgagataagacttgattttatagtttccataatataaaaattttatttttcaagtatctactttttcacaagtaatgaaccttttaagattatgatcagaaagtattactaaagtattactaaaataatttaatggcacagaaatacattaatccatagtaagtttaaaataaccactttctcatgtaagataacatatatcaatgtggtggatttaatataaatacacagaataatataatcataataatgaattccaatccactatcatttagcatgaaagtgcttgccaggtagctctattttcccctcagtataaattcatgcatcacaacgtcatgatatttatagtgcaattttgcctacactttgtgcaaagcaaggttttacatgatatcaatccatcaagattcaatatcattatggaatgtcagcttaaagtccctgaacataattttaaaactatgcactccctctgagcagtagtacaaaacagaaaaaaatctcaaatggcatgtaagctattgattgatattacagaaagaaaacaaggctttccttattggtatataaaatatcaatgaatagaattgcggagctgaattgtgtcaaagtaacaggtagctatacatttgctaaaagtaatacatttggggaaaacataatactgttttttaaacggtcataagatttatctcaccattactgcaacaagcacccatgacaaaaattgtcttactctccagacagaagagaaagaccaattccagaccacagggctttcatgttataagcaaaaggaaattaaatttgttacaaaaggaaaatattttaaataaaattatgattaaaataatgaaaataaaacactctgcttttatatagtaactatatttccccaaataattacattgaaaaacacttctgaaagctattta

SEQ ID NO: 469383 - DNA, 733 bp, Homo sapiens
cccctttgaagtcgctttcaaccaatgactgctgaaagtggctatacatacgatttagctcctaaaagttatgtttggcctgtcaagactaagagagtgcccacaaatagtgacagacactggaggctggagatagagtcattactcaaaggacagaccatgcctgtaattagttcgctatccttgcatctcatcatggtcctattcgtggaaaacagtgccatgatgagcatcacaatcctatgtgacagacgtgagaacaacagttgggtgaatgcctgcatgagcatgagtgggccacatatgcaattagcagcttacttcctatatttttttcttcttagtggaagagaggccatgatcaatttagtatcttgtcctagatcagagattctggggagccatcttccaatcagtttaaagcttgaggaaaaaaaaaaaaagattgactctccctctagtaggagaaaactcttcctgcctgactgctttgaagtggaacatttatcttttcttgcctttggactcaagtagaaacacaagctcttcttgggtctagaactgaacttgctggctttcagactggaacttacacccttggctaaacagactttttctggaactaaagccacagtatgttcctggttccaaggatttcagactcaactgaagacaccagcatctcctctgggtcttttgaatacagatcttgtgattttcagcctacattatt

SEQ ID NO: 469384 - DNA, 483 bp, Homo sapiens
taaagcaaggttggagagtacccaaaccatgaaatttctgtcatcctcagagatctattgccctcccggcacatcaatgtatttctcctctctgggcaggtcatctctaaaaggcagcagccccagtcaggggcttatagataaaactcccatctccctgggatggagcacatggaggaaggggtggctatggtccagcttcagcagacttcaacgttcctgcctgccagctctgaagagagcagcacatctcccagcacagcgctcaagctctgctaagggacagactgcctcctcaagtgggtccctgacccctgtgcttcctgatggggagatacatcccagcaggggtcgacagacacctcacacaggagagctctggctggcatctggtgggtgcccctctgggacaaagcttccagaagaagcagcaggcagcaatctttgctgttctacagcctccgctagtgatacctaggcaaa

SEQ ID NO: 469385 - DNA, 666 bp, Homo sapiens
ggacatccttgaaggacagtagtgaagaaaaatcctgtcagtggagaaggggcgccagtgaaggcagaaagcctcaaatgcatggtgtttatgttgggagatacacggtgttgctaaggctgcagcatcaagaaaaatgggaaataaagctctggggccttggggcagctgcaggtctgttggattttgctggaggtccactctggatcctgtttgcctgggtatcatcagcagaggctgtggaacagcaaatattgcagaacagcaaatattgctgtctgatccttcctctggaagcttcatcccggaagggcacctgcgtgtatgaggtgtcagtcagcccctactgggaggtctatgccctgcccccagaggtggaatctacagaggcagcaggccttgctgagctccggtgggctccacccagttcgagcttccatggctgcttcgtttacctactcaagcctcagcaatatcagacgcccctccccccaccaggctgcatcctcacaggtcaatctcagactgctgtgctagtagtgctcaaggctccgtgggcatgggacccgctgagccaggcacgggatgtaatctcctggtgtgccatttgctaagaccagtggaaaagcacagcatttgggtgagagtgtcccgtttttccaggta

SEQ ID NO: 469386 - DNA, 730 bp, Homo sapiens
aattctgatttatagcccatcagtcaaaagcacagggagtctgactgccaatgtccttcctgcaagcctgcactaccggcagtctctcttgtcctctgccctgcccttattccattcctccagcagcgaaaggaggactgagaaaaagaggatatgagccaacatttcataatgcccccactgatgatgatcggaagagctacagtcaacaaatactcatgctgtttattcttggatttcagttcctggttccactgttagcaactgtgaaatacagcagttatccttatctgctggggatgaattctaagactcctaatggatgcgagaaacagccaataaataacatgtttctgcaaatttgttggtccatccaagaaggcaatgtggaccagagccacctcagtcaacacacagacctgcaggaaaaagccaagctgggccaatcatcacagtctcaggtggactcacccagacaagcctgaaaaagatcagacctgccttatccaacacacaacagcaataatactttttttgttgtttcatgacagtaagattgtgctagattaagtctttttagaatttaactttttttacaatagtttattgtcatgatacgcacagaatcagatgcacatgcttagtcaattttatcatttcagatttttttctttttaatacaagattcttttcaagtagtatcatttttgcaggctattaatgacaacaa

SEQ ID NO: 469387 - DNA, 912 bp, Homo sapiens
actaggaagcagctacctacatcaaagctgggtgaattaaacagaagggagagtttgaatagaatatgggccaatacattgatactgcatataaaataattaaaagtggaacatatcatcaggcagtatacaaatctttcgggatacatagcattaggtatgggcataagctacataagaacttaggaagtacagtggtggctgccacaaagacgccagatgcagcaggggaggcctggctggggctgagagctacacgaagcccgtgggagccagaacaggtaggggccccaccctcttctgagttggtggggtgcccagccatagttgtggacctggacatccctgtgctctcagggctcaggaaacccctggacactgcaggcgtgggagtgcctgcttccgctgcctggcctctccctgctcctggtgtctgctctgattttggtgcaaagtttgggccgagcctgggcgctatcacgaccccttcgggtgtgtgtgcactcacggcggtgctgacatgccagccccctgccacctcatccctctccggaatttgggtgccaacgagcatgcgagggaggtcgagggggtgctgaggtctgcacagaagaaaggatgacctgcctgccaataggagctacccactctgggtctcctctctgctgagaactggacacttattgggatgacctgactcgtatttgaagactttccctacaacgaggcactcagctgtgattacttgtgaagaggccaatttgcaaatattttgtcccattctgtagtttgtttgtttactctgttgattgtttatttttctgtgcaaaaactttttagtttaattatgtatcatttgtttattgttgtttttgttgtgcttgcttgtgggacctttgtcatgaattctgc

SEQ ID NO: 469388 - DNA, 634 bp, Homo sapiens
taaaggatttacatcaatagagccatgtacaaatgaaagaatatgattaattgttgctgtgatcagggtattaacagttttagtagagtattttatggatcgtgcattaaagtgcaattgaagaagtgtgggaacagactaatacagaaaattggtaccagaaaagtgggcattgctataaagatacctgaaaacgtggaagtaattttggaactggatttcagaggatgtgtggaaacacctgaatgtccaggcagaagtcatctccagggatggagcccttttggagaaccagtactaggacagtgtgaaggggaaatgtgggtttggagccctcacacagaggcactacctaatggagctttgagaagaaggccactgactttcagaccccagaatggtaaatccaccaacagttttcacagtgtgcctggaaaaagctataggttaaaatgattcctaggtattttatattctttgtaactattatacatggatgatttattgatttctctttcagattgttcaccgttggcatatagaaatgctactgattttttatattttaatttattgcttttatttttaatgaatctattatgggtttttgaattgtggttatcatgaggcttat

SEQ ID NO: 469389 - DNA, 1129 bp, Homo sapiens
taagtgggagttaagttctgaggatgcaaaagcataagaatgatataatggactttggagacctgctgggggatgttgagagggagaaggtgtttgcttcctcttcgccttcagccataatttgggttcgtggtctcactgacttcaagaatgaagccacggaccctcgcggttggtcaaatgattgtgaccaaaattgtgatagtgctgtggacagtgaagtccagactgatgagttcttagatgggaatgaggaattctttggcaactggaacaaaggacaggaattcaagcatactgtagaaattaatttaagtaaagtggagccaagtgctaatagccaagacaatgaggaaaaggatttaaaggtgtgcagaattcatgagtcgaggctagggagccttcaactagattttacaagatgtatggaaagcctgggtgtccagacagaagcctgctacggggtagagccctcatggagaaccaccactagggcacagtggagaggaaatgtgggattggatcctccacacagagtccccactgggtcgctgcctagtggagctgttagaagaggaccaccattctccagattccagaatggtagatccaccaacagattataccatgtgcctcgaaaagtcacagtcactcaatgccagcctgtgagaacagcctcagaggctgaagcctgcaaagccacaggagtggagctactcatggctttggaagcccacccctcagaccagtgtaccctgaatgttggacatggagtcaagaaagattattttggagctttcagatttaataattgccattctggactttgggggttctgcatagggcctgtagcccctttcttgtggcaaattagtccattgtgtaatgagagtctttacctgatgcttgtacccccattgaatcttggaagaaggtctgatgcagaccgtaatgcaatggttgatgacttcagatacgtgcattacactttctctgctgaactattatcaagtgaatttctcatggcttctaacttaggacagaactttagaaataaatgactgtttagtttagagttgtactcattttctattgctgttctaacaaattaccaccaacttcagggctt

SEQ ID NO: 469390 - DNA, 5887 bp, Homo sapiens
ctaacaataactttacctcttcagtcagcttttagtaaatgcttccagcagggtactcacctttcgggtctctaaggtcctctctggcccaaggcaggtccagaaatgctgtcctagagcctagacctggatttggggatcccaattgcctgcttgaaagaatccatctccataacataaaagtacaaggtgaatcagcaagtgctgatagagaagctgcagcaagttattcagaagatccagataaggtgattgagaaaagtggctacaccaaaaaactaacttttaatgtgattgaaacagcttcatattggaagattggcttcaacaagaacaatcataaccagatgcctaaaaagacagacaaaattgagaaggaaactgagtataaaaatctctggtcatatgaaactgttgatcccaaactgccaaaatctgaacttctgaattttctaatgatttattgttgtctttgttaagctaacttgacgcccactttaccatacttccttctattaaaaagatacacttctaaaataattttttgtttaggaaacataattgtatccatttacaactccattaaagctaatgatgaaaaaaagttgtcatattctgtgtttttattgtttttagacttttctaaattcattacttggataaaaaacaagcactcatttatatcatttgaatcctttgttttcaaagggcttgtattaaccttcgacatccatgcataattaataagtattttttcttgtcctcgttaaggtaaactcctggctcactttttagaaaaatgtattattttacttttattattaaggtacaatatttgaagaaatatatgtgggttcatgtttcgcatgtacatgcatacatatatttatgcatgtacattaatataaatgattacatagacatttatttatgaagaagtaaatcactgatttccacaccaaccagaataacacatttgaaagtctgtctcttatatcacacaaaagtaatcttatagaattataattctacagttgctaaaatttaattccctatccattttacttaaaattcaacaataaatattttcaacatcattatataatattataaatattctattttctttaagcatatgcaatagcttatttagaaaactgcatttttagtgtgcttctatttattcaacattatatctacaaataaaacaattacatttcaaatttttgcatttttcaacttttattataagatatgctctctagaaaagattgttttattttcattgtgatatttagtaagtgcatagtttaacacattttaacaacttgaagacaaagaagataataaatataataaatgcatggttttcaataggcatatattatatttactatatatacgttttaagattacacatgctcatcaggcatatgcaagtgaaaatatatgtgtatatcttatttattatatttttatatattgtatatgcatatattaatcttataccaaaaccgaaaatgcctccattttaaatgattatatcataatttcaatatagcatatttcatatgacagaaataatgagtaccactgcagtcaactgagacattaataaccatttaaataagaaaaagatacttggataatttaaagttgcctttaataaataattttgggctgataaagtaatataaacaattgttacaaatgtgaatagtatcaaaattattacaatacaaaatactaaattatataggatgcagtcaaagctgtgctttaaggtaaatttgccatccctttctgtctcttgataaaacatatttatagtttatttattttcttgcaacaactctcattacatttacacaatataaattttattccctcgctattgttttaatggatcgtatttctcctttcttatactctactatttattatttttaaatttgtaaaggaaagacagtgccttactcattcgattatttttggaatttaattaacaaggaaaatccctggaatgactatagcaattcttggaaaatgttaagctgttaataaagatctgctatcatcaatcttgaggaaaataagagttacaaactatatttatacaaactatatttataaatacaaactatatttagctacttacaatgctgattgtgtccttaatagcttatgtcaattgtttcacatgtataccctgtaatcttatctatatcctcctgtaattatgaatgttttgccttcgtgaattacaacacatttaacttaatgcagaactaaataactatcttaaatgtttagcatcacaactctgtagattatatactattgagtttataatatgattatatatgcttacttattttagggaaccaactgggcttaatcccgtgtaagtaacatgatttttctgttcatatgttttcagtgttttaaaatttatatttgtattcacaatcactgaggttctgttttgaaattagcctcttgtgagaatcatgtcttttatagagaaaaatttttgttcaaaccagatctttttacagaataaggtaggtaatgatgacgacaatgactatatgtacttatcgtgttgctctgatctgttactcagaattggtaattatgtgtaatttagtacttagtactctaacatacatctttgttattttctccatatcattttactttatttctactgaccccatgatattagaggagcatctcatatttttcctagatattgcacatttgagtttccactgaaacaaattactacttacattcttcaatggagataaattttactgcaaataattgtaattcttctttatcttatccaaattctctatatcccaaacttttattgttgtttgtcttttatattcctttttttgctatagaaaactcaggtattattccaaatatatgcttcagtgatgtatgcataaaaaagagcttgtgcatggacataatctttttcttggctagccaaagaagtagccaaatagacatagtttgtaaaataatcaaaattctatatttctcagtcatatacaataaagtggtggctacttagtaattcagatgagctaaactgatgtatgcctttttatcttctgttccctgataataagtacaaccttatctcctaatgatatcaatcttgtcttatgaagcaatccagatttcacagccattcctagactcatttcatgtaagcctctctctgtacttcctatttcataatgaatctgtataatcatgaaacatcttattatgtgtatatgtaaagggtagttttaatttgattgtatcagtggtaaggcattccctcttagaaccatctcattatcttatttttaagaatgatacccagtcaattatttatctttgagaagttttttagaaaaaaaaatcagtcccttttagaggtggagctatgtagccacctatttaagtctccttaaatgacatttttatttttaatttacaactttccatatattttgattgttctctattttctgcacattgacagtgtacaatacacatatagcactattaggaaaaaacaaatgtgtaacatctacacttattcatatagcaatgtattataaatactgtgcatgacaaaatatttgaagttgtaagtatttcatgatattaactttttactactaattaatggtaagcctcatagcctttctgaatgtacagtttaatagtttgaagaaagctacaattaattcttattataaaaaagcctgagttcatgaaaaaatatcaattatatcatgtgtatttttatgaatgtgttgaaataagaggaacgagaagcagtaaagattttcatcaggacttttatctttcaaataaaaggcgttatttgagttatagacaagaaaaacaaaattttaaaatatgcacttacatgattttatcaacattttaaaataaaaattgcaacagaaagattccgaacacattcattgtgataatagtctactaaaaattaattcataaaatttaacttctcttaatgtgattgtgtttttaatggtaggtagaacatgccaaccaacattgtcatataagtttatttgaaagctcgattttctgcacagtgacaatgtacagtcattcaacaatattttggagaagtacaaagggtacatcaattcttttttctcttgggaagttcagttcacatactctcttatattagcagggaaacctcctggataagagagattcaaaatgtttgttggttattattgctttgttttcttaaataaaaacttgctgtgatcctttgattaagtaatgtttccattcaaaggaaaagaaaatggtgtcagggtgagaagaagattaaaaatggaaacctcaagacagctttctccagtgctcttgtagaaataaaggttttccaacatattttgtctgtttattgattatcatttcatctggagcttgtgtccagttgatttgttccaaaaattttctccacgttttctttgccttgcttgtttttggacttgtcttctatatttacctgcagagttttctgctagtttatctttgcaactctttgagatgtttcttatatcctgggttttcctgcatttggctttactctgcctactaaaatagtgaattccctgggaagacttatttttgtgtgtgttcactgaaccacatatgtattttttctgtgtctagagagaaataattgcagtttaatatttgctgagcatcataaggcagacatcctttttcactctttttacaacatttaaaatgacagctggtatcgaatgtgacataaaagattctctttgtagagttatatattggtaaaaattaccttgttagaagtcaaagggtgctcacagattcctatttatatactgtttcaattcccaatcaatttccacagccattatttcatttcctcatcatagtaactatgttaagttggtgaagttaggcgtgataacattatgtatgttttagagacgagaaaatcaagtcagggaacaataaaaaaaaatctgctgagagtctgagcaaggtaatgccaaagtttaccttacgatatatgtgtctactttctaagaatactggtatggttttaggcccctttacaaacttcatagtaataaccaataaaagtttgaacagtatttgaaaatgtatatgatttaaattttatttagaaggtagttgtaagctactctatttgaaataaatttcttcctttaaaaacatattgaagcagaaataataaaagcaatattaaagaaggatgtaaattttatgcccagtttcccagctattcgtgtaaaacaaccaccaaatatatcactgaatctacaagttttccatctatttgtgcaaaacaatcaactgccagatttatcactgaatataattgacgataaactgaatgattatcagggtcataagtgaaagttttaataaattattttgcactgtttctcttttatttttccaaaaaaattgaagtttctttttgttgttcttttgaacaacataaagtatttcaactgaaacacaagttttttcaagtggtgaagacaggaatgctctattctggtcaacttttatgtacccaaatacatttctgaaatatactactaccaccttaattatagaaagacaaaatactttgaatttgaatatttattacttttttctactaacacaatttgcaattaaaaataataattatatattgacactcccaattacaatgcatagtacagagaaaatgctaatagatgttcatgagtgaacacaaattgaggatggacaagaatcaaaacagtcagtagcatatatgctttgt

SEQ ID NO: 469391 - DNA, 799 bp, Homo sapiens
ctctggaggaaacaagaggtgttgagcgactgaatggccacatcctctggcatacagcagacaggaagatgtatgaaaacgcctgggtgcccagtcagacgtttgctgcaggggcagggccctcgtggataacctttgctagcgcagtgtggaagggaaaagtggggttggaggctccacacagcgtctctactggggcactgcctacgggagctgtgagaagagggccattatcctccagaccccagaatggtagatccactgagcttgcaccatgctcctggaaaagctgcagacactcaatgccagcccgtgaaatcagccaggagggaggctgtactctggaaagccacaggggcagagatggccgaagaccatgggaacctaccttttgcatcagcgtgacctggatgcaatgggctgacccatatgtcacacaggtgtctaagctttctgctcagccccagagtgtggtgggtgcaatatgggaaaatctggactgggtagccctgcctacaggtcccctgatggcaggcacagtttctagcatgcagctgcaccggaaggtggcaaaacatctagagatttaaacatggtttggtatctggaagagggcatggtacatgtttatatatgcatttaaatttatttctctgtagaaacagatgaaaatatttatttttggtaaattaaatatgaaaatgaaattacctgtttgataataaaagcatcttattctcttctagatcatactatattgaaatattatgtatacttaatatcacaggtgttgtgttat

SEQ ID NO: 469392 - DNA, 929 bp, Homo sapiens
ggcggcagaaatttctgcagacttaaacatccctgtatgacagctatgaagagagcagtggttctcccaccacagtgtctgagctctgagaacggacagaccacctcctcaagggggtccctgactcccgtgtagcctaacttggagacacctcccagtaggggccgactgacacctcatacagctgggtgcccctctgagacgaagcttccagaggaaagatcaggcagcaatatttgctcttctgcaatatttgctgttatgcagcccccgctggtgatacccaggcaaacagggtctggagtggacctccagcaaactccaacagacctgcagctgagggacatgactgttagaaagaaaactaataaacagaaaggaatagcatcaacatacacaaaaaggacatccacaccaaaaccccatctgtaggtcaccatcatcaaaggccaaaggtagataaaaccacaaagatggggagaaaccagagcagaaaagctgaaaattctaataaccagagcaccccttctcctccgaaggatcgcagctcctcgccagcaacagaacaaagcagggcagagaatgactttgatgagttgacagaagtaggcttcagaaagtcagtaataacaaacttctccgagctaaaggaggatgttcaaacccatcacaaggaagctaaaaaccttgaaaaaagattagatgaatggctaactagaataaacagtgtagagaagaccttaaatgacctgatggagccgaaaaccatggcacaagaactacgtgatgcatgcacaagcttcaatagccaacccaatcaagtggaagaaagggtatcagtgattgaagatcaaattaatgaaatgaagggagaagagaagtttagagtaaaaagagtaaaaagaaaaaaaaaaagaatctaagaaata

SEQ ID NO: 469393 - DNA, 600 bp, Homo sapiens
gagggtccgcggcttcattcttgaagtcagtgagaccaagaaaccaccaattccggacacaatgggtccaccaatgctgtctggcagccagggattagagtcaaaaaccttagaaatccacctgatattctattctattgtagcaaagctggcactcaaaccacaggacgaatccttcctgttcttctctcttctttctacaagtaaggagcctcgcttcatggctgtcaccattatcagcccatggagagttctgtcatttcactgtcaatcttcgcttaaggtccatgggctcttcagtcagtttttggtgaatgttgtcaggcctaggactcattcttcaggtcagtgggctcccttctggcccagggcaggcccagaaatgctgcgcaagagcctaggtgtggaatttatgaccccaagggcctacttgctgttctacctcactatagctgagctggtacctgaagtaccagtgaaatctcaggatttcactcaaggcccatggcatactacctggatattgctgttggttattctggtcccaaggtcttcttagtcagcaagtgatgaatcctgcctggactgggtctttccctt

SEQ ID NO: 469394 - DNA, 1096 bp, Homo sapiens
tgccctgaaagccctgatttgagcactgcgcaacctacgccccggtgtgtgatgttccccttcctgtgtccatgtgttctcattgttcaattcccacctatgagtgagaacatgcggtgcagcctatcattgttggacattcggaggttgtatggaaatgcctggatgcccaggcagaagtttgctacaggagagggcgcttcatggagagctcctgctagggtagtgcagaaggaaaatgttggatcagagccccaacacagagtctctactggggtactgcctagtggagctgtgagaagagggccactgtcctccagaccccagaatgatggatcaaccaacagcttgtactgtgtgcctggaaaagctgcagacactcaacaccagcccatgaaagcagccatgagggaggctgtatcctgcaaagccacaggggtggagatgcccaagaccatgggaacccaccacttgtatcagcgtgacctagatgtaagacatagagtcaaaggagaaaaaaagccagctctacccatctaagttatatcacttctttgttcatagctctataatggtatccaatcacactcaaagtggaagacaaaatttttatattgcctctcatcactgatctcatctcctgtctctgaatcccttggttattcttctcaagctccccttccgctgaaagccacttccacttcttaataaaatcctccacattcatcacctttcaaactgttcatgtaacctgattcttcctggacactggacaagaattcgggatgcactggaaaaataaaaagggtatgttaaatgaaaaaggcattataatagaataaaaatgcgcattgtgataatttagcaatgaatgtatacgcataaaaatactaagcaaatgcacacaaaataaaatattagctttagacaggtggaataaattatttttttctgttttctaacattctgtaatgtctacatttttttcaaatagaaaattataattctatttgaccttggttgtttaaagactcaatactaactcaatattaccctaaaaatattaaacttcttattacgtcagtcaagttatttc

SEQ ID NO: 469395 - DNA, 1080 bp, Homo sapiens
agccatgctaacgagtgaagtgggggcggggctgggccagcccaggagccatgagcctgagtgaggcagcagaactgaaggagctaaagcaggcacccccgcccccgcctacctggcaaagttgcgagcagccggaaggaaagagctgtagtatataccaccacccccctagtataccaccacccctcaacccggcccccaccgctaacaaagctgccggctgcaggaatgagagagtggtagaacgacacccccgtctcactccttgggactcctcagttgctggcggctccaagttttcaggagccacggtgttcccctcttccagatgctagtgccaacagtggaagcagcttgcgatatgcctagtccacctacagcctcttaccgagctggcacctgtatcagcgcctggagctgccggctccgccggaggcagccggtgcactgggctgtgcgcagtggctggactttgcactcacccactcacacacccctcactgctccacgcctggctcagcctccaccgaaacgggatcccggccagaagcacgagcctacctacctgcatatggccactttcctccatcttcaaagccagcaagagctgtgctcctatggttttgggcggctccacccctgtggctttgcagagtacagtgagacagacaggtgggagggggtccctggagaaactccaaccagcctgcccactgaggtggagcctcgggaagttcactatgtttgtagcagagaggagcctgacccctcctcttctgtgtggaaccttggattcaatcagcccgtgagcagtagctcctcgcttctctcccctgtctgctgggaattggacacatggcccaaggtggccaggatggctgactggtgttttcccagcagctggagcctttcccttccccggtaattgtgtcttcatactattagacactcccctcaaatgtatcctccaaactagagttactttctcaatcattaaactggttggcttagtttaggatcaggggaagggaactcagaagcccaacatattggcaatagggtaaagtttttttgccagtc

SEQ ID NO: 469396 - DNA, 702 bp, Homo sapiens
gcgtaggcaagatgttacaagcattgataatcactgtcttttggaagattggtacagacaaaatcaagagggtacacaaaacacaaggatgtggccccagcgcacgcctgatgccaggttccttgcaacatagtgctgaaagtgggtcctcttgtccacactacccaggaagatctgctagtacttatttcgaaggcgaagttgagagcccctgggtggggaaatatctgatgacattggccaggttaccacgccagaaggacaggactctctcctccttgggaatacagaccacacagtctataatgtgcttgtactgcttatctgtggtgcaaactcggtgtgggccacgcggcaatgaccttgtgggggttcctgcgacccctgaagccacagaagtcaccactcacggctctctacctcttgtcctgcgtctaggaaaaatgagtttgcacgaacaaattgaaggatggcgaacatggaggattttattgaactatgaaagtggctctccgtgggcaggggagctaaaaaggcgacgggacaggcagtcatatttttgaaaactatttgtattaatatcattaagatttttagaatgtttctgaagtaattttttcttattttaaaaataaatataaagacactattaaaatatttcactactcaaatatttacttcaaaacacaagcatcatatgtt

SEQ ID NO: 469397 - DNA, 3744 bp, Homo sapiens
aagatattggggtacatcataaagaaattaatcaatcactgaatatgggctgttgtggtaatgtgatacttttgctgattatcttatttaggatgggaactgcagtttcaggggctcctatttgggcttcccaccataatagttattacctcatagaccaagaacttattgtgaaggttgcactagcaatcaaccccagttggaacttttggcatggatatgatttaacagtgtctcttccataccaactgtataaagctaactgtatggaaattctcctagagtactggaagaaattctgccctatgggcaactactctccatggcatttctatgcaacttgtgacagcagtttttctagactgtttttgcaagaatatttgcataacttccagagtacaaccaaaatgagtgtgggaaaggtaatataccagaattcaatcatgaaatttatgattggtgacctgaaaggaatataattgctcctttctaaacttgacagagtctcatatcatattttaaagtttaacaatgtgtaatatcttactagaaccaaaaaatacgctatcagggtggtttgaaatgcagattgctttaaaaattgtgctaaaatggcttattttctgcagactacttagcaatatgagttcaaagatcactagttgaatagcccataaaaagtccattatgtcattttatatacatctagctgccaagcactcaagatcataataagaaattaaatagttcaaagaagacaaagttgtgaaagttaagtggtgagacaatgcaatgttctactgatagacattatctcaatagtttataaagtgttgataactctttaccaacctgacttaagcatagtcttgccccattgcctaagcaatacattgtatagttcactcagatagtttctgtatccataatttaaaggtgttctatgcctctcttctaaattctccttctattaaatataatcattgcagattttgacaatagtatccactaattgccattataatacaataaagaagataagtgcttccattccccatgctatgccaaagccctttgcaggacctagggaaaaataaaagttactctccttcagacacattatttacttttcgtcaacctctaaaattctccatgagaacacctgggcactgcatctgattttgcagtgttccttttcttttccaaaccttttcaagcaattaatttgaaagctcccagaaaagaggaaagcttctttttttaaaaaaaaaatataaaccatgaagaataactggtttcctggtcatcattttcattcccattacaaatccatcagattcattttacactctgattccctagtggcctttcatcctgtttatcaatgttttccaatccttagatcataggaatatcacatatacttatgagtaatagagattttcaggcccatcctcacagtggcttaattatagttccgtatgtttttgcacacattttagtgtataattttattagaaatattttactactaaagcaatgatgttttttaaaatgtttttgtaaaccaattctccaagaggaaggaaaggagaagaagaaggaattgaaaaaaaagaaagaaaaaaggaaggaaggaaggaggcgggttgggagggagggagggaaaccttgatttgtagtatttgccaatttccatgatgtaaatactctcatcatggccaatatccagcctaataagttactgtccttggagacagtgttgggaagagatgcacacaataagatcttgtgaactggtgggaaccagctccaacatatcactgtaccttggggattccacttctactaaattgcttgtaagtttcctactcatatgtattatttactgctagtacctgtgctttagttgctccctctctctgatatacagaactttattttctgtctgcctgatcaattaatttctcctggagatactcacaatccatccgggaagctattgttcaagtgacagcctcagatttttgtagttagggataaatgtttctttcatagcacttaccacattatattgcaaatatctgtttaaatgtctattttaatcttaaactgagtcaccaagaattatatttcattcatcttacattttaccagagcatagaaaaatgtgggacctaaatgtttatatgtgaaactcataatttatgataatgaattaatgtaatactgagccagcaatttcaatattgatttaaaattgcaagatctgatatatatgaaagagaagttgcagtagggaggtgataaggtgattaatggattttaaaaggatgaataattgaaaaaatatagagatagaactaaaagaaatataagcaatgtcttgttcatagtgtcaactggtgaatttccaatgtagaaaaatcactggatagttttatgaacagtataattgtattttccacaattaaaacatttattaatacagttgtacatatttatggggtacgtgtgacacaagcatacaatgtataatgatcaaatctgataactgaactaaccatcagttcaaacacttatcatttctttgtgttggcaatattccaaacctattattccagttattttgaaatttacaataaatgattgttaactatagatgcgctattgtgttaccaaacactagatcttattattgctatgcaaatgtatttttctaccaattagtgaaacccactttacccttccaaccctctggtaaccatcatgctattcactgcctccatgagatcaatttctttttttagttcccacatatgagaagatgcaacacttgtctttctgtgcctggtttattacacttaacataatatcctccagttccatccatgttattgcaaatgacagaatttcattcattttgatggcaaaataatattccatcgtgtatacacaccacattttcttgatccatttacttatgtgaatatgtgaatatgagctagaactcatatcccatatctgcaataaacatgagaggccagatagttcttcaataggcaaattttaatatccctttatttgggatattgtgtgattatattttaatcttgctaaccacttttataattataccagtcaagaataatgaggtaatacaattttaagttttaaagcataagcctgagatcagggagatattaatcccatgtgattttactcaaagccagaacaaatagccaatactaaaatctaaatgtgaaacagtacaaaaactatcagaaaaatatcattattgaatacattttatagtaaaatcccttcagtgtccgttttttagcttgtgtttcattttaacttaaatgcctatattttcctatgtaatattttaaatgtttcttgtctttaaattcaacctttagaatagaaaagttacttaatagaagcttatctttgatacatttagaaagaagctttaaaattaacttctgctcaatatagtgttcacctctaggagcaacttcataaagcaacagcctgagcattgccaaatcacaggagcaatgaatagagttatccgggccactcacaatgagaaatgtgatggaagaactgaggaatgaagcacatttaaaacatactttcaactttcaggagacatcaacacagagaaaaagttcagaataaactgggtggatatgagaaggtatcttttgagaacataaatacgttttactttcc

SEQ ID NO: 469398 - DNA, 623 bp, Homo sapiens
agaagtttgagcagtggggcacagaagaaacgagccacacccccatcgcaagtgtccagaaaagcatggtactcaggcaaaatactgcagtgattaagaaggcaaaatctgaagttcacaggaaacagtcaaacttctatgcaaaaggtagggtttctcagcttcacttgcccctttatccttgggaacatcctacccctccagggacagagaagatacaactgttcccctacttgtctcaacctttggggaatctgcctttccagctgatggcaaagaatccttccttcctgacagaaggaagctgtgtcaggtggccactggttcagcagattaatatccaaaggctgggcattgaacaaagacaggggttgacttttgtacatacagctaaagagggttggccatctagtgactcgaaacccgcagggcaggtaagcgagcttacagaagcagaacaaaggcagttaatcatactgtgacaggttttgcaacaggctttgcaacatgagcttatctcacttaaacatgtcttgtgactttgccatgctacagaaagaaaaacaggaacttataaaaacttttacaaacttgcagaaacagttacaaaagtagttatgaga

SEQ ID NO: 469399 - DNA, 1392 bp, Homo sapiens
ctctctctctctctctctctcttcctattggctctgtcactctggagaatcctaatgcatagtgcccttgtagcaaacaggcagccaatttgtgaaagcaaaggaaatgccttgaaggaaatttacagtgcaactcctgtgaattcaagaatgataagaaggcaaaatagccttattgctaacatgggaaaacaatttagtggaacaatagaagataaaaccagccaaaacatttccttaagccacagtctactccagattgaggatctaactatcttcagttctatgaaggctgagagaggtgaagaaactgctaaagaaaagtttaaagctattaatagcagagattgtttcatgagatttaagaaaagaagttgtcatcataacaaaaaagtgcaaggggaagcaacaagtgatcatgtagaagctgcagcaagaataaaaaatctgaatggatgtgtgatgaagatttttttccacttttgggaacttaagaatacaatagctacgtaaacattcatgtacaagttttgtgtagccaattatttttcctttgattagtgaatgcttaagagtagaattatagggtcatgtgtgacttttctaaattatttggtaagatctgtctgtcatatgttgtctctgaaatctctgtctattccatttttgtgcatctagtgtttggcagagtttttcttgaatgccagaagcagagagagaaagaaggaagggaggtggtggtagaagagggaaggtacaaatataaaataaaagtaagagagagaaaaagaaaaggaaaacccttctcccattctttatatagtaacccttaacattaatgcaatattacactatgaatgtctttggctttgatacattaaaataggagttcctcttccctattgaatgagttaggaatagttgtaggaattacccttatagtgaaagagggatttaaaaaactttcattaatgcttaatacaagacaagaatgtaatatttctctgaatgaatttgggcaaaaaggcatttgaaaagaaattgatttcaaaagaaacaaaccctactgatatgtgttttcattaatagcaatattttcaaatattataacattgtaagtttataaattgtgatattaaaattattcaagagatcataatttctttgtcattagattcagctatactgtgtatgcctatagtaggtataaaatgatgaataattccctttatcttattcatatatattgacttttctttcccaaaaacctgaaaccacaagaaactggatttcaatattaatttctacttaaagtagtaaaaatctataatttattctgatattaggattagattaggcaaacatataaagaaaagcacttcagaataataa

SEQ ID NO: 469400 - DNA, 542 bp, Homo sapiens
ggattcactcgccacttcggttcttgtttggaaatgggaacttatgtttaaaagggaagcagagcataaaagtttgaaaaatttgcagcctgacaatgtgatagaaaagaagaaccaatttcctgaggagaaatgcaagtctgctgcagaaatttgcataagtaacaaagagccaaatgttaatcaccaagacaatgggggaaaatgtcttcagggcatgtcagggtcttcaaggcagcccctcccatcacaggcccagaagcataggaggaaaaaacagtttcatgggctgggccaggcccagggtcttgctggttcgtgcagtcttgggacttggtgccctgtgtcccagccatggctaaaagaggccaatatacagctcaggccattccttcagaaggtgcaagccccaagccttggtggcttagatgtggtgttgggcctgtgggtgcacagatgtcaagaattgaggtttggaaacctccccctagatttgagaggatgtatggaaactcctgaatgtccaggagaggtgtgatgca

SEQ ID NO: 469401 - DNA, 611 bp, Homo sapiens
taaatacagatgaaacttcgctcacttgcctgcccctcacctcttgctgtccagcttggcagttattctgaggcacagaataagcgcttagtaaaatcttgcacgtcgattgttccatgcatatcagaagaagtcaagcaaagagaagtcgagcaacagctttcagggtattcagttgcagcagtatcaaggcctcaaatgaggaagacttgcaggatagtccacccccaacctgaacctgcttttgtcagagttctgcctaacacggtcactcaagcccaggtgggatggaagctgatgccacctctgccactagtactgttaattagaaaaacttcagttgaattaaatttaaaggagcttgagagcaatgaacgattcgcgaatcgggcagccccaagaatcacagcagattcagaaactctaggggtgtttcgtggtcagaccagatttatagacaaaaaaagtaaagtaagctataaattcccacttttactttttgtttttggattttagcttattccgtctcccctattgttatatcactgacacctatcacaataatcctgaatagtctttcttatcattttgacaaatgtcagaataatttc

SEQ ID NO: 469402 - DNA, 558 bp, Homo sapiens
gtttaaaaagcatgaggcggtgtcttccaacagaagcaagagcatgctcattaattttagttcttctaatgccctcttctgctgtttgatgagtcaggctgaaatcaggaccctcagctgcaggtctgttggagtttactggaggtccactccagaccctgtttgcctgggtatcagcagcggtggctgcagaacagcggatattggtgaaccgcaaatgctgctgcctgatcgttcctctggaggttttgtctcagaggagtacctggccgtatctcaagctgcatggtgggagaaccactactctcttcaaagctgtcagacagggacatttaagtctgcagaggttattgctgtcttttgtttgtctgtgccctgcccccagaggtggagcctacagaagcgggcaggcctccttcagctgtgctgggctccacccagttcgagcttcctggccgctttgtttacctactcaagcctgagcaatggcgggtgcccctccccaagccttgctgccaccttgcagtttgatctcagactgctgtgctagcaatgaac

SEQ ID NO: 469403 - DNA, 665 bp, Homo sapiens
accacaaacccaccaggaggaatgaacaactccagacgcgccaccttaagagctgtaacactcactgcaaagttgaagtgggtaggggagcaggagtcagaagctagcctgaacaacacggggagtcactttttagcagattggtttggaagaagaagagaccttgaaacgttaacaaaactgcacagaaagcaacaagagagtggaaagggagcctgtggaatgggaaaaatatttgcaaactatgtatcagataagggcttaatttccaaaatatacagatgcctctctatttacgatggggttatgtctcaccctcataatagtgctacctgtccctacccagaacctgagaaaacaagcttgaggaaggccaatctaagatgtaggaacatgagtgtcagtcgggggctttctgccatcaacaagaggatcttcacctgggtagcctgacagtggaaaaccaatctcttgcaccattttgagtgccctgggaagtttgaatgttattggtgcatagaaatgctactgatttttgtgcattgattttatatcctgaaactttactaaagtcatttgtcaccctagcagccttttgttggagtcttcagggtttttaggtatagaatcataacatcaatgaagggagataatttggcttcttc

SEQ ID NO: 469404 - DNA, 1219 bp, Homo sapiens
gcttagtatgttaggcggctatcagtcccagtgttggctgctgaggatctcaaaaggcttagatctcaaagggcttagagagctggcagctgcaactctggtgctggtcacccctccctccaagagctcagcaggcttaagcttagtggctgttgagaatctgcagggctccacagttgggaccctaggccccagttgcatggactcaccagtgggctcttccgatcttcagctacgacagaatcttatgcaatgcaaagtactcataagagtgacagcctgtcggcttttctatgttccattggttgcaagaaagtcacggtgtccaccttcactcaaggtgagggtgctgaacaaaggagtgaatcatcggagttatatcctagcaccttttatttcctcgtcaatcatataaattcattcattctttaattttgccaaaaaagttagcttttgttaaatttaagcagagaatctatagctatctcatattgcatttcatattttcaagtgcttaaatttttcatagctatcaccaaaaataaaaaaaagtgaataaaataatacgtatatttctaaaatgtacactgacatttcatattgaatatattatgatggtctatttaatgcttcatttttctcaaaacatgtttatattctagaattaaatgtcacacaatagctcttctggaagtcatttattgagtaacttctaaacaagctaagtttatctgaaattgaacatctctgaaatttaggtagaagaagcaggccagctttcaacatagtaaaaaagcaacataactttatctgttactaatatgtgggctttatttaccaaaatagcaattttcattgtattttatatctgcgtgtctgtgtgatgaagattaacgttagtatgtagattagaattagattttcagtttggtgtagaaaaaaaaacttaaagttttccaatgaaaatttacaaaggcattacaaagaaatcttcatagatgctcagcatatgcttttagaataaaaataaactaattgaataattgtgtctttaacactgggtaagtataatgtctcacttttaagtattttaattttaaaaactgcagttgaattcccaaatctctctattacgtgctgctacattgaccaagatagaagcatatgcatatattttcaaaatgcatcattcattatcaggttatatttacagcaattc

SEQ ID NO: 469405 - DNA, 804 bp, Homo sapiens
ggctttccacttggtggccatgttgtctgcttcttaccattacccttaagactcctgctgagatgttggatactatgaccaagctggcaaagatctggtggtattatgagggggagtttctctgcacaagctctctctctgtgcctgctgccatcgatgtaagatgtgacttgttcctccttgccttctgccatgattctgaagcctccacagccgtgtggaactgtgagtccaataaaacctttttactttgtaaattgctcaatctccgatatcagaagatgtgtggaaacaccaggatatccaggcagaagttcactgcagaggtggggctctcatacagaactttcactcgggcagtgtggaagggaaatgtggtgtcggagcccccacacagagtccctactgtggcaccaactagtagaactgtgagaagagggccactgtcctccagaccccaaaatggtagatccactgacagcttgcatcgtgtgctggaaaagctgcagacactcaacacaagcctgggaaaccagccaggagggaggctgtaccctgcaaagccaagaggcagagctgcccaagaccatgggaacccacctcttgcatcagtgcatatgcaaaagagtggatctcctgcaaatggaacagagaagtggccaaaggatatgaaaggaaataatttgtgacggagaaagtgattgacaaatctctaaataatttacttgagttaatacagttaatgcatatttattggtgacattggagagagctttcattgttgttgctgttattgttttgttc

SEQ ID NO: 469406 - DNA, 4739 bp, Homo sapiens
aagttcccacttctctctcactctctcctgccaccatgtaagatgtgccttgcttccccttcactttctgccgtgattctgctccagctccagccatggctaaaaggggccaagatacagctggggctattacttcagagagagaaagccacaagccatggaggtttccacacagtgttggtcctgtgggtacacagaagacaagaggtgaggtttgggaacctccacttagatttcagaggatgtatggaaacacttagatatccaggcagaagtctgctgcaggggcagagccatcatggagaaactacgagggcaatgcagagggaaaacgtgggatgggagcccccacacagagtccccactggagcactgagtagtggagctgtgagaagagggccacagtcctccagaccccagaatggtagatccactgacagcttgcatggtgtaccgggaaaagctgcaggcactcaaagccagcttgtgaaagcagctgtgggggctgtacccagtagagcaacaggggcagagctgcctaaagccttgggagcccaccctttgcatcagcatgccctgaatatgagacatggagtcataggagattactttggagcttaaagatttaatgactgccccgctgagttttggactttcaaggggcctgtatccccttcatcttggccagtttctcccatttggaaggagagcatttacccaactcctgtatttccattgtatcatggaagtaactaacttcatttttttttacagatggtgcctggttgctatgtcctttagagtggacaaacgctgtatcttcacatggtgaaagaagtgcaagggccaaaagaaactccctagttcccttaagcctttttataacagttctaagcccattcatgagagagcccttatgacttaatcatcccctaaaggccttatccttaatactgttacactgggccttaggtttcaatatatgaattttagggagacatatacattcatgctacagcatttccaaagtagattgttaaagaatatgaactaaacttaccagttaaatttttgcccaaaatttcagtcctgattcaaagataagtgccagttagagttactacagtgaggtatcatgacttagattaaatgttgccaccagacttacataaaacactgtgtaactgcaaatatttttaaagtaatgtatgtcctttaggaaataaaaaattcagtgatgatggactaatacaagtatttataacgtggtaacattttcatttaataaagctcacagcggatgtgtatttatttagttgataaacttcaaaatagaatgttaccataagttgcactgggattctagatcctgctttctctggctgtcagaagccaaattgtatacctctctgaatatcatatccactgatgactctttggtagcttaaaatcaactgcaggaacatatattgccatgatagttaggatgactagaaatcatggttctcccttttgctccccaaaaagatattggttaaacatttcccacttaccactgattacgaccatgatggagcatgaaatttggagatagacaccaaagctttgagtcctgccacttaggaggtgggtagcctttgcagatcaccaaaggcctgaaagtccccaggcctttactgggaaagagtcttatacactttactctctaggctgttttgtggatttggtaagtaggatatgtaacatagatttaacatgtggtctgccatgtagtaagtgttgaatatgattgaattattttactcttccattgttcctctcctctcatgtttactctggttattttatttagttgttttttctattatggtaattcaagggaacaatgtagacaaagtgaagaagtagagtgaatagaacactaattatctgacagttaatacctatacctagtaactgctgaaaatctcaccttatacatcaaccataacttactcctttgcagatactcatttttggaaggggaaagtaaacttcctttcttttagtttccatcagcaatttgtaactgctttatgtttacataattataaattattgtaactaagaatgagttgttcctatgcaattttaacttaagaaataattactactaaaggtttgcttattcactgtttatttgctgctatttagctaaggagagggctgtggtggtagccctagcaatgaagagggagccctgaatccaagaaatgtgatattagtagaaattgtagggcttgaaaaataattaagtattcagtaagaaatcactatatttgtcaaaaatatatattatgtagatgttacctgaattactatgtaaaggttattttgcaatataagtatacttatatactccaaaattacaaccacttttagtgaaaaaattactatatcaatttcctaaacactatattttaatttttaaaataatgaatattatacttttttggttccccctaacttcttggggagttagctgtaaacaaaataatgtttctaaatatatttcaataaagctagcaatatatacttttgaaatgatttattcatatatttcatctaaagtaccgaatttcagtacaaaagcccttaattcatacataatataaatatgaaatacctatgtccctcattattttacaagatacaaaaaaatttactaaactctggtagtgttttatagaaaagaattaatgtaactaatattcttttcccacactcctctgctctttatgttcctctacagaaccagcagctgagccacacaaaggacatgtttgacagataaagaacactgatgccaaggtctgaaataaattttttagcattaacatctgtgtctgtgcaaagctcttggctgctttcttcatttgatgcttggatgggtctgttagatctgttgactccactgctaaccatgctaatatctgtttagcaggctctggtgacctgcccacaaaatcagacattgattaaactattttaaaagtcctatcttttggaatttgtcatttttgttcctctgaatgacctatgtccacaagaatttgtcctcattttatgaaaagcacactaaggaaaaattatctatatttttcatgtagaagtaaagaaaagtacaaagcacgcatccctaagataatctcaaatcattctctgtatctttggatgattctttttcacagtgcctcaaaagtaaattaccacaagccaaatttatttcagtattaggaaattaactgatttataatttcttaattgaatgtcaggcaattacattttaaaggaatttattttcattattattagaagttcatacatattacttttggagatacaggacatatattccaggaatttgcaacaaactccaaacattgactaaatcaatttgatctgatcatattacagagatattttcatataccctgaaaaacccaaataattctcatttagcaaaaaacatttttaaatatgtttgcacagatacataaatatagaaaatgttcttccatgtttttgccagaatgtgctcaatttagtattttaataaaatgtgaataaatagttctttaaaaatgggtactttcaaaattttatgcaggtttttgagagttatataaacatttttatcaaaatttctcaacactgtgcaagatgaaaaatcaaaggtttatattaatggtccaattcaggagaaacaatttgctctaaaatatttaactgctattggattttgtatgcaagagaaaaaactcacttaatgtttctgttcaggcccagattttcttttgttctgtgaacttatgtatgttttaatttcttacatctaagtagtaaactgagttttattaattgtattaggttttcaaataataatcataagaacgtgaaacacaaaaacaagacacacacaaacacgggcttgtccagagcaattccccagtacaacgacctctccaaatttgttgttatttatcccatgagtggaacagacttgtaaaataattttataaaccttgaaggttgttatgattgaacattgttataagcacatagttgggtcttcccaacacacatctctaccataaaatttcatttagacaaatataaacagttgttatttttcaaatccaaatttaaaaatataacacagtgatgaaggggcatgttgtataccttaatctaatccctaaagactaattaggctttagctttagtgctattcaaattggtttttatgtgcttaagttatttgaaaatatcgtcttccaaagtgtagagaaatcacttggatgacattgcaaacttctgatgccaagctgggaaaatttcttccaaagacagcatctggttctttggcaaaatccattggtagtttttctgcacatctaggtctgttatatggctggctgcttttaaggaccagtttctagtttactaaaatgaaggactatataaatcactgaggaactctgtgatgctgatttaagtactagtttaaaaactaaggctccatatatgagacaagtataacactgacggctgtatgctgatatactatcatgaacatctgtttctgcaagtgcctgtgactgtctaaatgtgtaggatgaataatcatattatatgttctataaaaaatttgaaaatcattaatattgtttgaaaatatattcttcacacattcagag

SEQ ID NO: 469407 - DNA, 582 bp, Homo sapiens
attacaggcatgagccatcgcgtgccggcctatttcaactttactgtaaaactaaaaagatcaaaccagccacaacgttccctgaagccaaagcctaattcagagcacggcactcactctcttaaattctgtgaaggctgtgagagtcacccaagagctctgatgcagatgtacaaagacattaatgttttcatttctgtgaacacaatatctattctgtactccatggatcaaggagtaattttaaatttcatgtcttgtattttaagaaatacattttgtaaggctttagcttctatagataatgatttttctgatgggtctgagcaaactaaactggaaactttctggaaagaatttgccattttagatgctattataaacatttgtgatccgtgggaagagttcaaaatatcaacagtaacagaagtttagaagaagtacatcctaatcttcttggaaaattttgaggagtacaagacctcagtgaaagaagtaactgcagatgaggtggaaatagcaagataactagaattagaagtgaagcctgaagatgcgacagaattgctgtgatttcatgat

SEQ ID NO: 469408 - DNA, 1790 bp, Homo sapiens
gagcgaggacagcacagtcggctgccttggagacgcggggcaccgccctcgcctctctgctgcagctagcgggatgccagcggccactctggacggcccaccactaccatcacatgcacagaagtaatttatatggaattaatctatttacatcaaacctacgatgatgtgtttatagagaagactggggaagtaggtaacagcgagcaagtcatcctgtgaggaaggtcctggagcgagccctagagtggggactccccaggagggcccggagcagcggggacttctcactccacctcttcagtctctgattagcacacattcgggggagtgcttccacttggaaaagcttccaggaggcagctcttcagtagcgaccgaggcacacgtggtccatggacaattttatcctgtgaagcggatacggtttctcacaaaggttggccagcacgtacaaatgtctcaacgcatactcgcacgtgggggagtgccagttgaagcagtgggtctggaagtgcagcagggcctccaggtagcagctatgccccgtgaacggggctctctcagacaggagctgctccacctcagcctcggacgctgccagcaaggaggcgatcttgcgcactgacttctcaatgaggtgcctggcatccagatgccgctggatctcctctgtgagctgcctggagtcctccagatcgttggtgttcatcagtttccttttcacgatcatgaggggcacatcagggctgggggtgaggtcaaggtgtgtgactggaggcagggagataggagaactggctttgtgtttcatactctgaaactgcatcactttaatgtggagatcgtttcgtttccgtactgcatgatgtggctggtattggtgtatgattttaccaggcggcactgcttgtgcagggtctggttagtcagatcttccacgtccgagtcttccatccagttgacgctgtaccagtcccccaggatcatctatgggaacagcaccagtgcccagtgccacgctgaggaatacagctactttccaaagccttctgcactttggagttcaactgcagaaacctgtgataagcgatcgtgactagaatataatctattttggggagtcaatatgttgctgaaaagtgaaacagataaacttcaaaactttatttttatgattgaattgcattttaaaattatgcatcaaaattgttgaacatttggaaatagaaccaaatatgtttaaaaaacaagatattgtcacctactaggcagaattaatatttctgcaattgtcccccagtataatttatgttagttatttttatacttgagattataattcataaatttgtggctcatttatattcattaaattacatgaatgctatcatgtgatactgtaacttattacatatgcatacacaatatatttctaggtcaataaatttaacagaatataattttaataataatattaaattgcatgaatataacatgatatgcttaataagtttcttgatttcagattttcaattttcttacaatttcagcaacataaatgaggctgacagaccctacaatttacaaaactacctttgcctttcccttagacttgtacttcaaatacatatacaaggtcagagaacatttctagattccaaagtatgagtcttatcaatatatactcaaagagttttatcactttttatgtccacattaggcaccatattagagcataagtattgacaacatattatttaatgtttaacattctggaatgtggatgc

SEQ ID NO: 469409 - DNA, 5357 bp, Homo sapiens
cgtgggtgatgggctgatttgtgcagcaaacgaccatgatacatgtttacctatgcaacaaacctgcacatcatgcacacctatgtgtgtctttgcacatcagatgggtatactgaatacagcacactggttggggaagttctcctggataatatcctgaagagtgttttcaaacttggttctgttctccctgccactttcagagatgccttacctagagaggaggaatctagagaggcagtctggctacagtggatttgtcgagctgtggtgggcactgcccagtttgaacttcccagaggctttgtttacaatgtgagggaaaaagcacctaatcaagcttcagtaatggccgacacccctctcctcaccaagcttgagcttcccaggtcgacttcagactgctatgttgtgaaagtatcacaggacctccctttctaccccaaatcagatcctttctacaccaaatcagattctgttgtcggtgccaaaatagacggcacaggaaatctaccacaccacagaccatctgcaagaaacatctgacagagacttctggttttgggcttgaacaccaaccaatcagacttcacctgccccagccagtcaggtttcaactttattaaccaatcagaattcagctacacctacccctctgaactaagctagttttaatcctttatttcccaaaactgatcagattgagaacctgagcagaaactttttatataaaacctgaacccttcctttcttctctggaatgcaccttcattttacacagaaggctatgtctcccagtttgcaaactgttcactggaataaagtctctttcctccaaattccttttcagagaaccgttgtttcacaatatattgacttttacctcattgaaatacatatgagtagatctgaaataaaagatactaattaaattgtacgacaggatctcatgaagataaagagaaaacctacagagataatgctggatgggaaattattagccaggaataagaatttgagtgattgaataaatatagctttaaaagttaatgtttgttattcaatttggcatctgtgacataaagggaataaaagtttttcccataccactgtatctctgaagtatgtagttcaaatagcagtgacatctatctacctagagaaacaggcatgaacacctctgtccataacttctttccattctacaaattgagattgcgtatgagtatcctcacaagattcacaattagaattacctttagcaacaggaaaaagaaaaaaaaaaggataaatggttttaacagaaaggtttctgttagttttccatatcaaagacaaggtgatcaggagattagagggaactcaatacccatgatacatgcctcagaggactgaagttaaatgtagtctaacagtgtactgcttgtgtttgcataatggctctctatttccatcggtgccagaagacattcttttatattctgagaatatggatctagccgttattccctacaaagccaaactctgacgaaagtaacctagatcaaaatcagcctctaggggtaaaatgtggtataacataaatctatgacatttacacattttttgcgttgtgtgagtaaaaacatctcttcaaaagcagtataagataaccacgtttagagattaaatcaactatatttatacacatttatcttagagtcacacttccagcaaatgttactttctggaacacaagctcaaaaatagtttttggcctatattaactatcacaaggctacgcattttaaaacttagaattaattcacacattgattactttttgaaaatctaataccttcattgtctgtttatatccattaagtcaaattcttattatactgatttatctttaattctaggtcatgacatgagaagcagcaaaagaaatgaggaacgtagtagcggaatcactgacactagaaaagacagttgaaatcagaaaataaaatacagccataaataaagctttataaaaaaagccataaaacaattatgaaacaaaataaatatatttgaagattgtagaaatcacactggatttgttttgttttttgtattatcacttaacaagaaagaaaatactcgcttacattttatgtaatatattacatatgtatatatttaacataagtatatgtatatttatatgacatatatttgcatgtatgtacatactactctatttaaaaaagaaataatgtcaaaatacggagctacttaatgctgaattatttatcaatgccaaattctttctaaaatctctctttaactggcactatagaatgagctattattataaaaatataaaaaagtaaagtcaagtataaatatgacatgtatgtaaaatatttggtatttgtttaaaatatttggtatttgtttaactacctcatataattttctgtggtattctgttagattcagatgcagtacggtatgtaaatttactttagattgaaacccaaagcttttatttatgggtaggtaaatggttttggcttcttgtttttaaatatcaaacattaatataattattgacatttatatctaaatgacatctatatctgaaacatgaaagtaactgtatacaaggaattatataaaaaggacattgataaccagcttttctaatcttttaaggaccataataagaccagtgctttgccattttactaaatacatattcatgctattgtcaagaggacaaattatttatatgttttaaaaaactctttcacactgaggaaagagtagtttaaactgctgaatacatttatgatagttaaacttcatgatgtgaattaaataatggttttagctaagataattttaggaaaagaagcatacataacattatttatggatataaaattttctgttaattatatacccagagaaaagataatttactttaaactattttaatctttaattttagatttattcataatacactttcccagctctgaaattggaggattttgttttcacttaatgcattattattaacttcatttctctaagaattaacagtcagatggttctaatcaagcaaactctttccattaagaaatgtaaacacataccagattttatcatttgatttgtgtttgggttatttccagtttttgcactgtcttgtactaataaccctgttaacaggttcatagaaaaatcgtaataagcgttctgagcaaaattcaactgaattcactagtttactactgggcatgttatgaatacactctgtaatttaaaagtttataacattactttttaaaaccttaaataattgcattttcattagctttacatatttttcattgtttagtcattatcaatttcagatcacatggattaaaaattttaaaatactgtgcagaaaataaatatttatgtactctacattttacacttaatcttctcagtcttcatatatatgtgtaagcacacaaacacacacacacctttattagcatacatgtagttctaagaatttagaaatctaaaacaatactactgttccccaaaggcaaacagaacaaattattgaacgtttccgcactcaagttccaaatctagaatattggggtgctatatagacccaattagtcagactctttgcaacttctgattttgtcatctatgttccaataatatagtcaacaaacagcgttctttctaaatgcaagatatttaattcttagggagaaacgggtataatagcaataaaaatgcctatttcaaaatcagagaaaaggaagaatgttagcaattagagctgttcaccaagacatcgtgaactcccttcttgcattaaaaaaaaaaaagaattatacttcactgtcctcttaaatctaggcataatgatgtggacttctttaaacaatgtattataatttggaaccagatatatatttaatctgtaagtacttgggaaattttccagctgtcttctgttattgaatagtttttgaaaaactattatataaagtatataactataaattatatatttattaatacatatttgtaatacataaattattaatacataatatttattaatacataaatatcacacattattaacacaagatgtttattaatacataattattacataaatattatataatgttatataatatattaatatataatatattaattgtatattatatataatttatatataacatataaatgtgtattaataaatgcacataataatataaatattatgtattaataaatatgcttgatattaatatgctcaatattaattaatattaatatcgattaatatgctcaatattaatatgctcaatatttattaatacatattgagcatatttatgatttctgtcttaattcctgatgaaatctaatggatttgtccatttttactagcagttccattcatttttgcctcatctattttggtactatttgtttatgtgcatgtatattaagaattctatttcttcatggataattgactctttttcattatgtaaaatattgatttatccttgatcagtatgctatgtctgaaatttatatagtatcctcagttttcttttgcttagtgttatcaaggttgaataggaattgtgagagtgggcattcttgtcttgttccaggtcttaaagaaaaggctttcagcttttcctcatttagaatgatgttagctgtgggtttattattactatatgtgatctttattatgttcagcactttgaaaatattatttcattttcttggcctgtaaaatttctgctgaaatatccactgttagtctgataggatttctctcataagtgattagatacttttctcttgcttttgtaattctctttgtctttgattttttgcagtgccctagatagctatggaaagaaagaaatgcttaacaaggtacaagtccaacgtaaaagtggtatgagttgaacttcattaattgtgagagtggtgtatttacttatttgataactgctctagtttaatcaaggtacaagcagatttggtgttgcctgagagagcccacttcctggtttatacatgtcagtcttctctctatgtcctcatttgatataatgaccatcagagctaatgcatgctgtgtgaataaataatgcaattaacttagtacttttaatatattaataaaaatatagtattccggagagttaatactattcactgtgaaatatgattaaaccaacaattatataaaaaggttctttgatacgatattttgtttcattttttcttgttttattaaaatattacaaaattttaataagatttat

SEQ ID NO: 469410 - DNA, 803 bp, Homo sapiens
catcacaggaagacagaattggattggaatgctctacaatgtggttgcaatggaggcttcagcctgtcctctgagatttgcattaatcgttcagagttgttccagtaggaacagcagtgccagggctttgtatccctacatcagccaggcactgtggtgcctgatgatggagaaattcttattgaaaaaccacatcattccatttaattactccatatgcacagaaactgaaatcgagtgtgcccaccatacaagacagagcaataaggcaccatcttggaagcagagagcagccttcaccaagcaccaataccagtgccttaattttggattttctcacctacagaaagataaaaatcctggaattgctacagccatgaagacaaacattattgggaaactgtaccaaaaaaaagagaagtgatttcttggcccctctatttgggttgccagttcttttctgattccttttcagaaaaatgaatactgtgtcagtgtgaggtgcatatgaattgaaccctaaaacgaagagttattattaacattcaattgttaaaattttgcattatatttaattgggagattcgtaggtaattattgtcatatcttcagggtcattggatactttacttgaatgggttcaatctatttgtgaaggcaacaaaagaattcttcatacattttttaatttatagcattgccttttgattctttattaaaatttcagtctctcatttcatattacccatgtgctatggtttgaatgcctttcctttctgaaactcttttcaaacttaatttcc

SEQ ID NO: 469411 - DNA, 1567 bp, Homo sapiens
agcatgtacagataaaaaaagtcgggagggacagggggattacaatggggcctaaaggagttgtagggaatgatgaatatgttcattatcttcattgtgctgatggtatcatggagcgggttcctggttcttgtcccacaaccaagaggaataaggtgtgcagacaccagagactcaatcaattctatcagttctatctaaaaaacctaacaataataatcaatattgttaaaatggccacactgaccacagaaatctacagacttaatactattcctatcgaactaccaatgtcatttttcatggaatttgaaaaaaacccttctaaaattcatgtgcagcagatctggaattggtccgagctgcctcaccgtaataatacatatacatgcaaggccctgactgctggtaaaggtataaaacatactgattatcagggttgctttcaaatcatgggtcagaggcaagtttctggacaagttgctaccagtttgtcaaaactgtttattgataattgtaatattcgtgatttgcagcaggtcttgccaaaattggaaaggggctatgcctttagggttctcaaggggcatgcttctagctttcgcccattcagtatgatgttgactgttggtttgccatagatggctcatattatttttagaaatagatttttttttaattttcttaaaaagtcagtttagtggcagataatctgtatactgaatttctatataaataagttcacatcatctctactttctatttagtctgttgatctttttgtctattcatgtctctgaaatatattaatagaattctaaatttcttatatgtttttaaatccagtagattgagtctctcctcaatcatttttgggtttgtttttgtttttgtgtttacttttgaaacttatttttctatatgaaatttagagtcatcttgcactttcatttgaaataatgtttaaattatatactaacgtaggaacaatgtatatcttatgatgatggtgtcttcctattcaaatttatattatatttcaccattgattcaaatggtgataacgtcaacactttccaattttttaaatctccaattagttgattattacaattcaattgcttacttaaaaaaaaaaactaatgaatctttttaagtctccttcacattgccaaatacactattaaataaggacaaaaaaccaaacaccgcatgttctccctcataggtgggaattgaacaatgagaacacatcgacacaggaaggggaacatcacacaccggggcctgttgtggggtggggagagtggggagggatagcattaggagatacacctaatgttaaatgacaagttaagaggtgcagcactccaacatggcacatgtatacatatgtaaaaaacctgcactctgtgcacatgtactctaaaacttaaagtataataaaaataaataaataaatacattgtattctaagtgattaataatacaatattaatgagttactttcacaacatttttttcatctcctttctcataacatttttcacaacatttttctcatctc

SEQ ID NO: 469412 - DNA, 1813 bp, Homo sapiens
tgtaggtaattctgtatctttggcaccccaaagaattacctataattgctggagcagcactagagtaacgccgtatatggttccccggtgttctgaggttatgatcttcactgatcaggcaaaagacgagtgtggtaatttctgggtaatcaggttgttgccctggaaaggaggtgtaacttccaggtgttgccatggcaatggtaaaccgatgtggcacactggggctggcaagtccaaaatctgtagggtaggtcagcaagctggaaacgccttgagcatcccacagaatgttgccatgacctttgctgttgacggaagatgcttcctgatgtctgcaaatcagaagggctgctctaagacacatgtacaggaaccactgagtcaaaccattgctcttctacaacttggacatggggatacattttggatagcaaggcctcgttatcctctgccttcagatcattccaaattttcaagatatagtggaacacctctttccaaagacacatatgacattagctaggttccctaaactgtttttcaactctaacaaattttgttttttatgtcagtaatcagccacaatgtctaacttagctaatcgttggtattttattaaaacattaaaattataatgtgttaagttatactctgtacacaaattatgttagagaccatagaatacacaaaacttaaagtaatgagtacttggtgttctgttcaaagacctttaattactaaatgcagtgtattaactatagataagcaagaaattgtcattttcagttcagaacactccattcaatagtaaacatagatttataattattaaatttataaagtagtatgattcagactgtattaagtgtttgcagagtatggatttcaaagaggatgaagtcttaattctgtttaggccagaaagtatattctttacaacttttaaattgtgccttcagcaataaacatgtattctcctggaagagatgtgggaaaggtatatacaaggatgaaagaacagaatgtataaaagcatgcaggcatcaaatagtttatgtttagggagagacagaaacacagcctataaagagtacaggagaagaataataaacagtaagaagaaaagtatgttgaggttgattgggaaggaccttcccagtcaacttcatatgacatgttgaggagtctaatggctaattctatgcacaatggtgttccatgtgcatgttatacctgaacgtactgacaagatttatttacacaatttaagaattatttttggttattattgaatgtaaggagccagaagaaggaaataatcaaacatgtatccaagctttgcagctaagatcaattgagacagaatttaataactaatatttaaaaatgagtgtttacaaataaatcatgattctaatgtgtgtctttcccttgaggtgagaacagtctgggttactagcaatgaccaaaatgtattatataataagttataaattaataatataaatttttgtctgcctttctgagtataaacacttcatacaagctaactcaaagctttcattgctcaagggaaaattacagaaacagtagatgcggacattaaacaataggatcgtataaacacagaatacttgcaaagcatgttattatctgatgattttctaaaaacgtaaagatatctcaattcagtacagcataggctccagtcacagattttactgctattacagagaagatatcccttttaacttataacagttcggcatgctccgggtaataggagagagcctaggggaaatacactagt

SEQ ID NO: 469413 - DNA, 1484 bp, Homo sapiens
gaatattgtacatttcaaattgctaagataatggccgaataggaacagctccagtctacagcgcccagagtgagcgactcagaagacgggtgatttctgcatttccaaatgagttaccgggttcgtctcactggggcttgtcagacggtgggtgcaggacagtgggtgcagcccacggacccagagccgaagcagggcaaaacatcgcctcatctgggaagtgcaagggatcggagaattccctttcctagccaagggaagccatgacagacagcctttggaaaatcaggacactcttaccctaatactgcagttttccaatggtcttagcaaacagcacaccaggagattatatccctcgcctggctccgagggtcccatgccaacagagccttgctcactgctagcacagcagtctgagatcaaactgcaaggcaacagcgaggctgggggagggtcgcccaccattgctgaggcttgcagtcaggaagcttgaactgggcaaagcccaccacagctcaaggaggcctgcctgcctctgtagactccacctctgggggcagggcatagctgaacaaaaggcagcagaaacttctgcagacataaacatacctgtctgaaagctttgaagagagtagtggttctcccatcacggagtttgagatccgagaacagacagactgcctccttgagtgggtccctgacccccgagtagcctaactgggagccacctcccaataggggccgactgacacctcatactgctgggtgccctctgagacaaagcttccagaggaacgatcaagcagcaacatttgccattctgcaatatttttggtactgtagcctccgctggtgatacctaggcaaacagggtctggagtggacctccagcaaactccaacagacctgcagctgggggtcctgactgttagaaggaaaactaacaaacagaaaggacatccacaccaaaaccccatctgtacaccaccatcatcacagaccaaaggtagataaaaccacaaagatggggagaaacaagagcagaaaagctgaaaattttaaaaatcagagtgcctcttctcctccaaaggaagatagctctttgccagcaacagaacaaagctggatggagaatgactttgacgagttgagagaagaaggcttcagaagatcagtaaacacaaacatctccaagctaaaagacgatgttcagacccttcacaaacaagctaaacaccttgaaaaaagagtggaagaagggctaactagaataaacagcatagagaagaccttaaatgacctgatggagctgaaaaccatagaacaagaactacgtgatgcatgcacaagcttcagtagctggttcgatcaactggaagaaagggtatccatgattgaagatcaaacgaatgaaatgaagcaagaagagaaggttagagaaaaaaagagtaaaaataaatgaacaaagcctccaagaaata

SEQ ID NO: 469414 - DNA, 620 bp, Homo sapiens
ccggatgtctttacttgcatacatgaggcccttccacgtgggggctgtgggcatggacatttttatcttggtccttcttgaaaaaccatataatccctatgtggaccccccccctgtgataagtgagataaacctggagtgtcataggttgttgaagacaatcacttcatcagccatctcctgtcaactggcaattcattttgacttaaatgccaatcaccaggagtcttctgccactgaacacctcaataatctccctccagagctggaacatacactgtggtggacatggagatgtgccacccatcacccccttcaaggacttgtcccagcttctggaggtgtagttgctgggcaaccttctgctgtcaccccttttggggacagccctcatgcaatgactaatcaaggtggagggagaaagccctggccattggcacacaggacgaccctcatggaccattttagctccaggaatggtgcaaatggacttgcttaaatagcaactgcttcaaactgtctgaaacccactgaaatctacccgttagaatacttggtacacctaatttgccaagagaaccggttgatgatagaaggtatcctttgatactgtatttttc

SEQ ID NO: 469415 - DNA, 591 bp, Homo sapiens
actacccattttagcttacaggatggtaagcccccaaatcaaaaccctttcatttactctatggatttccacttgctcagaggtagtagaaaatgaaaaccttttaacagtttctgagcatgcaagaacacaatcaaagggatggtcaaatacgggcacattaggtaaaatggatgagagaaccctggcaactagtacaagggctgtccctaatgaagtggccgtagaagaacaggtctctcaaactggcatcctagcagcagtgagatcaccagagaaaacctcccagaatcttgagtcatcagctctgggggtaccaggtcctccttgcaaaagatttaaaacaaactggttctcaaagtgtggtgctcaaaccagcagcatcagaaccacgttagaaatgcaagatgcatgtcccatcctggatctacagactacagagcccctgggattggggctccacagcctctgtgtgattctggttcacactgaagtcaaactactgatttagaggaatatttccccataaggtgctagaagtaaatctgttcctcgtttggaccttttctaatggcttctcttgttagggag

SEQ ID NO: 469416 - DNA, 703 bp, Homo sapiens
ctcctcgtgttcagggaaccgtgaacagctgggtactgacagggtgaggatgggggatgatgcttggaaagtgatgcttaacggaatgccagcaattgaaaatgccattactagaggactaacactgaagctgccagcattggcccccttaaatcacagagtgaaagcccccatcttcatagcatcctggaaggaccgagttcatagcagcccggaaggagcaagctccctcactgtgcatctgacatcggctcctaaagctctcccttcattctgctccagacatgagggcctccttgtttgttccctaacatgtctggctagcttccacctaggactttcgcatttgccattcttcagcccagatacacacaaggccaattccatcacctccttcaagtctttactcaaatctcattttctccatgaagcttactctgaccactcttcttaccattgcaacccacctctccctgcagagttgcaccacaagctcctttattccacccccaaccccagtgtgtaccacgctctaaggtatctattagtttcctggggttgacaggacaaagtatcagaaagaggcggctttaaacaacggaaattaattcatgattttggaggaaggaggctgccattgaggattctggaattgcaaaaggtcctgattagaaagatggattaaaaacttaaatgtaaaacc

SEQ ID NO: 469417 - DNA, 699 bp, Homo sapiens
agctggatctcactcccaagctctagacatgatagttccacggtccctgcatcttgctttgtgcgtccacctctgctttgtgtcttggtcaataatcctccattcactgcctttcatccggaaatgtttttcagtttcctcatccacttatgaacctcttcaatttctcttcgttacatattatcaaactttcttaacaaaaattatttacgttgattttatggatccagggggtagcagtagaaatacatgtggaaagcaaaagatttcctgccccttcccatcagacatgcactcacttctaattgggcaaaactgtgtcacatggccacccttatcttcatgggcctggggaagccgaatactacttgacttaacggaatctatcatcctgaacaaaattggagtttgcaaagaaggaaagggaatggatattggagggcatttaatttcaaaagggatatgtcctttaggattgattttgctgcagagtgatgaagatgctgcatgtgggaagcagggggctggagccacagggcacctagaaagagctgccaaatgttactttggctttttactccttgggtctcccaggagtgaagaccctatgacatggatcccttaatagaccatagcatcacgtgaccaaattatccagtcattttaggattattctatcactttcatttcattgggggt

SEQ ID NO: 469418 - DNA, 636 bp, Homo sapiens
cagcggcaaccagagagaaaccagggttatctgcaaagtcacgtaacgtatcgaaaggtgctgagctggatgaatcctgtgtccctcttggagcttgtggggaatcttgtgaaacagtctaagtgcgagctctccttccctcacctgtgttctcgtgcatctgtgctggttccctgtacagctgctgagctccctgccaagctacctgggaatggacccctgttcattttaggcgggatggctgctccgcaagccccatctgtccaaggctcacgacaggaccaaatgagaggcaagcatcagataccatacagtaaattggccagtggggctcagcagtggccttcagatccacctttgccactgactcaccagaatgtcatagaagcaccatccaaaaagctgtggtcctggggatcttaccaagatgaacaaggtcatgatcgggttttaagcaccttgagaaacacttgcttgggtgaatttcatctggaggtaaagatcaggaagggctcctattctataattcaactgaaatgaaagtaaggtattgagaccatcctttatgcgaaatgagcatgagggtagaaatattaaggtacaagataatcatttctctttaaagttcaaggatag

SEQ ID NO: 469419 - DNA, 966 bp, Homo sapiens
ctctcgggcctgcaacaggctccttcccttctcagcaggggtcttgtgatggcatgggccgctgtccacagaagagtgctctgaaccagcacatcctgctccaggcatcatccctcaacatcattccttctccttcccaattgccggaaatccatcggcctttctgctccattgatgctccttttccccctcctctcaagctcacttactcaattttgttcttctttgttgtcatccgaatggcattttggtggacaggagagaacatccaagttcccatggctctcacccctgacctgaacatgcaggaagtccacttccttgaggatcacctctctccaaatatttctgctaactcgcgagaggtttaccttgatcttctcacagaatgcaaattgacattatatccacatttctatggtatttattaccatggtcatgatgtgagggctttttcaatatgaatagtgtaaaaggggaaacatattactgcaaagagacattattgtgcagggaatgtataaacagaagagaagaaaggagcgacatgctcataatagaaactgaaagctcctcattttgtcctgattgtctacccttcctttttaaacaaccttccttttttctagctatcaatacaaagttctttttggtaaaatgaagtgcattcatgctgcctgaaagaagcttttaaagttgatctgtgcccacacaaaagaggcagcactgggtccaaccagtggaggaagcaaagttggtcaatgttcattactcatggctcgacatgccggcccccatatcattttgtaaagaatcagataaactttcctcatgataaacaactgaaataatttttcttagctgtcagctccctttctccttttcccagcctgttctcatactcttccccactcgtaaaagcaaccgagcgcagctctttggtctgataaatgggctcctttcaac

SEQ ID NO: 469420 - DNA, 749 bp, Homo sapiens
gaaggcgaataagatcatgacaaatacaaggacagaaagcagaaaaagagaaagaaaggagagaagcaggatccaggggaagaaaaagagagaaaacggaggagactctttagccaaacaagaagaagtagaacagacaccccttcaagaagctttgaatcaactgatgagacaattgcagagaaaagacccaagtgctttcttttcatttcctgtgactgattttattgctcctggctactccatgatcattaaacacccaagggattttagcactatgaaagaaaaggtcaagaacaatgactaccagtcgatagaactaaaggataacttcaaactaatgtgcactaatgccatgatttacaacaaaccagagaccatttattatacagctgcaaagaagctgttgcactgggggatgactattcttagccaggaaagaattcagagcctgaagcagagcatagacttcatggctgacttgcagaaaactcgaaagcagaaagatagaacagactggggaggatggaggcagagtggggaggacgaaggctgctggcccagggagagaggactctggagatgccgaagcacaagccttccagagtcccggcaaagaaaattaaaatatagacaaagatatgcttgaagataagtttaaaagcaataattcagagagagagagcaggagcagcttgaccaagttatgaaggaatctggaggaaagctgaccagacagcctgtgaacc

SEQ ID NO: 469421 - DNA, 675 bp, Homo sapiens
agctatgtctgttagacagctaacattgctacctcctaaatgttactacaacctgaggtctgagcactctgcccaaggtaatgttagtgatggtgaatctatgcgggtctgcagcaacctcaattcttgcctcctcagaagaaagaattcgactgaagggcataaggcagaaaagcaataaaaaaggctctacatcttcttcaacatggcagcacaggagagcaggaagctgttacactgggttggtctttagcaggcatgtttgggaggtcccctttgaagagcagcttcttggaggcatcacaggccctggctgctcccagaacattactctgtccaatgtcaatgttaaatcatcaggtccaggccttttggtacatggcatccttgaggatcctttcttccacttgatcaaattggctactgaaacttgtgcatgcgtcacgaagttctcgtgccatggttttcagcttcatcaggtcatttacggtcttctctacactgtttattctagctagccattcatctaaccttttttcaaggtttttagctttcttgtgatgggttagaacatgctcctttagcttggagaagtttgttattaccgaccttctgaagctgacttctgtcaactcgtcaaactcattctctgtctagttttgttcccttgctggc

SEQ ID NO: 469422 - DNA, 666 bp, Homo sapiens
agtgcagggccaggcatacagaagctaaatgtgtgtctggaattggttccttctggtgggttcttggtctcactgccttcaaaaatgaagccgcagaccttcacggtgagtgttacagctcttaaagatggtgtgtctggagtttcttccttctggtgggtttgtggtctcgctgacttcaagaatgaagctgcagacctctgcagccagtgttacagctcttacaggtggtttggacccaaagagacgtccagcacttgtgtgggcacagcaaggagcactgaggcctgcagctttcctctctctcctctgctccaggtgtattcacagcccactagacactatttccagagcctgcagaagccgaatatccatggtgctctgaagtcctggtatctaggagcatgttgcagcctgctgttgtgcatttcccatggtgaacatgcagaatcaaaattttctcagtggagaggatttttcagtactctggcaagatctttcaccccttcctggctgtccattgaaatagaggtcatatgggctactgattatgaaggtagtaatttttcaaacaagtaataatataatgggtcagaccagtggtttgccagtgtagaaatttgaggcattgtttaatggaagtaataaaaatgtgctaagtaccta

SEQ ID NO: 469423 - DNA, 1990 bp, Homo sapiens
acctaaaggggcacgccaaagccgtgggtcacagaagagaaccgtggaacccagtaactagtgttcagctcgattaggatgaacccgggcacttagccgtgcaggcacaacggcaagcctttagcccgatcgggagcggcaatgggcgcctcgctggatcaggagcacaatggacaccctgccggatccggagggatggaagtcagcagtgggtctgcgactgcggcaaacagcagtggtggacggccagcaaaagctcagctccagcccattttgggcaaagccattcaacaagtctccaggaagttccaaactttcccacactttcctgtcttcttctaagccctccaaactgttgcaacctctgcctataacccagttccaaagatgtttccacattttcaggtatcttttcagcagcacctcactctacaggtaccaattttctgtattagtctgttttcacactgctgataaagacatacctgagactggtcaatttacaaaagaaaaaggtttagtgaacttacagttccacatagctggggaaggcctcacaatcatggtggaaggcaaggaggagcaagtcacatcttgcgtggatggcagcaggcaaagagagcttgtgcaaggaaactcccattgttaaaatcatcagatctggaatagttcctcaccaaacactgaatctgctagtgccttgattttggacttcccagcctcgagaactgttaagaaataaatttctattcttataaaggtacttgttatagtagcccagatggactaagacaattattcttccaataatagcaatgaatatttatgtgacatacaattttgtgggctatactctttaataattggaaaaaaaaaatatatatatatatatgataaataaaggccccatgcataccatcagttatgggaaaatgtatagttaactggctcgtatttaagtaaaaaatgcatgattttggactcattctggctgctgctgctgtgaattataatgatggtaatagtttcagcagttcctaattgtgtggctttgcacaagttacttaatctttctgacctaatatcttcctttgtaaagtggaaataactattgtaaattgtagactatcatatatgcaataaccattatataaaacatataaattatgtttctaaaatcgtgctcaatgattggtagatgtcatttctttagactaacaatggattccctgttctctgctttcttggattcatggaattctcaacaaaaatttttcagacaccatttctgaatctggcaactctaaacctgaactccgcatatcagaattgcctaccttcagtgttatatcccacaggaagattacatcatttgaagtgatactgcagaaggtacctcattatttatgcatattatgaattattcttggataattgctacacatgtatttaaagtggaagtattttcaaaattatatttctacatcaaaacaagacataaactctataatattcattaagtaaaaatggtgataggaatatttattactgagaaaattcttatggcataatttatggtgctttatttattaaagaacctgaatttctaattgattttccctaaagcatgggtgtaatgtaaataactgtattacatgtttatatgtttgttcatatgttacttgtaatatttataagttaactgttggcatcaagactatttttattgtaagctcttaaaggtcaagtggtcttgtttaatttcatacatactactctagttgaatatcattgtattagttatctggctgtattagtttactagggctgcataccaaaatacaagccactgggtggcttaaacagcagaaatgtattttatgacagttctggaagtccaacctgagggtgttggtaggtttggcctctcctgagacttctcttcttggctttcaggtgtcaccttttttctgtgtcctcacgtggcttc

SEQ ID NO: 469424 - DNA, 569 bp, Homo sapiens
cagcacccccaccccaaccatatggggaataatagcaccccgtctcctcccatggcctttaagaaattggcttattggattaagaaggctggcaagtccaaaatcttcagggtgggttgcaggctagaaacccagagaagagctggtgttgtattacaagtccaaaggccatctgctgcagaattccctcttgctcaggggagggaatcaggaagcttgtctaagtcgtctgaccttggagtaaatattcaccaggtgaacattagaggaagccaagcacaatctcgtgaaagcttagacgttggaaagaaaggaagattcagagtctccaaagcactaaatgagtttggtgatttgcagcctgtggaaggcgagcgtgttgtggaaggtcaagtggagaacatgtttcaagatggacactatgatcaactatgacaaatgttccttagaaaaaaaatccccatcttatttaaaccactgttattttggtctttctcacagagttgtactgatgaccattttaataaactcttttataattcactcgtcctgaaataaaactttcttat

SEQ ID NO: 469425 - DNA, 822 bp, Homo sapiens
tcccctttgatattgggcgtaatagcatcgtcccccaacatggatattgggaataatgtcacaggggggatgtacaccttcttcgatattgggagtaataccatcctctctccccgggattgtaggcgaaatatcgaagaggttttacaacgccatagtacaggaagtcctagccagagcaatcaggcaagagaaagaaataaaaaccatccaaatagaagagacaaagtcaaactatctctcttcaaaaacaataagattttataccacagtctatgcccaaaagctcctggatctgttagacaacttcaacaaagtttcaggatacaaaatcaatgtataaaaatcagtaacattttatacagtaacaacatccaagctgacagccaaatcaagaatccaatcccattcagaataactacacaaataattaaaatacttaggaatacagctaactagggaggttagctgtatctccataagcagaacttttaaaagggccattatttttaaaaacccctcttcccttcaaaacaattgttcattaacatttttttaaaaagtatatgagtttctatgtttaaaaaaattatattgaaaatttttctctattatcaaaattatttttcagtctgcatagttttccattgtatgaaccaatccttatttggggatttccctgttgttggctgttaattgtcttttcagattttatctgctatatagaaaactgtattagtccattttcatactgctataaagaactgcttgagaggggtaatttataaaggaaacaggtttaattgactcacagttcagcat

SEQ ID NO: 469426 - DNA, 700 bp, Homo sapiens
ctccggtcttgaggagaaccgaaatttcatggctcagatggctccgggtatagcttgggctgccgctttgaggaatgcaagccatagcttggtggcttcccagtggtggtacttcacaagccttcttgtgcttagtaatactaaccagcatttcagcattgcacttgggggccattgtaaagtggaaatcaaaatcaccaatgaaaagcataaagatgaaaaaatgtggcactaaattgaccctgaaaaggaaatttggctacagcatgagcactgaaataagaatggaagaagagatcttaagattgctcattacaccaggacctgggaacgtaagaggtttggaattcaagaaaggttctttgagtaagaagcctgagggaaaatgtggaatgcagatcgagcaaactaacacaggaacagacaaccaaacaccgcatgttctcactcataagtgggagttgaacaatgagaacacaggacacagtgaggggaacatcacacacgggcttgttgggggattgttgtcatataattttgaatcagaaaaaggttcttagttttctttaaaaccattccactccgccatgctgcccttaattatgttatttaattataagtcagattagcaacatattatacttcagtggcttttgatttagagtagttacaagatatctaccgtttctcatgcttggtg

SEQ ID NO: 469427 - DNA, 879 bp, Homo sapiens
tctcctctgagctgttagcctgcgggaactggaaaataatgaggaaccaaggcactctctccctggggctacctggtctttgctctgtttctcgctgcatgccggctttgttcttgtcatcagcggtcactttacctgcagttcttcttctgctagagtccccgcagttccagagttcacgttacttcaattcaagagaagagctcaaagaggaagagaacctctcagctgcaattccaaaatcccgctccgtagcatacaaagtggaggatgctcaagaactctttatctgtgtctacacgctgtccctaaggggccactggaggctcctgtgtgaaattggtgaaggggtggtctgctttgggcagcttcaatcctctaccccagccagaggcccagggatgatccgttttcatgctgctaataaagacatacctgaaactgggaagaaaaagaggttaatggacttacagttccagaggactggggaggcctcacaatcatggtggaaggtaaggaggagcaaatcacatcttacatggatggcagcaggcaaagagagagtttgtgcagggaaattcccatttttaaaaccatcagatcccgtgagacctattcactatcacaagaacagcacgagaaagacttgcccccatgatttaattacctcccaccaggttccttccaagaacatgggaattgtgggttacaattcaagatgagatttgggtagggacacagccaaaccatatcacttaacaattcggttcttgtcactaaaataacatgcattgacatgtattgtaattatatattttcatggttaacatccactagacaatgtggaccattgagaggaaagaattatattttaatttt

SEQ ID NO: 469428 - DNA, 698 bp, Homo sapiens
agactgcctggcttctaatagatgattcagtattacctagctttatggcaatggtcaggttacttcgtgtttccaagcctcaattcgtttccagcaagttcctcatctccacctgagaccacctcagcctggactgcattgtccatatcactatcagcattttggtcaaagctattcaaccagtctctaagaagttccaatctttcccgcatcttcctgccttctgagcactccaagtctctaggaagttccaaattttcccacattttcctgtcttttgagccctccaaactgttccaaacgcagcctgttacccagttccaaagtcgtttccacattttcagaaatctgaagtggggtctgaagaattgcatttctaaaaagtttttatatgatgctgatgtggctggttcagagaccacactcagaaaaacactaatgaaagaaaatatcaactgacaaaacaggaaacttttagaaaaaaagttcaacaactaaaaaataaaaaagttcagtgctatgtttaatagtacacaaagttggagaaaacaaaaaatatgtgaataatatctaaaatagtttcggcataaggcctttagtccttaagcttccctcgacaaaccaatcaactgtaattagtaagtgattatttaacaatagtatattttctcttggtcatacatctaaacatcaccttt

SEQ ID NO: 469429 - DNA, 635 bp, Homo sapiens
caggtcttcacaggccagaaacaacagggcctagactcagaggcccagatcggcaggaaattgatctctggcgtctgtcacagaagtatgaagctctgcaaggtagagtgtagtattacggtgcaggtgcattgcggagatgacgggctgatggcaagcaaggtgaggaagccctgttctctttcacagctgaagacagagacattgcagcgacaaggacaactggcatgcctcacattcctcagtgttgaaaacaataaaaggagggggaatgagagaaaaatcaaatttctacgaagagatgtcagcagtaaatttaatgcaggtgcaatattctccaaacaaaggacgttttgtttctaccgtctgggctctgtgaaaacctgctccacctcctccttgctatgtgttttcctttttatctgtgtaagctgccacaaacagagtgaatgcagagccatcaagaggtatgactttctgaatggccccataaaatctggatctgcccatgaaacctggatcagcccagagattatggagagatagatatttggaagataattttttatgactcaaaggttataacatgggaaataagtatttaataataagtacctatccagtgcagcttcctt

SEQ ID NO: 469430 - DNA, 1436 bp, Homo sapiens
tgatcgggctcgagcaggtcctgaaggtgcaacctgcaccgatggcctcatggggagttccctatgatcagttgacagaggaggagaagactaggacctggttcacagatgtgcccaattcgccagtagcagagaccaacactgggaccttgatatggcaccattcctcgggtgatcagccagctacctggtggcaagtggattatattggacctcttgcatcatggaaaaggcaaagatttgtcctcactagaatagacacctactccagatataggtctgcctatcctgcactctatgcttttgccaagactaccatccatggactcacagcatgccttatccgccaccatggtattccacatagcattgcttctgaccaaggaactcacttcatagccaaaacagtattgccatgccctgtgattaaggtcaatgggaaactacaacagcccaatccaggcaggactacaaatggcccagacccttcaaaaatgaaggtttgggtcactccaccaggaaaaaaaccaagacctgctgaggtgcttgctgaaagcaaagggaatccagaatgggtagtggaagaaggaacacatgcagtcttgaaggtgtgctcctaccccagtgctcaattaagatgtaggggtggaggattattagaccagagggaatttccaagatcagcgagtcttctgggagagcagcagaaggataaaaacgcaaatatcgaagcacccacaataaccccaaacccctgttgttgggctgaggccctctgttcctttctggctgttgaccagaggctgtcctcaattccttgccaggtgggcctctcccagatggcaacttgtttatcaaagcatgaaaaccaagaaggtgataaagaaagtctgctagcaagacataagtcacaatcttttgtaatctatttatgaaagtgacatcccatcatcttgaccacaatctattgattagaaacaagtacagctcaccctcaacaagaggagataatatccaggtgtgaattgcacaaggtgagtacaacaagggaccatgttagaggttgtctaccacagtaatcattagagaaatttagaaaatgaagaaaaattgaaagtaggctttcaatgtgatagtcagttgctcacatttatcttgcttctattctttccagtcttggcttctatgactaagttaaacagacaagcaaacaggacttagttatgctctataaagtaaatcttatattttttaaaaagttaccataatgctgtagtgatatttccatataattacagtgctttctctttagaaacataattttaatagttgcattaaggtatatcgggtggtttattattattaaatactcttttgtggctagcatattctaattatttttctgttataaatgaagacactgagcacctttgtag

SEQ ID NO: 469431 - DNA, 994 bp, Homo sapiens
aatcaagttgacactcaaccattggaaaagcatagtatctgggctggatagcaccatctcttatggcacagaccctcatggcttccctgaggggagggagttccctgaccccttgagcttcctgagtgaggcgacaccccaccctgcttctgctcaccctccatgggctgcacccactgtctaaccagtcccaatgagatgatccaggattccattcaggatacttcattatatgtagagttgaccctggaacaacataaagaacacattttcaatgggacgtcagatgagtgggtaacagggcattggggctaccacggagttccaatgtgccttatggagctagaccctgaaggtggtagaaaggggagtaacagagatctctcatgtgcctttgaggatacctgggccacctggcaagaagccaggtattactattggatggaaaatgtcctgaggctagaaacagccagtccaacatctaagtctaaggaaaaacaagaaattttcaagcaagcaggaacattcaaaccagttcaatgtatacagatacaaatatatgattgttctgtcttcagatgcaaattgagtacaaaaagaaaacccagcctggacttcattaggtagtgccaaattgttttccaaagtggttgtaccaacttaggcttctatcagcaatgcattaatgccttatcagacatatgattcacagatattttctcccattccataggttgcctttccatgttgctgattatgctctttgatgcacagaaaatcttaatgttggtatcatccagtttatctattttttctttggttgcttatgcttttggtaccatatccaagaaatcattgccaaagccaatgttataaagtgtgttttacttttaatgaatgtttttctatttcaagagacctagatagaaaatagtttctactggcaaataatggaagataaaggtggagtcaagacaggttaggactactgtgt

SEQ ID NO: 469432 - DNA, 564 bp, Homo sapiens
cacctggagctgcctgccccactgtaccagccagcagactgtgcacagtggccagaccccatgctctctccctcacacacccctcactgctccatgcctggcttgcccttggcaggccctgccaggccaagtgggcagaacaagctaagcaggcccgagcaaaagtcaagcaaaggcaccactggccacagagatttccagccagaaaagcaacaccccaaagatcccataaccatagcaaaggtggcagcccactcacctgggctgatggctcagtgtgactgggatttgggtgtgatgggggatgaaccaatttggggggaattagttggcagtgccaggctacgatatttgggagcttacgaacaagtgggccatgacagtgtctctcacagctacgcttggaataaaagcaaagatcctgcacttcactatactaatgccaacgtggggagaactggtttctttacaacccagagagcccaatggaaagtggtattctttgtctccgcaaaactaaaataacaagtgtttcttgcagggtacatgtgcacaatgtgcagg

SEQ ID NO: 469433 - DNA, 694 bp, Homo sapiens
gtcacttccaccacattctcttgggttatggcttctctctaccgcataatgttcggggcttcagtttgggagacttgcatggctagaatgtctcaaacaggcaggtccagaccgtttgctcttttgtgctcccagcacctaaatgttggctcttttgaagcctctgatgtcccgcatgtgaatgtcttctctgtgtgctggcatgacatcttaatccacagacatcttctgttctaccatgtcctcctagaaacccagggcagtaaccaggtcacatctgttgagaacgccctgcatcctcttgacctccaccttgctgggggcccagacaagggtcatgggaaaagtcaaggtctctgtgtgttccctgcagagtctggagaaggagcatggtgctcgtcatcccaagcctgggttggcagtgccacagcatgtttcctgggggcaaacgtatcattcacaactgatccagccactctttgtcttttgattggacagtttagtccatttatattcaatgttattattgataagtagaatgtcatagagtacttagtcttttcagactggcttctttcacttagcaacatgcttgtgaggttcctccatttcttttcatggctttggaaattatttctttttctccttgaataatatcctgtattatagatgtaccatggtatttttatgcatt

SEQ ID NO: 469434 - DNA, 857 bp, Homo sapiens
ttatctggatgtgtccatcaagtgtcatggctttaaagaccatacatctgatgactatgacatctgtgtcctcagacctgatgtgacttcatcaccgtgtgaacatgagagtatacttacacaaacccagatggcatagcctactacacacctgggctatgtggtatggcctattgctcctaggctacacacctatacaacgtgttactctaccaaatactatatgcaagtggaacacaatggtaggcatttgtgtatctaaacacagaagagagggacggtttgatggcattgctccaggggaagattacttccccactccattcccctttcagctccccttcctgctgagtaccactttcatcagcaataaaacccccacatttaccatctccaatttgttcacatgctgccacggggccacatggagttttactcctgccagcacccaaaagcactcacctcggctcctgcacccactcgcatgtgctcctgctcctgcgaggggtggaatgaagcaggaccaagtgaatggagtccatccctgctggcaccaacacacctgtgcactctagttcccacctgcgaaggggtcaggtaaaatttcctgcttcagaaggaatacactctaaaataaccataaaaatatagtatattagtttgcaaatattttctctcattcttttgctactctgtaccttttaagtgagggcatttatactgttgacattaaaggttaatattggtttctgaggttttgatcctatggcgaagctgatagctggttgctttgtcatttctattgcatggttattttatgcggtctgtgagctatgtaacttgtgtgtttttgtgtt

SEQ ID NO: 469435 - DNA, 834 bp, Homo sapiens
aactgcccggatgtacaggatcctggaaagctgctctctggcccagtgttctggacccttcaaatggcaattgatcctctgtgggtttatctgcagggctttccaatgtcccagagctccagatgccagccctgccgtctgctagctgcaccaccttgggcaagtgacttgagctctctaggccttagctttctcatagactctggaaaggaggaggtgagagcagccatggctgacacctccatgttgggtcccctgagagccatggccatcttgggtttgacgcttgcacgtcagcctaaaggatgcatgatcctggcagctgctcaagccactttctttgttcttccacaaaaagcaactcctcatcctttaaagtttgatcataagattgcaattcatcttatgggtctaattgtagttcttttgctatttctaccacatcttcagttacttcctccactgaggttctgaacccctccaagtaatccatgagggttagaatcaacttcttccaaattcctgttaatgttgatattttgacccgtttttgtgaatcacaaatgtcctttatggcatgtaggatggtgaatccttttccgaaggttttcaatatactttactcagatccacaagaggaatcactatggcagctatggccttacaaaatttatttcttaaataataaaacttgcaagtcaaaattacttcttgatccatgggctatagaatggatgttatgttggcaggcaagaaaactacattagtctccttgtacatctccatcagagcccttgcatgaccaggcgcattgtcaatgagaagcaatatttc

SEQ ID NO: 469436 - DNA, 554 bp, Homo sapiens
ccgccattggatagcaatggccaccttgcacccaggtgaagaaggggaatcagacgaatcagtagacagcacaaggtcaggcccctctgtcgcaggtctgctggagtttgctggaggtccactccagaccctgtttgcctgggtatcaccagtggaggctgcagaacagcaaagattgttgcctgttccttcctctggaagatttgtcccagaggggcacccgccagatgccagttctggagatgctgccccatggcccatatttggagctgatgtgctgaaggatagagaggaagagaaagctgtagttcctcaccagagccaagcagcccctctgagagggggcctcatggggactagaatccctgcaaatttgacctcctgctccatggcacctgcttttcctcaggctccagcagaggaaaagtcacgtgggtcaggccctgcagcaggcggctcaggggaaagcttgagtggaaacaggctggcttgtgctcctgttctcgcttgatttgcttcttttcttctttgtccatctctgacttgcagccttt

SEQ ID NO: 469437 - DNA, 908 bp, Homo sapiens
atgcgaagccacctcttgcatcagcatgacctggatactatccttatgttgccaaaggaatgtcgtaaaaatggaagaatgcagcctgaatttaggctacatgaactgttgcagatttcatgtagatctcttggaacattttaaactgccatataagaagtgtaaataccctgagaaagcctattccatgaggaagccaaaatttgtcatacagaaagaacatgtaaagggaaagagagattttgtccaacctccattgtctcagtcattcctagcacaaatagatcaaaccagttataacactcccttaaaccaatgcttaatccagaacaaggccctaagtctctacaattctatgaaggcagagagagatgaggaagcttcagaagaaaaatcggaagctagcagaggttggttcatgaggttgaagaaactcatctatctcgatcacataaaagtgcaaggagaagcagaaagtactaatataaaagctgcatcaagttatacagaagatctagctaaggtaaatgatgaaggtggctacattaaacaacagattttcagtgtagacaaaacagccttctactggaagaaggtgccatttaggaattttataactaaagagaagtcaatgtctgggttcaaagcttcaaaggacaggctgactctctttttagtggttaatgccggtggtgacttttaagttgaagcaaatactcatttaccatttcaaaaattgtaggtcctttaagaattatactaaatctactattcctatgctctctacacagattaacaaagcctgcatgacagcatatctgtttgtgctatggtttactgtatattttaagtctacttttgagacttactgctcagaaaaagtcttttcaaaataattgctgttgatc

SEQ ID NO: 469438 - DNA, 957 bp, Homo sapiens
aaaccacttccaaccgggcagatggagcgtgggtggggggaacatcagggggtggcatatacagttgcagtgtgcttgtggggcctgcccacagtgacagatctggaagactacaaggccttctgtgggtcctcagtgctgctccctgcagttgctgaggattggatttctatcacagactataagccacttctggattctgagacaaccaaccttacgggggacatcaggcctcaaatggtggtggatatagaagcaatcccagaagggaagccaggcaaacaggaagaggcaactcttcccttttatgtgatttgcaaactgagcaaagcttcccagaaagccttgaagatcctacagttcttaacagcgacccaagagttagactgtaacagttcaggatgttgtggtggggcttcatggcctgagctgccaaaattgattaaacatttctgcagtatatggtatagtctgacctgagaaagatgtggattaccgtagtactcgaacatcgattcctttgcatttttcagagaagagcctggaattctacaatatctgtaattatatggacttcttttgtaaggagctctttgtagtttaccagatagtcattttatgcctggaattgaagtgtaataaacttagtcttactgaattgatcacagatgatatacttaaaggcagtttactgtttagtaaggcattctttgggtcttctcattcaaatgatagactgtatcctcagaaataagtgttttaatatgtaaattttcttaactatcagagaagtcatttcattaaacattttgaattaatatcaaagtgggatattgataggttaggaagataaaggaaacaacctttgtagtctgtcagtttccctcacaaattactaatgttttcctaaagttagcctcagagtccaccttatgttgtacatatataacattttct

SEQ ID NO: 469439 - DNA, 913 bp, Homo sapiens
cagaagagacaggaacccttcctgctctaactggtttctgctgcagctccggccgcgtggctccaagattcactgccatggcctgagtccgagaacgtgattaaatctctgagccgttcagcctggagatggtgggcgcgtgtgcagcgggaacgatgacttacaaaggacacgatgtgcgaaaaagccacaaagagtctcccttgggcaggtttggtgggagatgtttgggatttctggtggaaatcacagagccctagagctgacaggggcatggaggggcgcgagaggggctcatggtccctagggaataagcgttctgcgccctgcggcactgaaaataactccgtgacagggagcaaatcatcgcatctttatgagtatcggttcccacttttaaaaatggagataataataatggcacctctcctactacaaaaaggttatgctgagaaacaagaagagtgggctgaagtagcaaaaagaagaggctgtaagaagagagatgcatttttatcttgggccaagagggagcggatccacttctcaggcactgtggtgaggatttggggtggctggggtcagggtggggcatactcctccttattacttcctgtgctcagaccacagccctcagaggggcttagaagatttaagggacatgaagagccagccagagagccacagacgaggcagaggagagggacagaaatagatgcacacagaaagatgacgacagagaaatacatacagagagggagatagacagagccagtgagagacagaaatagccagttaccaagagagacagaaagattacaaagatagacacaggaagagagagagggaaagagagaaagagatgggggagacatcataatcatagcaaatacttatatcacacttattatgc

SEQ ID NO: 469440 - DNA, 562 bp, Homo sapiens
tatagtaggggctgaagattacatctgggatgatggtcattcatgtcccaagaacttgtagcactgcaggtcaccttgttgcacaatttgcggaccatagcgctcttctttttctccatttgccagttgaatggagagaactttgaggatttggaggatagtgaagacaaaatggagcctgaatggaaatgtggagatttcgagaagaagaagaagcgaagaagaagggaagaagaagaagaaagaagaagaagaagaagaggaggaggatggggaaggggaggggaggagggggagaaggagaaggagaagaagaaaaagaagcagaagcaacagcagcaaaagcagaagaagcagcagcaacattcacaaaaggagcagagcatcaccaagaacccaatacatggaaattccaaaaacactgaattaattttgaaagattttaaatgagagaaatatagtgagaatgctttctaaatgacctttgtttgatttaaaattttagctcaaattttaactctttaggtacagcctctaattcagatttcagatttttaacatg

SEQ ID NO: 469441 - DNA, 627 bp, Homo sapiens
gagaaatttttttcttttggacctgaccaatggacaccaagactgcctccaagtctctgccacgatgaccattctcatacagcttccctcatggactcacacacctgcagtggaattgaagcatccaagttactccatatctccaaagccacagccgtgctgggtgatgagagctaggagacagaatcttatactattatatcccaacctcgactattgcaacctggtaaactatgcaaattctatcccaggcctcagagatgagggagaggaagatgggaagaagaaggtgcttgatgaattttggtggtttgctgttactgagacatgggcctattggaggcacagaggcctgatggtgagaaaaccccagttaccacaaagtcagggaaagctctgtctgaggccctcttctgtgacttggaggcctatctcagaaagctctacttcctggaaggactatcagggtgttaaagtgtcctcgctactagagagaggactgatccttttagtgcagaaaagcatcctcatccacttatgagcctttcgtgtagtgtttaaagaaagtgttgtcatttaagctgatttgtggcccatcagaagactcaatatccccaaatttggatt

SEQ ID NO: 469442 - DNA, 1974 bp, Homo sapiens
tccaactccttgcacacctgctctctcacagcttctttctcagtctaggccagcatcaccatggtagatgccttcctgtgcacctggaagctctcagacagcaagaattttgatgactacatgaagttaatcggtgcaagttttgctatcaggcaggtggctagcatgacaaagcctaccacaatcatcaaaaagaatggggacattatcaccttaaaaacacagagcatgttcaagaacacagagatcagctttaagctggggatggggttcgatgagacaacagcagatgacaaaaaggtcaagtccattgtgacactggatggaagcaaactttttcacctgcagaagtgtaacgggcaagagaggacacttgtgccagagctaagtgatgggaaactcatcctgacactcacccagggcactgcggtttacactcgcacttatgagaaagaggttattagttattgacttaatttctgtaatagatatatgcctattcacaatatctatttccctttgtgtgagtttcccatatattccatatatttccccttgtactgtgtgtctttcaagaaattggtccattatatttaagtgtcaaatttgggggggtggggcatagaattatctataatattcctttgtcaccatttgaatgtccatgggataagtagtaatgacacttttttcatttttgatataaggaatttgtatctcctctctttttcttcatttgtctggctagcaatttgatcaactttattgactttttcaagaaaccgcacaatttccctgtgacaaatgtaccaaaccaataaaagatgttgatcatagtgcaaactaggtaaggatatatgggaaactctgtactaacaagttttctgtaaatctaaaactattctgaagtaaaaggattgtttaaataaataaaaatagatacaagcaaaattcatatatttgatgtacacagttcataagacacatgtaaaacatatcgacattgacaagaaagtttgaaattgaggtatacttatacttcaggaaaaggcatgggtagaaatacaaatatcagtagcataaacaagatattgataccacatacatcaaaccaaataatataccttattttcacagtccagtgagatacttattaattttctgaccacaatacaataaaactagaaactgacaacaaaataaaatttaaaaagtatcttcctggaaataaaaatttgatctataaataattctttcatcaaaaggaaagtaaaacttgaattatacattctttaagaattaatggcagtaggaatactccatagaaaactcaaaaaatatagccaatgtcactttcaatagaaaatccattacttttaacattgttatcacataagaaaaatttcaattaaatcaaaaaagcattcaacttaagaagctaaaaaaacaaaattaaaaaggagtaaataataatcagaaataaattatttagaaaaaaataaaagcatcagaatgaataagatgtaccattgaatagatgttaaaataaactaacctgtgagaatagaaagcacaactgcataatattgggaattttttagagagtttataaccctacatagagatcagattttttcataaaggaatactgtgtaaaaaacttatgactataataattgtaggaaattaaaattaacagaatttgctcaagaagagatagaaaaactatttttttaattgaaaacacaggtaaagatttacaccctgaaagtggataaggcctgattaattttatagaaaagttacaacaaacattcaagacatagataatctctgtgatatttatgggttttagacaaagaaaaaatctgaaactttcccatttttttaagacttacatagctctgatcccaaaactcgatcatgacaacaaacagaaataactgccttatagttttgttcctgaatatttat

SEQ ID NO: 469443 - DNA, 551 bp, Homo sapiens
tcagataactaaaatacctcttagtctaggccatcaccaataattctaaatgacaaatgtttcttctaacaaccccacaatgtcatcccttaccacaaaagcttccttcaacttaatctctcccactctaggttcccacgctgcccctaatcccgctcgaagcagccctgagaaacatcgccctttatctctccataccgccccccaaaactttcactgtcccaacactttaccactatttcattttattgttcttattaatataagaagacaggaatgtcaggcctctgagcccaagctaagccatcatatcccctgtgacctgcatgtacacatccagatggctgaaaccagaagtctagtttccctcaacaacccccgcccccgcccacaacacgagcaatggctttctgctcagtcctggttgacttcccttcctgcgtctctacggaggtcccaccatgctacacattctgtccctcctgggctccataaggataaacatcaagtgactcaggaagaaatattttgtggttgatatattttaaaac

SEQ ID NO: 469444 - DNA, 624 bp, Homo sapiens
ctgtctgtagcctcagtgcaaacgatgataaatgatgaagagccggacaccaagtggatagttcccttgacttcgaccctctttgaggggtgggaactggagttacttacttcactcagcctgcccctggttacttcttgtaagagggagcctatgagcaagcaaatgtgggaaccagagggaacaaatgctggaactagtcagtcgctcctctctggcaggagcaggctctgtgcagttcccacagcagcatcccagcccctgccctctcagcacccaacttacaagagccctctggggaagtcaaggcaaggcactgagtgtgtcctggggacctgggctcaggacattcggggcacctggcagggctgttgtgtggagcaggaggctcttctgaaagtggccctgcccctcctcctgatcaacaagactgccctttggaatctgctgttaaccaagtctaaagttatcttctgccccctttccctggcctccttatctcttgtaatatgttcataaaggcagaatcggatgaaatgaatagcctgtgctgccttctttttatttatttatttatttattattatacttcaagttttagggtacatgtgcacaatgtgcagg

SEQ ID NO: 469445 - DNA, 541 bp, Homo sapiens
acccaacagctccgaagagacagcaaccatcgagaacgggccatgatgacgatggcgtccctaagtgataaaacgccaggattctcaccctcctgtcatgtgtttccctctccaagacgtttctgctgtgagcctgactgccaacctctgttcccaggggtgaggctattgccaagagaggatccaatacaaaaagcaagtcaagccaagagtgtacctgcagagtgcacacttcccctaaacactcaaagtattgggctgttcttgaaagcagctgtcttcttggatcatgatgatgaggccaaggctgaagctccctattccctcttttgcctattttatgagcccagcaccatctgggatgatatttggcttttgaacctcactaagaaaacaaaattagccctggatgaagttattacattgcaaatatctgattgtcattcagagttttctgtgatctaatcagttctcatcaagttcatatcatccaaaaagcactctgaggatagtgtgtcttgtaagaaatagctcaccttca

SEQ ID NO: 469446 - DNA, 1070 bp, Homo sapiens
cactgtgagctgaggactactgtaggtatggaaatgcacctgtttccgaatgcctttgccctcctcaaactcccccacaccctcctggtgctcagtcatgaccttgccctctacagattcaaaacgctcttcaagacctttccatcacagctcctggagcctctacttctttccatttgcaagccttcaggatactgtaggagccccttagagcagcgattttcagtgtgtttcctggaccagtggcatcagcagcacccgaaaacttgttataaatattgttctcatgccctgtctagatctactgaatcagattctgggagtaaagtaggccccagccccctgagttttaacaagtcctccagggcagtgcagaagggaaatgtggggccggagcccccacacagagttcccactggagcactgcctagtggagctgtgagaagagggccactgtcccccacatcccagaatggtagatccactgacagcttgtaccaagtgcctggaaaagccatagacactcaacgccagctcgtgaaagcagccaggagggaggctgtaccttgcaaagccacaggggcagagctgcccaagaccatgggaccccaactcttgcatcagtgtgacctggatggaggacccagcccctgccctccttgtgctcctgagtttacagctttcatagctcagctgtttcacttcttctggcggccattccaggaggcaagagacacctggggagcacctgtgtcatctcttcctcctccttggggaaccacaaacttcaccagctcagtgaaagcaaaccaaggattaagtgaaaacaccagcaaacaaaatcgataaatcagtaacttaaagaatggaccttcgaggcctgctgttcagagtgctttgccaagtgacgtaagagccaatgacttgagatgcagaagaaaagttgggaatgattttccttagcgggaattcatttattttgctggctgaatagtattccattgtgtatttacaccatattttctttatccactcatctgttgctggacacttaggttgatttcctattt

SEQ ID NO: 469447 - DNA, 768 bp, Homo sapiens
aagcaaatggtatagtagacccaagggagtaaagaggagcgagaggatgagagagcctggaactggccctttagggcttctagtatttaaaggatggcctctttgccccaacgcataagctatacagatgtgaaagtgcttttgaccccagaagtgacatttactccacatagtcatttttcggttattttatgtgtccccagttcattattctctagaggagaaagtaaagtctcagaaattgggttctttgttcagatgttcactttaccactagagttggactctcccattactgtgccttcttgccctttggtcccaagaatggacatgcacagatgtgaattcctccactacatttggcatatgggcactggccaagtgttgatttttgttgctgaactaaaatgtcccttttttgcttatggaggtctgagctaagtatttgtcatttgttattcaaagacttctgactaacagtatctccaacgtagcttctttgggaaaccaaatttaaaaaatggcaggaaaattaaggtaaaagacaacatgcttgccctttttgcaggtgaagctttgatgatagggtagtgtataggtcaacatttttgtgatgattttaagctgacttaagttttgtgcattgtggaatgagtatctgcaactcataggcacattttacctttgtgtgcttgtacaatgatcttcaagcacataatcccctggatctggttgaagtgaaaattaaaatgatttcttacaatttgt

SEQ ID NO: 469448 - DNA, 737 bp, Homo sapiens
gaatccctggcatttaggagaacagatgtgaaaccaggcggcccagaggaatggaggcagtgccctgggcctgaagattgctagttctcgtccaggtcccttgggagacccaaagctcttccagtttgtggcttctatgacatactcctcaatcttcaaccagcttcctatgtggaatgtggggactggagcagtcatcttgcgctatgagatggaggctgtgctgagaatgcttggtatccgtagttttcatccatgggtggttttgccccgcagaagggatatttatcaatgtctgaagacatttttccttgacataaacgaagcgtctagtgtcaaggccaggggtgctactaaacagcctccaatgcacagggtagcccacatagccaagaattatgcagccccaagtgtcaatagtgccaaggttgagaaaccatacttcagagataagagaagcaaagacagggtggaggcttctaccctggtcccctggggcaggccattgtttgcaaagggcacagagagtgagcaggggcaggggctggtcctgcagctctgccccagtgatgtcatcgagccctggaactcggtgcccttcctggaagggcttcgcctagatggagactgacctgacaggaatcggctccacctgtggacgtacggagttggactttgtcccaaaactgtgcctgtgacatacattcctaccttcacaaggctccttcatgccaatc

SEQ ID NO: 469449 - DNA, 1005 bp, Homo sapiens
gtattttccattatagaaactgtatctgggagacaaacgggatatggctcaagccatcctgcatccacaccacttccaagcccgcatgctccactggaagccatcatcttcctccactccagcaaacagaccacattgtaatgatcccaaggaccacctgacgcagacctggatgagaaaagttgatccaggaaatccaggactagggagctggccggcagtcggatcagctgggatatctgttgatggagggctgtggaatggggggaagagctggccggcagtcggatcagctgggatatctgttgatggagggctgtggaatggggggaagagctggccggcagtcggatcagctgggatatctgttgatggagggctgtggaatggtgggaagagctggccggcagtcggatcagtggggtatctgttgatggagggctgtggaatggtggaagagctggccggcagtcggatcagtggggtgtctgttgatggagggctgtggaatggtgggaagagctggccggcagtcggatcagctgggatatctgttgatggagggctgtggaatggggggaagagctggccggcagtcggatcagctgggatatctgttgatggagggctgtggaatggggggaagagctggccggcagtcggatcagctgggatagctgttgatggagggctgtggaatggggggaagaactggccagcagtcacagagcagatgtaccgtgagaagcctgacagtagagactgggcttccctcaacaatacttgccacggagggatggtattttcccacttgagagcctccatttcaggttgtgctgatcacagggagagagagaaagactctttagaaacagagcaatatgtgaagccactaagaagaatctaaaggtttccttctaattaaagggattactctgccacgtttaggagacagaaaaatgctgccccctaacattctatggagctgtacacatcacagtgtac

SEQ ID NO: 469450 - DNA, 1404 bp, Homo sapiens
tgggcatcaagagggagcactggtctggaggactgagagtgccctgacccttccaggacctcgccccttgagcctgcccctcccgtgagggtgatggctgagaggggctgaggaagaaccagatgacaggcaagggctgcccgggccgagaagggctgaggaggaacaggccacaggttgggtgtgtggtcaacatgggagccagcactgagctgccccgcagctcccaggggaagtggccaccagccctggacttctgccaaggagtctcccggaaggacagcagggcgggtgggcggtcagggtcaggtccacgcttgtgctggtccgtcctggagctcgccatcccgggaggggtgcgccaccgtgggtgcaggggcatgtccaggcctcagctggtgacttccagacaaaaaatgcccaagcaactctgaggcctgagggcagcctacggggagcggccacccgctgagtgtgggagcaaccaccgtggggtcgcaatttagggggcttcgttctcccggacgccagattctgcgacctgagagtctcatggtggggctggcctgccttgaatgtcaccccttgaccaacaagagcttagacggaggcttctccgccgtggctgtactgctgtcctggacgatctctgtctgttgtgggggctgtcccgtgcactgtgacatgttcagcagcatcccagccctccacccacagggttacagtagcacccccaccctcaaccatgacaaccaaaaatggcggagcaagctttggctcccacactgctgctggtcaagtgaggcaagcactgaggacaaggccctggaaaacttggcaagagcatcacgggttgatgggggaatccgtgctccacgcatagccgtgacggctgtgacctggctggacactgtgatggattcccaaggaggtgtgtggtggcccaggaagagcaactgccatgtggacaactcaggaggaatggagagcaaatcccttctgtcccacatacactcaaggaagctgacccgctcaagtaatggaggtcgggggaagggggttgagaacctggactccacaggcagggggtctacactggcactggtgaagcaggcagagcctcaggcacctccggccgcatcattgtgtcccggggacccagcagcccaaaagggctacacggactttccttgcagagccacacagaggatttctttcctctactcagttctaaaacaacgtctcttgctcccttcagtaaggcgacccctcccatggcacagctaatatgtgtgagtagaaaaataacagtgacacaatccacacaagatccatggagcagatttatcttaggatggaatttttcaatgacacgtgttaatgtgtgtgaacctcctttggtgg

SEQ ID NO: 469451 - DNA, 621 bp, Homo sapiens
ttttattaggaatatggttacggttcctagggaaaatgttattaatcacgacatccattcattttgccagcaagcatttattgactggttactctatgcagcaactccagaatctcagcagctgaacacagtaggtgtttcagttcttgctcctggggcatttcagtgcctgtttaagcaggcggtcttctacaaggggattcaggacccagactctttccatcttaggctccatcctttcctcaggccacccagttctgcgttggatcctgtgtgcgtggctgcagagggaaggaggaggggccacgtggaaggcttttgtgggccagatgaggcagcaaagccaaagctaattgagccactcgactatgaaaatgtcatcgtccagaagaagactcagatcctgaacgactgtttacgggagatgctgctcttcccttacgatgactttcaggaaatggcagcagcaaaacgcatgctgaggggtgatttactgcacttaaataatttagcagtataagttaactattaaaataatagaacttggtgtccatttctgccaaatatatttgaaatgacaatttactaaaatataagcatggatagtggtgatgcttgtgt

SEQ ID NO: 469452 - DNA, 639 bp, Homo sapiens
gataaaaagttcatcttgatttcaaacccgaaaatccttaggactgggaaaaaatgctttacaataaagatatgccaaaatgatttttttaaacgattatgtacaattctttgtcaatagcagatgtttttatggacacaatactttgttcagtttgaggagtcaagtagtgcaattaaaagccaagttttcagatttactattcaggtctggcaagaaaagagaaggaagtatgaactttattgaatttacatatgaaactctctgctccgtcaataagcatcctgtcttgggtggtagagaagttgggcccaataagcgcatttctcactgcaggcttcaggtcactggggctgttcctcacacttggtgcccatgggcttgtgccagtgacagcaaacaacaaacttctccctttcttgggaatatcattggaaaacatggaattccaatgtgctcagagaatatggtttagagaaacttgcaagtgaagatgacctgattcaaaatgtcaatcaactaattaaataattgatttcctattgaatatttaatatcccagcagcaattaaacttcatttaaagttacttcatacttccttggatattttattatttagaatgttacagaattatagc

SEQ ID NO: 469453 - DNA, 569 bp, Homo sapiens
aagcgccagtcagcctgctgatactaagtttcgatgaggttgaaagatttacccacagaatcccagccagtaagtggtacggtcagaatttcgcatgtgtgctctcattccgtagttcttactccctttatgctgccctgctctgagtctttgagtcatgagttctccgagtctgggaagcagatggagtttgcaagctggcttagaacttggggtaactttgcagaaaagctgccaaatgaaggagttgaagaaagggaggaggcaggatgtggtggaagttttattctgtggtccaaggaatccacaattttaagggattctggagaagaagagccagaccaaaaatggccatttaattgtgaaagctacatggatttagggtatgctgtttccagcacaagatttattaagttttatttttgtttcacttatcaagtataaacccagggaaagacctaagcaatgatattggtaataagaagtctggacaatatgacactgtctggaaatgttttgatagttgtgaacatgtgttataaatttaaaatatctaggatttacctctc

SEQ ID NO: 469454 - DNA, 843 bp, Homo sapiens
ctacaattcaagatgagatttgggtggggacacagccaaaccatatcatggatgaatgatgggatgtcagcatgcggatgtggggagaagcaagattgccccaggtttgtgactgtggtagccactggaggagaagcagaagaagacaggaatacgtggaaaagtttggaacttcctagagacttgttgaatggttgtgaccaaaatgctgatagtgatatagacagtgaagtccaagctgaggaggtctcagatggagatgaggaacttattgggaactggagcaaaggtcactcttgttatgctttagcaaagagactggctgcattgtacccctgctctggagatctgtggaactttgagcttaagagagatgatttagggtatctggtggaagaaatttctaagcagcaaagcattgaagatgtagcctggctgctagtaaaagcctatgctcatttgggtaagtaaagagaacttatatttaaaagagaaatagagtgtaaaagtttgaaaaatttgcagcctgaccatgtggtagaaaagaaaaaccctttttctagggagaaattcaagcctgctggaggaatttgcatgagtaaaggagagccaaatgttaatagccaagacaatggggaaaatgtatccagggcatttcagagaacttcacagaagcacctcccattacaaacctggaggcctagggatagaacagtgtttgggcaaaaggaagtcttgcactgtggctgagggtaaaattaggggtgggacagagagaaagttggtcatgagaggctaaataatattccatggtatttgtgtatcacattttatttattaatt

SEQ ID NO: 469455 - DNA, 3249 bp, Homo sapiens
tctttcttatcaatgccctttagaagccgcagataggaaagtaagtcttgtggctatctggcaggggagtattcaagacagcgggaggaggaggccatagaaagccgcctcttatatgctaggtacagaaggaggccagtgttccggaaaggtatatgaacaagggaaggagtaacgggaagtgctcagaggtaataaggtccacgttgtataagacagctgctgcattactttcagagaatccccggggctgcaaaaacaagctcagtgtaattacctctatatcgggggtcataagaacctttaagtttcattctacatggtactctatggaaaggattcccaatgctaaggaagagagctccaatagagagaacaatataaaaatctggaagcattatgccattgaagatgtcatcatttttatagaaaatgccatgaaagctatcaagcctgaagcagcaatcatgaaagagattgtggatgtggcaaaaaaaagggaagtgaggggtttcaagacagatcttggagaaattcaagaactaatagacaccacaccagaggagttaactgaagatgacttgatggagatgactgcttccaaaccagcaccagacaatgaggaaaaagacttagaagaggccaaaaacagagtgacatcagacaacctaactgaaagatattgctgacattagtatttttgcaccaaaccaattggctgtgttacagcagaaatactgaattaaagttccctcccttgactacttctttctctctttatttaatttaaactaaaaggatgcaagagagttaagatcttgatctagattgcactttggcttaagggaatgttgtggctggtttgatattctatccaaaccacaaaaatttgtatcagcaataagactgttttgctcatcacttaagcgtaatcataccgaacttttgttttaaagtgagtgatattagactcttccttttacttaaacacttagaagccactgtaggttattaattggcctaatttcaatattgttgtatctcagggaatagggaggtctggggagagggagaaagactgagggcaatggctggttcaaagagtagccatggagtagaatacatgtatcatttattgattgagtttactgtcttatatgagcatggttcatggcaccaaaacaattacaataggatcactgatcacagaccaccataacatcaaggaccactgatcacagaccaccaaaacaggtataataataaggaaaaagttagaaatattgtgagaattagtaaaatgtaacagagagacatgaaatgagcacgtgctattggaaaaatggtgccagtagacttgctcaatgcagggttaccataaatctccatttttaaaaagcataatatttgccaagcacgaaaaagcaaaacaggataaaatgagatatgcctatatgtgttgtggcatacattttaaaattcttctttctatagcacataagagtcttttcctaaacactggtagtatctctgtatggtatttattaaactcaatttgactaatactaaataaagtattcattatagttctaaaatcatgtaagttgtattatggttattttatatacattattcaacttttactgagattatgtcaatgccaaagcattcattgattgggtgctagtattgtcatacatattttcttgaattttatacatatatattcttctgttagtattactctttggtataaatgagtgagtattgtaacttgatttaaaaagtcaccctaaatgtggaaactgagctaagagtttagcacaaaagtcatcatcggtacagtcattagaaagtgtgcatttctgccccatgtgtgcaccttatttccaatctaaaaccaaatttatttttttttcttcatatctatttaaactcctttggtctgcttctcagttaatttaactatcaccaacatactcacccaagatattattctctatagtatcatcttgttattctcacctattccctcttctaaatttttatgctttcaaatatgtcctcatatgatcaccatatggtcaccagtgaccaaatcatttcttctatactttttatatttgcttcttcatctctttgtctactatttattgcctcggttctaatctgtttctactactgatggcctatttcaggtctgtatcaacttattctttgaaaaattttgaaataactgtttatactgaataaattgcctatgaggatggtagtgcagatgaataaataagaagagagtttgtaggcagaagatgcaaacaggacatataatctatgctccagaaatggttgttttatcctccatttatacttcaaatttcaagaacagctatgaatgtgttctgcaatggtttaatatagaagacataaacattatatttgttaagcaacaaggtcatggaagatttacctagtttgaattaaatcaatattgtttgttattctttatcctaatcccaaaagaccatacaaaatcaataagatattgatgtaactaaatcttcttcagtaagatttatgagacactgatatgagaatggaggttggctaagcagtaaccagagatatgaaatcttcatttgagttttcaaagcagcattatttctatgtgttttctttattaaactcaaacacttgcaccaaaactatatagtattatttagcattatatagtaaatcataaatatctgtataaaataaaatttgcagtaattacatgtatatcatatatttgatactataggtaacattttgtctttcacactaagctaaagttaattttataggtaaataaaaatgcatatatgtaagatgactgagtatacataaagcaaaaatgtgaaattgcattattggagaatcaataaagacaataaatggactaagggagacatttagttgatgagtgttattaaagttttaccatcataatttatgtttggtctgtgaaaaagtacttctttgaactataaggtatacattcaatatgtgttttaatgaagttttatatataataccataacgatttgtttagaattatgtattattttgttagctgaatttcgttttactttctttttcagtttactttaatcatttaatgaacattggagttgcagaataaaaatggaaattattattcattttaaggatgtttaaagcaatgttttagtattatcttttgttaat

SEQ ID NO: 469456 - DNA, 959 bp, Homo sapiens
agataaaatctcttcgtcttgatcgtctttagggtattatgaataatccgtgcacctcttcatttaaaatttattctgagcactatgcgagggtctagggatgtaaagacaagtaaagaagttcatagtctgttggtagagggagaccctgcaaatgatcaagttattaaaatcctgctagataagagctgctatagagattatggttttggggagaaagcggccacaattcccaagcttaggcaatttctggggcagtatctagttcctggaaaatccctgaaatatgtgttaaatcaatgcctagcacttaattgccgccatcacgtgggacttcagtggattgactggactctgacgggtagttcttatttggaatttcttatgaggatgcagtcagatggtggttggactggagcagcggagcgaaagctgcagacctttgcagtgaatgctacagctcataaaggtggcatgcacccacagagtgagcagcagcaagatttattgcgaagagtgaaagaacaaacattacatatgattgaaagggaccccagtgggttgctgctgctggctagggttgaagaggtgctggtggaacaaggtcagcagcaatggggctacctcaaaaagcaggggaagaaaggagcaggcactgaaatggcaggggtcactgctgttgggtttttggatggtccatctatgggttggatgcagggtgaccgttaacagtaatgcaggtgcttgtaagacacacatgcagaatatcatgtttaaaaattcaacttatttatttgctacataagatttttcaagttcctgaatgtaacccagtatcatttttatttctgacctacagcaatgtgctagaatatttaaatgcttgaactgcctgaaagatgattttaaagaaataaaaagaaagtatcttggaatttcccccatctttttagttgttc

SEQ ID NO: 469457 - DNA, 3069 bp, Homo sapiens
aaacaaagttgaaaagactggaaaatggtttattctccatctgattccaccacggctatcgccaggaatatggcagcacctttgttccagagagaggaggactcctgtaaggaagaggcagaagagaaagctggaggtgctgttcagaagccacaagaggtgggagaaaatattactagtggatcttgtaaaagactaagcgtcagcactaaggacaaaggggaatcaaaagtaacacagaaagcacttcagcaggccatggttttatttcctggtggagtgacccacaccttcattcctgaaggaccgcggcaggggtcccgcctctgtgctgccattatgttggacccattactgctgttaaaacatcgtcatataattatgcacctgtgcctgccgaaggctgagagcttgcacataaagaaagctggaaagtgttactcctacccttacaacaaaaaaaacacaagacacatcttaagtcagcaactttccataaaaccatcagagaatgaagttctaaggtaaactatcgcaagaacaaaaaaccaaacactgcatattctcactcataggtgggaattgaacaatgagatcacatggacacaggaaggggaatatcacactctggggactgtggtggggttgggggaggggggagggatagcattgggagatatacctaatgctagatgacacattagtgggtgcagcgcaccagcatggcacatgtatacatatgtaactaacctgcacaatgtgcacatgtaccctaaaacttagagtataataaaaaaaaaaaaaaaaaaaaaagaagacatcagtgaagagcttgtcaatggaagaaaaggctctgcaggcttagaggtatttctccagccacatccagaagattttatctaagctcttgtatagaattatcagtagtatataaatatgattaaaacattaatttgtaaatgtatgtttatattagtttctataattatttatgttaatgtgaactcttcacctaacttatggtttgactttaaaaagacatttcaaagaactaatgttctttttgtgtgtgatatctattgctttctcattctttatatcatttatttgtttgtttgtttctattaaaccttttctatttcctcccctctgcttgctttgagtttggtttgctcttcttagtctagtttatttaaatgaaatattgttattgatttaagatctcttttcttttttaatatagtcatgtgcaaatacaagtttctctttaacccatgctttagctacatcctgtgcattttgtcatgtttgatctttattcacttgtagtgttttctaattttccacccattggttatataggtatatatagtttaataaccacttaatcaacaattttccacatttattttaatgattgatttctaatttagttcagtttttgtcagaaaatgttcttcatataattttcatttttgcaaatatgtttagtcttttattgtgatgcttagtctatcctggagaatattttatgtacacatgggaaaaatatgcattctactattattaacttaggagttctatagatatctgttaaatcttgtaggttttagtgttgtttaagtcttctagttcctcgttgattatatagttgctcaagccattatcaaagagagggctttcctgattattcaatctaaatcagatgttttcctcattttttgctccttcttcataacctttatcaaaatcagaaattatgaacttatctgtgcccttatttctttacttttgtccccttcactgaactgtaacagaaataaatcatactccgaatgcatattctgcaactcaaagattttattcattagagtaaaaaagttgaagatattttaattgccatgtgtgtttcaaagcttattggtttttatattttttctccatcttttatagtgcctcacatacacctaattcaatggtagctcttgctgttatttttagagatgtaacttcttcagttctcaccaaatatgtcaacttatttttaaaacactggtttattttcattttacgtgtacattttatcagatctttaaatatttttattaaattatttaattacagtggcaaccagcagagtatagccatgaacattcaaaggagaaacacatttttctaaattctcggtagtgcgaatagaactgtgacatacagatttttataaactgtttttgatgacaaagttaactaatttcatttttattgagcatattttgttacctttatgttaagataaggttgtttaaagaccactatgagaaagagttctcaattaattgctagatctctttagttgcttcaaatatatcatactgaagatcaaatatcataatgtagaaatttgggaaataattaatgtgaagtcaggtcttgatcactctgtaaattctctatctcatagcataggaagcacagagtgtctttcttttttcttaccataagagttttttgagaaagtgaaggttatttcaaagcaatcgtccatgcaaaatcataaaaatgtattgacaatacaaaacagaaggagtagcaatttgtctttcagtaatactactttttaagaattaaataaagggtattttttcagtagtttagaatttttaccttaaccataaactcatgtattgacaataaacctacagtaacagaattttaagaataatctctttttaaattattttaatcttaatgaccacatcaactatttaatgatagtagaagtatttttaaatgtttaaaactaaacgtaattcttaattttctttataagtgttactttacaattacttatttaataaaatattcttattaataactattttcagttctttaaactttatattttttgatttttaaattaaattttaaatagacaatttcccttgacttcagaaacataaaaagctatttgggtccatatttagtttatagagattcttcatcattgagaggaagggcatctgaatgcatcatttacatttaaaattttaataaaatcaatatatgcat

SEQ ID NO: 469458 - DNA, 590 bp, Homo sapiens
acttctaattatatggtagtgatgttaccgctattagctcatttaatcatcactgaaacacacacctacaacttatgtacatggtgttgtaattccatttcacagagacacactgaatcttacatcaataaaggcattttcccaaggtcaaataacagatgtggaagatctgaaggagttgcagtgggagcccaagggagaacagacctgctccatacaaagcaggtgaaccccatgccaagacaaaataggcccaagggagctcttggccccttccactatgtgaccacacaacaagatgtcaccatctatgaatcagaaaatgagtactccccaaatgctgaatatgccagcatgttgatcttaaatttcccagcctccagaactgaattgatgtggatcattgaagtggtattcaacaagacaatggaagaatgaactttaaggcgtttcagagactataggcgctccccttcccatcacagggctagagttccagagcctgattttaaaagtggggacaggagtgcccatgggatcttggtgctggctccccatgctgcctcaaggctctgctacttgaactcttc

SEQ ID NO: 469459 - DNA, 1112 bp, Homo sapiens
gcagggccattctaaaaggcagggcccaagatggatgcagacgagctgagacctgcgagtgatgaagtctgtgtagcaccaggtctccactttgctgctcggaaggtgaaaataggggttgaagttccatcagcaatgctggttggatgtaatcagagtggcatagatttgtggagctttgaactccagagagatgatatagggtatctggcagaagaaacttctaagcagcaaagcattcaagaggtgacttgggtgctgttaagggcattccgttttataaaggaagcaaagcataaaagtttgaaaaatttgcagcctgaaaatgtgatagaaaagaaaaactcattttctgaggagaaattcaagcctactgcaaaaatttgcataaatttcagaggatgtatggaaatgcctggatacccaggcagaagtttgctgcagaggcagggcactcatgaggaacctctggtagggcagtgcaaaagtcaaatgtggggtcaagagctccgacacagagtccctactggggtactgcctagtggagctgtgagaagagggacactgtcctccagactccagaaaggtagatccaccaacaacttccactgtttgcctggaaaagccccagacactcaatgccaccctgtgaaagcagctgggagggaggctataccctgcaaagccacaggggtggagctgcctaagaccatgggaagccacctcttgaatcagcgtgacctggatctcctacatattcacgaacatgtggccggctaaactgttaatgttcaaatagggtgaaatctcagactcttcacaaggtttactttgacaattgttataaataatttgttccataattattttaccttgtgaaaactttttattgtgtgttttattcaatggaacacagttttatattaaaaattaaaacatatgaatttaaatgtgaatatctgttcaaaattaaaagtcatcataatttatgtatttccattttaatgtaaatgttaaatccgttcaatacttcgtgttttaagtaccttttgtttaattacagttaaaaattacaattacaattataattgaaatttacaatgtaaaattac

SEQ ID NO: 469460 - DNA, 858 bp, Homo sapiens
gggtcctgtgagaatctaatgccatggctgatgtgacaggaggtggagctcaggcggtattagtattacaaagggcaattaagagtggtttttcaactgccataaactgctgttctaaaacacatttttcacatctaatgagaaaggtgattttgcaaaagaaagttaatggcctctgtgctattgccttctctccctcaaacctgcacagcagtagcatcaaatgtcttgagatagatagagttgatatcatgtttgctttggataccttcagagctacaaagtgtgacacagccttggagaggaagggaaaaaatgattcagcaatggcagctgacgatgcccggctgccccctgctcttttttgcatccctacctttctacctgctgatgctgctggagccaacttggctgctcagggagagtcattggctacctgcgttttcacccattttgccatcactcaacagcaaagatttctgcctatagaaagtaaggatccaagtatttagtcagaagataaaaaaggaatacaaacatatgttaaataaaatctcataagatatttgggaacatttagggtaaaggtagataaaataattaaaaaaatacttcaatgttttggaaatgactataattttaaacatgtataactattgggtactgggtttaatacctgggtgatgaaataatttgtacaacaaacacccatgacacatgtttacctatgtaacagactttcacatgtacccttgaacctaaaataaaagttaaaaatgtgatgtaacaaaatatagtgtaaactacagagcattttacttcaaggcatttctcttcctccaaagatgaaagttaccc

SEQ ID NO: 469461 - DNA, 702 bp, Homo sapiens
cttctgcaaggacatctgcacagcaacttcctgtctaaccttggaccggcaccacccttttaattgtccatatgcaaagttcaccaattctccaagctacaattcttagtcattcttgtcaattcgacccagatggcaaaattaaaggcccttcacatcatggcacaacagtaattttagttcatcaaagattcttaccccatgctgttttttcacaattaatatttaagttcctgttgggcaagtgcttcatgaacaatgacatgtactctgtagctggaggatccatcttcttgtcaaagctgatggagaaaagaaaagtggtctgcggacatgataattacatattgcctgaaaaggtggaaggactgaaaataccccgaacagaatcttcagatggggcagcgtcccatccatttactccaactgtgccaagatattacagatctgtgtgtatcaaaagagaatgcataccatccatggtttttttgccaccagccacagtgggggatgacatcaacttcaataaaattacaaaaaacactaggtaagaaagaaaaggattggaaaaatcactgctggattttattatgattcttgaatccacaggccttaaattctgagttttctggaaaggcagcaattttatctgtagcaacattatttacagctgactacttccatcatcgtctaaaaggttgt

SEQ ID NO: 469462 - DNA, 669 bp, Homo sapiens
ttatagattattggaatggtgcagctgccaagcctgctctcgtgggctagagatgagtgtctgcagcttttcctggtgcagagttcaaacttctgatgaatctacaatttgggggtctgaaggatggtggcccctgtctcatactcacagctctactaggggtgccataacaaagtcctgcagcgtggctgatttaaccaatacattatctcacagttctggacactggaggttcaagatcagaggtgtcatcagttctggttcttctgaggggggtgaggaagaaatccccagctttcctcccagtttctggtgctcgcagcacggccttgatacggaggaggagagattgattgtcagtagtgcttgtctgccatcttgtcatggagctgctcagagcattgggttttcttcagaaagtcctcacctagaagtacggatttcactttctctagatatatagccagaagtgggattgctgaatcatatggtatttctatttttaatattttgaggaacatatgtttcatttatttttaagttcaaaagtgagatttctaatagtttaactttgtctatactttttaaacaaaatctgattaaacttttctgatgtttgtccacatagaatttgcatagaacctgtaaaggttggcatttatacttatg

SEQ ID NO: 469463 - DNA, 1384 bp, Homo sapiens
tttctgaaatacctttgaggcctttttcgacggacaaatacaaaatatgaggtcccgttccagccagtggaaacgggacacagcagtagggtggatgcgtcaggttataaatgaccctgtctcctttgtttggtgtactctcctggcaaaactgctggcgaaatctaatgccggtgctgatctgataggaggcagagctcagggtaagcaatggggagcacgtgtaaatacatatgaagcctcactcaccggcctgtcactcccctcctgctgcgtggcccggttcctaacaggccacggaccaatactttttcacagcctgagggttggggatccctgccgagtcagcgaggctggcagatgggcagtcacacacatgcctgtctccctcttcaattcccttgggagagagtggagcacaaatctggccgtggcacaattggctgttcgtccctggatgtccttcaaacagatgctgtgcttgctgggacagggcttcttgctacacagtctccaggaaaaatgtcacacaagtgaaaaaggggaggttaatgatacgaaggggtagcaaaaagttcataataataaatgattatataagattcattaagaaatgaaagcatcaacaaacctaatagtttaactactcttgaggctcaatgctgatggctatcaagaaaatatgtttatacttttgtttttatgctatccagtaggttccagaatcattaatatattatatatatgggatattagctctttcatttctatgtttctaggcaaagttttaggattttttagattaaatgcacatataaagtgccagttactttgaagtctgtcctttacttttcattgttctctcttttaaatgccagagaacattccaacagaagtttacactttaaactttcagtcattaataattacatgagtgattgaagccaatgaattaaaaaatattgctttagatcatcaaaataacaattagttttatataaggcatagattttcttcttaaagtccccccccaaaataaataaatgcatagctaagtaaactaagcactagttatattcaaaagtattttataatttttttcaaaaagtcagagctgaattaatattcaattcaattgattcatgtgtatatacactctatggtcttatttttacatgcttattctcatttcagagtaatttacttacaatagttttattttagttagatgaaactttttatcataagatgttgaatgttttgattattggtgttttcagtgatgagatgcatcaagttcaataagacaccttgagaatgtactttttcttactcaatgatcaatcttctttatattatgataatttcttcaatatctgtgaac

SEQ ID NO: 469464 - DNA, 681 bp, Homo sapiens
tctgatcaatcacctgatttatgattcttataaaggtgctattttgtgtggactttaattcaatttgctgtttctgccactttaaaaagttgggtctgctgtgtgctgtagttaaatcaacagtcttctggtcggcagacatgcagacaactgttccctcaccgccaccagtaaattcacaggtctgcaccattcccaagggttgctgtgcacagccttttctaaggagtgagacccaaatccttatttcttatgagcttcattcaaatatatattacaggggctccatgcccgtggttgttttctcagtagaattcctgaaaactgattcagacaatagtgtgtgcgtgtgtgcgcaggtaactcggtataagaactgttgtttaagaattaaattccctgaaaataaagttcctgatattactttatttacattcatttgtctcttaatggattataattttaatccatggcttaaatcaggatcttctgttatttgtgattgaggtaacagaactttacaatgctatgagagaataaatgtgatttggaaatgcaccagttctcttcatattatcatgactaagttttgttataaattttcaataataaatgtcagtgctaagatgaaaatgaacataataagagcattgcttctttgaaatttttaaaatgtgtctt

SEQ ID NO: 469465 - DNA, 812 bp, Homo sapiens
ataagaccaagaccatcagatcttatagtgttctgtgaccagcatccgtaagtcatggaatatgaggaagccctgggaatcctgaaactggagggacctgcactacttcgtagtctgtttgttctgcttatccgggtgaagatggaactggacaaaagaatacctaggggtggaccacttggtgccacacttcttcttctgtgtctccatcatatagcaatggctgtgactcatcccgatgattgggatcaattacgcctgcaacagtggaacacaggccttcaagaagagtcttcccacaaagaagaagaacatctagacacacagagcctaaatattcatgcagaacttcaccagcacaaacaccctgctggaattggtgatattacaagatacttcaggatcatcttgtatgtttgctgcctctgtccaaaaatgtgtcatttctgcaaggatccctgactccttttataggaaaatgatattagaaaccaatatattagtttttgaaatgccttttaaaattttctcaggccacactaaaaagcaattacctgtaaagaagttaatcccttgcaaatttattttgttcattatattcaatgcacatgataaactaatgttgttaatacatgtgttcagaaaagcaaacaaaaagtcaaacatctgtggctctagatgataatttagaacccttctactttctgaattgtgtaatattttaaatcccaaatggcttcagtattactccaaagattgctgctattacacagtatccaaagctaatgttaatacttctgaatagagagatt

SEQ ID NO: 469466 - DNA, 2156 bp, Homo sapiens
gtgttctcactcaaagacggtatgtgtccgggactcgatattttcaaaatcttctcagcaatggtgtgccgaagtcagacacttagggagatatttgtttttcatatgaggctacatcatattgaaatgactaagactatcaagtcacatcagagcaaatcagcagaacgcagaggctctgggagtaaaggtgaagtatgccaagaagtagggaaggtgacccaggacagaaaaagtgcaacatctgaagtgggatcgtacaaggacatggccacattgtggctggtagtcgaaaagggtgataacttcaaacatttggcaatatttggagatgttttcgactggcacgacctggatgtggaagaagagctaccgtcctgcaatatatttgtacaagtgaaaatggagactaagtcctcaccagcagaaagaatcatactaaaagatctaccaaataaattcttcaaaattacctacgtggaaactcagagataaagagtaaagtaagaaattcaaaaacttgtaaacaagttgtgtgcatttacagaagaatctgtaatggttttcacaaaagtaaggatgtgattctcaaattacacatagtaccaaaatacaagataaaactttctgacgcatttggggatggaaatgtatttaaattgtttggaggccacgtggagtatttacaaaattgacccatttctaaaccagtgcttgtctagcattggaaatttttcccacatcaggagacatttaacgaagtgtggagacattttgattgtcatgacttggtagagaggtgtgtgctaccagaacttgataggtgaagccaggaagaccgctaaacacactgcaatacacgataccaccccacaataaagaattattttacccaaaatattaatagtgctatggtagaaaatcagtcttctagcccatgaattgaattgtcatcaaagtataaaataatgaaattatataaaatacaccctattaacagtatgtaattaagcttaaaaaagtaacacaaaggtaactgtgaaaaatccccgtctgcttgaaaattatatactgtacttttcaatagtccatgaaacaaagaagaaaagttgatagaaatcaatatatttagaattaaaaattgtttaagatgcagatttccaaatgtgcaaaatagaattaaagttgagttcggagaaaagagaaatatagcttttaatgcatctaatgggaaaaatacagaatgaataaattaatatttaaaagttagaaaaagtgtaaggaattacttcaaagaaaacaaaggaaaccaaacaataaagagaactgaataggactgaaaaaagtatgagttttaaactatttttgaaaaaagtatatgaatttaaaactatttatgattttaaaaaacagcaaaaaatgagagaattttatgtgataaagtatctacaactggggatcaaaaagtactggaaacatttaaaataagagagaaggcaaaacaaagcagtattagaaaacaggacatcatcatagactctgcagtaattgaaaagacaatgagaagacattgtagcaaattttacataaatcatgctgaaaattgaggtgaaatgaacaaatttctagaaagacaatttacaaaatatgacagaagtagaatatttaatcctttatcaaaaataatgaataatgaatctaaagttgaaacctttttatttagaaaactgaaggtatatgactttgctgctgaaatccaacaaatgctaaggcaagatataatgccagttttacataaaatattgatagaaaactctaataagtgataatacttccagatatataagttcaaaacaactttacagtttaattacaggaaaggtaaatcactgacaaatatcggtcataaataataaattataaacaaaattacttttgcagtatatacaaattatgctatatcatgatcaagtaggattcatttcagaaaggtaatattatttaacatcctaatatcactcagtgcccatgccaacattcattttgttcttccagattgtagagccaaactttaaattttctcgttatcaaaatgaactattatattcacgctgtcatttataagctgagcaaaatgagttgctcaggcagtcaag

SEQ ID NO: 469467 - DNA, 558 bp, Homo sapiens
ggtaatggttgactcacagcattcacccaggatgacagctttcgtgttcatcgttagtcaccacttatccattcatccatcaagtatggaccgagcagctcccttgtgccaggccctgggaattcctaaacttccagccagtgttggccgtgatcaaatttctcctcgagatcctggctgtgccttccacttgctaaatctctcagcccagctgtggcctcctgggatacggctcctccttacctacgagcactgtcactactgtggccacaccactgtcatgatggccaccactactgttaggagtatgatgatctctcctctggttattattaccagccccatgaccacggcacacatggttactgctaccaccattgctactggtattgctactgttattgctggccagagattatttaattccacttatcacagaatggcccagtgagaagcagactgtttgaattctaagtgggttttatgatttcagagtagttttaagacctgcaagagtttgagaaacatcagtgtttttgaaaatacaatgaatagaaa

SEQ ID NO: 469468 - DNA, 695 bp, Homo sapiens
agctccagccatggctaaaaggggtgaagccatggctaaaagaggccaaggtacagctcgggctgttgcttcaaagggtgcaagccccaagccttggtggcttccaccaggtgttgggcctgcagaggggaaatgtggcgttggagtgcccacacagagtcttccctggggcactgctgtgatcagagggccaccatcctccagaccccagaatggtagatacaccaacagcttgtgtagtgcacctggaaaagctgcaggcactcaacaccagcttgtgaaagcagctggaggggctgtaccctgcagagctacaggagtggggctgcctaaggccttgggagcccacctgtttcatcagcatgccctggatgtgagatatagagtcaaaggagattattttggagctttaagatttaatgactgccctactggttttcaaacatgcatgaggcctgtatcccctttgttttggccaatttctccctttcggaatgggagcatttatcgaaggcctgtacttgcattgtgttttggaagttaaatatataaagtcattttttcccattattagtgatgctatgtttgatcacttaagtggtcacttgcagtaaggtagtaattgcaaattctatcagaaaggtacattttccctttgtacttacaggtcattcttgcattgctatgaagaaata

SEQ ID NO: 469469 - DNA, 503 bp, Homo sapiens
cagcgtcgaaatgaaggtggctctatgcagccaggtggcagtggggctggagaaatgtggacagtttagagtaatgataaggagtcaatcaactagtcatgggcaggagagtcttaacaaaggctctgccaaagacgacatccagcaggtgcctatcttttggattaatgagcctccctccctcagcaggctctttaaaacagggtatagcttttcaaagccaaaatccatcctgactcacattctaccacatgctgagttgatgacaccagaggcagggattagagtgatgcttctacaagccaaggaacaccaggggccaccaaatgctggaagagacaaggaagaattctcccttagaggcttccaggttacttggaacctgggatgaatctgttaattactccatgcctcagttgcttctgataaaaataatggtagtgacacaggattttcttctcagtcattttgcaagatgcaacaccccacccaggcctcactca

SEQ ID NO: 469470 - DNA, 1092 bp, Homo sapiens
agataacacctaatgccaacaaagcagtgagctgtgaggattgagctgttttcccctttctctctctctctctctctctctctctctctctctccctctccctcctgctgccatgtaaaacgtgccttgcttccccttcgccttctgtcacgatcgtaagcttcctgaggcctccccagccatgtggaactgctgtaggtccctgagaggcacttcaatgatgaggtgtcctgcttggagatctgataccgcagaggggcaggagggagagggagatggagtctcatggcagcaatggggcccagctggggccatgcagggggaagaggatgtctcagcaattagcaaactgatgcgagtccagggggcatgtcacagacctgcagcagtgcacacagacctccataaccgtgcgagagcttcagggagacatccggaaactctgaaagtcattgagcctcctatggttcctgctctcctgccgctggctttggcaaagagagtctctttggtggcagcagtcgggggagaatggaggaggggggatgattctggccattgttggtactggattctgggagcagggcatggcagaggccagtactcttggaaggaggctattgatggatggcagtcagttcctagagcgctgtgcaattacagtgtaacaccagcctgtggcaggctcctggagaggaagccaactgcctcccttctggccaaaaaccagcttctgagatatgggtgctcaggtgggaaggagacctgggcccctggcaggacgatgcttcacagtaaagaacgaaggctggaggccgattcctttagtgatggggacccgtgaattaaagaaacaaaagacacaatttgtattaatagttacgtgtatgggagttgagagaagagaagtaaaactcaaagaaggggtcagacactaggcctgaatatcattttgataaaggaaaggggctttgggcttaaagggataacaaattgtagggaaatgacgaggaaatatatggagggaaacaaatggaagaaaagggttattttaagttcctgtacctgctgctctggggaaggcaggcatat

SEQ ID NO: 469471 - DNA, 774 bp, Homo sapiens
gtgacagctgctggctgttttccagtactgcagggctccctgcagcagcagacgagactgtaatgcagaatttggagttgattgacacacatggtctcctcactgcggtgctgggttactcttggaatcagcaaatcagtggtcctggcagccaggacttctacccccgtctctaaaaacagtggaaaggggcaggaggagatcgaagagcatttggcaaatcctgtgattctcaaaaagcagcagcactgcctctctcaactcatctaccagaagcaatttctgcagctcacctgctacctccttaattctttcacgattattgctatctaccacaaatataagatattgggtatttgggaagtaatacttccggagaggcctaattctatcttgaccaccagcatcccatactgtgaaacgaatgtttttatagtctaccgcttccacattgcagccaacgttcatacggaatggtcgtcttgccagcggcatccaatccaaccatcagaatgtgcatctgcttcttgtcaaagaggtgggagaagaaagaggagatggtgaggcccgtgtctgatttgagtcagttgacatttggttaactgttttctattttcattggctaggaacactgatgttaagatatcctgaatccttgcatataggcagcgagtaagagatatcatggcctgatagcatggataaaccttctttaaaactctgatcttttcccttaggattttcatcttactgtgtttttgcttttggttgtgc

SEQ ID NO: 469472 - DNA, 532 bp, Homo sapiens
ggagtgttgctctgtcaaccaggctagaatgcatgattttgggggcccaagaggttttcctttcacaatggccatgtgcttggagtggcatctacaagccaaagaatggcagagattgtgggcaaacagcagaagctgcagcaggtatggcaagctccctcctagcaccatcagagagagcgtagccctgctgacgcctgattcccgaatgaactcctgtgatcctcttgggcctacccagataatccaggctcctccagatctgtcacaaggtccacaatgtggaccacatctgccaagttatttttgccatacaaccgaacatatccgcaggttctggggattaggatgtggggtccttggaggccatcactctgcccaccatgcagacagacagtacttgcacagcagccctgttagtgaggccttgtggtgtccttgttgagtagaggaggaaatcgaggctgagaaaatgaccactaagaagctaaggcaggctttgaatccgcctttcatggtggaaagaacacag

SEQ ID NO: 469473 - DNA, 845 bp, Homo sapiens
ttgaaataaacaagatccctgaacatgggaagggatcagagaggcaacagtcgataccaacaagccatgtctgaggcttatgtgatgcccgtgaagccttgtcgaacagctctagaaatgaaagcactgagtacagactgggaatttttgcagcagtacaggcagcctctttccgcagcagctccggtgcttggtcaaaacactcatgataaaatgcccttgatggaaaagggtgtttgtggtaattcgttacagcagcagtgggaaacctaccgaggaaccaaagtgggaaaagatgaaatagccaatgaaatggctcaaagagtaactggagtgagagtgtgcccaggtgtcttaggcggaaagctggtgaagagaattgtccggactgagaggcctagtagattcaaagcacatcttaaccacagaaaaccatcagttagaggccagagaatgtcagacctgggaggaatcctatgaccatatggtccagcctctcatttcttggaaatacgctcttgacatcatgtagcgcctggttgatggagagtgccttagactcctttatgatgtgtgctacagaccaaggtctcagaggggtcaagagcttgcatttcatggacttttgctcctgttgctgcctgataaatggttaattgctccttagtcatttcaaaagacctatcttccagttcacaaattctttcttctacttgatccagtctgctgttgaagctatcaaatgaattttttatttcattgattgaattcttcagatccaaaatttctgtttggttcttttttgatatctatctcttttttgaatttctcattcagattattaa

SEQ ID NO: 469474 - DNA, 694 bp, Homo sapiens
ggcctggaatttccaaacaacattcttattaaggggttgctgtgcattttggtcattggcagacgcacggggacctgtgttagaaagcccagcaagcggaaaattgagagctgacttgccgccaactacaattgaaaacagatgggtatatctgagccatgttcacgtatcttgttcattttctcattaaaaaaattgctgcactatttttagtctatgactcatttttcggcaagaatcacctgcaagtagatcttaattttctgctgaacttcagggaaaattcaagttcagcatggccttcaagaactttgactcctacagaaatggacaaaaaggttggcaggtgtcagtctgatgaaagggctgagatcttgactgcccttgagggatgccagtatgagatggctgtggggcaggctgtggctgcttgttggagggaggcagcattagcttctggttctcaggcctttggactccaggacttactccagcagttggcagaagaagaggtagggggcattcagatgagggctgttgtctgccaagatcaaagcagcgctgcacatgctaaagagtctaattcacagaccctcggtgcttagttgtagcaccaacttgaagcctatttggtcagaagtggccactcgagccgtcttagggctaggcaagggcttctttgtttcagaaagca

SEQ ID NO: 469475 - DNA, 708 bp, Homo sapiens
gttttgttttgagttaactgtgaatgctatttaagacatctctgaccaccatgtgtaaaatgacaacatcccctaacatgaaacaccccaaagccccttgctctcctttattgatctctgtgccccatcaggaatgggaactgacttggcaattacttggtgtcggtgtcttgttcatcgttgttcctacaacctatggagggaaatgggaacaccccgctgaccatctccttctgcctcaggcactttcatggagacagtcgagggctttggggcctgtcctacctggtggtctactcagtagagccatcgggctgaaaaggagacatctgttaaggacgtgcagttggaccttttcaagaagctgttggaggtcagggtctgagttgagaaaggagcttggtcctgtaagtcatcgacactcagttgcttctggatcccatcctcaccccctgcaccgcggggtccttctcagggaacgggccacttcccgatgctccctgggctgccatcagctgccatgaacactctgcttagtggaggctccgtggcctgtgaattagcatcaacctgaaataacaagcaggggcttcctatgagtcagccatagtctgttcagagatgctgcctaaagggtctaaatccaaaggcattaattaatttgttcccagggtccacagcatggggagctcaagcccttccatttcc

SEQ ID NO: 469476 - DNA, 1100 bp, Homo sapiens
ctgactaatctagacaagatacttaaagaactagcgtgttgtgatataagctgtatctgctttagggggcacccaagcccaggcccacgggctcttcagttagaaggtgttgagtgctggcaggactgagttcttcccttcaagacagcaggttcccttctggcccgggatgtgtctagaaatgtcatccaggcgccaggtcctggatcaaagccctcacaactgtgactggtatcctatcctgctgtggcttagccggtatccaagatacaagacaaagtcctccccacccttccctctcctctcctcaagcagaaggaaggggtctcttttggagccacaagctgtgcagcctggggttaggggaggggcgatgccagtactcccttgtcttccccagcttgtgtctcagacagcactgagttcagtgcttcacaattgctgtgctctccctcctctagtgcctagagatgctctccacaccacatcacaacggtttttcctgcctctgaagttaaaaccaggtctgctggagtttgctggaggtccactccagaccctgtttgcctgggtatcaccagtggaggctgcagaacagcaaatattgctgcctgctccttcctttagtagcttcgtcccagagtggcatctgccagaagtcagctggagctcttctgcagaacgtttaagtctgctgaagctggatccacagccgccccttcccccaggtgctctgtcccaggcagatgggaattttacctatcagcccctggctggggctgctgcctttctttcagagatgccctgcccagagaggaggaatctggagaggcagtctggccccaggtactttgccatgctgcggttgacttcatactgctgtgctggcagcgagaatttcaagccagtggattttagcttgctggactttgtgggaatgggacccgctgtgcgagaagacttggcttcctggcttcagccccctttccaggggagtgagtggttctgtctcactggggttccaggcactgctggtgtatgaaaaaaaactcctgcagctgtttatctgcccagagagttgcctagttttgtgcttgaaa

SEQ ID NO: 469477 - DNA, 2114 bp, Homo sapiens
agtggagctgtgagaagagggccaccatcctccagactccagaatggtagatccactgacagcttgcactgtgtgcctggaaaagccacagacactcaataccagtccaggagggggaattgagaaccatttattgctgagaaaatacttcaggatgactgagagctcacctaggcttcatacagcccctgatgctgaaggaaatatcctaagggcaaacttcaaaggcaatggaacacagagaggagaaacaaagatgaaggtgaaaacaactgacattgttgccaaaggtacggtcaccgggtcctcgacgtcccactgcaacagaaacagcacacgagtcgttgcccactcacattacagtttaaagcggcttcacgccgcgtgtgaaaagaaacaaatagctcaaagtgagtggctagaaaaggctaaaccctgtggtatccaaaccaaaaatccttaccttgttttcattgaaattagcaataactactccaacaaaaagggtcagtccaatcatgcaacccaggaatacaaaaacatgaatatagattccatggatctgcataaaggaaaatatggttattcatcaaaacaaatgaaagctgctcttgaagtgttcaaaggattcgatgtgctcgcttaccggccccacacgatgaataataacatctctcacttccacccagcctttcaaggagagaacttcaaacaacgccagcatagcgtttcccacattgtcgaaattaaagttccgaggattcgccctgcgattccaatacaggaatgttctgtgaaattccaataagcagcacccgaaggcaaatatctaggctaattttaaataattaagattttgataaccaaacactggaaaatcatggactatatttcttgaatttaatgaagaactgagctccggaccactgactagagtaggccccttggagcctatttaaattatattttgatcattttttccccctgctagctcatttctcaaaatttaaccctcaggacaggcaacgctctagggaaaatctggttctgtacttttctaccatcttttatgttttttaaactatagagacaatcacaagatgtgccttcataagttttttgaatattaaatagatgaggatataagaagaaaacattaaactgaaactgatttgttcttaagggcttagggctgattagtggagacggtctttaatatagtgcaaaagccccactcagaaatgcatattttggaattctgctttatatttttttatgtatgaaagtacaaatatattcttttggatgcttccaacaatctttcctttgggatgtttccactaaatttcatatattttacagtagacagaagttataaggattctacagatgccacagtttgcttgaataaggattttttacaagcaagtgaaccggttctcagagccggtgttggacttccttacctgctcattttcttttgtagaagtgctttcttagctgaatttgcagccactgaaactactgttatgttctagatcttctagaagttagaatatgtgaaaaatattctaactaaaccaagtaaaacaaaatgtagcatcaaagacttcaatagttggaagaatttatcacattaaaaaaataagtctttttcagttttaatcatgtaaagtgttttcttatgctttcttcatgctagcaaagttgcaaagtttgaaactttacctgtaactacggagtccttcaataaatcccaaatgccatctattattgtcatttttacctgctacccttccttgaattgaaaaggttgtcattttttctggttaatttgtgaaatattgtaatcttgcctgtccaattcagaaaactaagacattagatctgaccacataattttgtcagttttttacctcccagaggaggtgctccaaggccccccaagatcaaggtagggagagctgctcttcccttggggaacatgggggcaccctgaagacgtgactgagcgtctgcccttggatgtggaaatgcagaaaaagactttgtccaaaaacggcatgctgtatcttacacaaccatctctcctaaaagaaatcagaaacgtcgta

SEQ ID NO: 469478 - DNA, 544 bp, Homo sapiens
cattcacactgcaaggcagtggctctggacaggtgtggggaatgaatgaaatgggcattcaagatctcttcctagttggcgatgataaaattactccagagaagagaactaaggagaaaaccatcctggatgctgacttcggcaaaggcttcaatgaaaaagtggaggttatactgggccttgaaggaaggctaagattcctagaggcaaaggcggtactgggtgaaggactgaagggaggggaggtgagaaagaggaggagaaaagggggaggtgaaaaaggaggaaaaaggggaggcaagaaagaggagaaaaaggggaggcgagataaagagaaagaagcctggttattcgaaacagcagatcttactttttggtcgatgtatttgttgtcctcaattgctgagcgtttggagtggtcgcaggaggaggaagaggtggaactgtaaaatctgaaggaagctttgagattttcaccatttgaggtctgtttggaaatttttcaaagattcgcaggcgtaaagggagcttttctttggtgtcc

SEQ ID NO: 469479 - DNA, 595 bp, Homo sapiens
tcttctgagacagctccttaccaggtatgctagagcccattcactggatgctgccaggcttcagtccctttgggaacctctcttgggcttgcaaggcacaacaagctataggaggagaggggctggtggaaatattcaaagaggaaacacatgtaaaagggaagagtgtgttggaccatgtgaagagccacaattatagaggtcagcagactttgaaagccggccagtctgctcatctgccatcctggagggtctccaggaggggactatccagattaatttccatgaatggtgcccgaggccagttggtgacccacaccagctgccagagctcccgaggctgcagacctgctttgctgactaaggatgccccaggccctcattgccagactcagccacctcccttgagaggtgctgcattccccacatcccttcccacagtatctatcacgcattgctagctcaatggctccacttgtctccagacactggcttccatttcctctgcagatgcccatttcatggcctcatgtgacccttctcccacgtcggtcctcagaaatgtgggccaatgggttgttttaccctctatgtc

SEQ ID NO: 469480 - DNA, 2466 bp, Homo sapiens
ctttctctacaagagaaattctaaacaaagagcatttgtctatcacaaaatgttatgtggcaagacgtgcctttcgccttccaccatgactgtgaggcctccccagccatggggaacctctgtgtgcttcaaccaccatctggaccagttctgcaacacctatagaccctgcacttacattgtagctgtgttatctgaagcactaaaaacagtgagatggtcaatagaaacccatgattcaactggatatcttgataggccacctggaattaagtcttcaatgaacaatgtttatagaaaagcggattttggtgtcaaagcaaaagctactgcagaaataagcatctcttttgtacataagtctctgcctatctaccagggtagtttagagggattatggcttggagaaaatatagcaaggcctggatttcagccccatgcattccctcagccaggtgtctgtgcaaagcatgacttgcacaatccgatatagtgagctcatgtgtggatggctttccagaatgttagtttgcatgtctactagcggtgcaccgtgagcctgcctcacccatcctcttcagtgttatagtctatagtctttccagttgaaatgatgaaaaatcatatctcattgttttgttattttaccttttcttgcttacctgctttgttccatttagaatttagagtttggtatcaactgaagacttaggtcattttattttgaaaaaaatagctgtccaaatatttcatcataaccattaatgtttactgtatttagaatataaggttcaattttgatttatcttttctgtgatatgatgtaaatgttaactcttgcacaaaatttattccatttttagtatcttccccataaaatgcacttaaatagttaaaagaaaaagtcttatttgccaactgccactattacagttcttttctattatgtattagtcatattgtaattatttctgcaaattaattttggaaaaccattttatgccatccacaaaagtaacatgttaagatttttagtgacatttcattaagcatttgagttaccctgtgagtaactgacatctttgttattgtctaggaagatggcatagcccttttcattgagttctaatttgatagttcgcattaaatttatgtattttctcttataaaggctccatacatttcatgcagaagtcattcttaaaagttttaaatatttgggtaaccattggctctgtgattttccctatttatatccaaatttgttattgccctacatagataaaatatctagttttgtacatttatcttgtatttggctacatttctgaactcttaagaattctaaaagtatttagttccttctggattcatgtatgttgctattactttgccaagcttcatgtgaggcataaaagaagatacactttcttttctcttgaatggttttaacattggtctacctctaatgaaaaactatttcccagaccataggcttgcctgaggtttgcatgaacctggggatgtggaatgattggcagaaaccatattaaccagcttcatatccattataatttcaaccaatgagtaccacagagtgagttatggtgaatcacttccacagaagaaatttcctgagagatttcaatcctgttatatatgaaaattgtcagaagtaaacagcactaggtcaaaaaagttttcaacttatgtcagctcttttagcgcatacatgagacgtattttgttcatttctgtatccctagaacctagaacaggactagaaaatagtagaattcaacatctatttctttattgctgttgaatataaatttggagaagtcaaattgcctataggagaaaaataacctgatactgacaaatctataggctttggagtgtcggcagcgtctactagtgtgtatttagagggaatttttgagatgactcaagattttgagtggcattttattaagcatttgaattactttgtaactgacatctttgttattgtctagaagaatggcatagcccttttcattgaagtctaatttgatagtttgcattatattgatgtattttctcttatgtgggtttcatacatttcatgcagaagtcattcttaaagagttttgaataagactcttatccaaaattccctctaaaaacacgttagtagacattggtggttgtctgaccaattagttctctctccccttggccatgtgctcagggcaagggccaatcaccaactcaaatgaacagccatgttaatgctgtttccgccttcagtagttgtgttaggcataggcatatgacataattttgttcaacaaggcttgtgaggtagagggatcagaccttctgagaaagatctttttcattcttaaaaaggaacgttaagtcagagacatgctttacttcccagaggatattctgagtgagttttatgagttggtgaggttt

SEQ ID NO: 469481 - DNA, 2859 bp, Homo sapiens
cgcagcgaggatcaggaacgaaaatcttgaatcatccatttatgcaaaaagacacatcgcccgctaacgagtatgaaggtttgagtctccaaatgaaacgcagacatcgttctttgaagagtcaaatcattcattttgatgttgaattccctaatcaatatatccaagaacgattgatgatcgatgccgagcaacctgtctacaatattcacaggttaaggatcttagatggcgagccatatgttttagagcatacctttatgccagtccatcttgtgccgggtttaaaaaaagaacatttgttagcctctatctatgatcatcttcatcaagaattgaatgtccattttgcaggggcttatcgtgctatttctgcagataaaagtgatgaatatgatcagcaatatttgaactgtgcagaaaacgatcctgtactggaagttcagcaagtcgtctatctcaaagatggacagccgattgaatattcttccagccgaaaccgatttgatgttcggaactattctgtgctggatgtgcgttcaacttaaatgaagaggttgtgaaaaagccgtttaccaagagattgtgacagtggtaagcagtttccagtaacaagaagagatcgtgaaatcacattctattctatcctaagcattagctcaaaaatgaaaaaataactcagcataaaaagacttatgacaccgtaaatgattctaaagttagcttttaaagctagttttttgaaatcgatacagctagtcgtaagtctttttattttatgatttgtcaaattaagctagaataaaatgcttcttgtacatagctcaaaaatatttcgattggtgttctgtaattcaatgattttcttggaatatgattacgttgattgctgacactggaaataaatgtctgattcacttctctaaaatccattgatttcggcagtccattacgacgcagaatcccgttagaattctcgtttaatgggcgttgagaaggtgttccagggtccgcaaaatatatatcaatatcatgttggttactaatggctttccagttagaaaattcttttccacagtcaaacgtaatagatttaaagaagtttttagggaagcgagaaaaccattgattaagggcagtttcaatatctaatgccttacggccgttgggtttaatcgtgataatgactttagataatctttcaactaaagtaatgacggcacttttatgatgaatgccaacgatcgtatcaccttcaaggtgaccaaactcagaattgaaatcaggataattatcaggtcgatcatggattgagcgctgatactgttgttttccccgtttttcctgatggccattgggttttcttttacctttcatcggtagtgtgtcaatatcaaatattcctttagaaaataaacgataaagtgttctcataccgcatgaaacaggcctttcttttcgcccgataatgacgtcaggcgtccaaccaagagtgactttctctttaatgtaatctacttcatgagcaggtaattgaatgacttttctaccacattttttcttattttctttatactggtgccaataatcaagagcagtcttgccttgcttgaacttattgactacactataaatagtttgtatagcacgtcccattcggttagcgatttcaaccggcttattatgttgaagataatatgattctatcattgtcagttcgtctatggtaagatgtttgtaggtcatttatggtcacactcctttgttttctttcgtcggaaatacaatttgagtgtaccattaaaatgcccttttgtttttctaacttgattgtacaattcgcgttatttaaaactttgcaacagaacctgtggactgatcagaacgtccagtttgattcagttcaacaatcatttgtttaaaattttcttcatatcgggtcataaaaattcatcctctcgtagataagtttaatttattcttgtctctacgaaaagctgtctaagatttgatactaacaccaaattagcagtgtcttcatcttccaacaaagcaagagcaagatttaatttagcattttcgttctcaaaactcgttttaaattctggttcttttaaccttttttctaaataatcatcaaatttaatggttggcattttttctcctagtagcaagctatttgtatttttcacacggaatatggtatactaaaggcaagaaaaaggagctatgcttgaacatagcaacaatgatagaaccgttaaaaagacggtgacttttgaataaatgttttgaaccatctaattccctgccaaagtgattagatggttactttatgtccttatggtcaattatcagcaaaactaacgtcgcaaaagcgatcatcagttgaattgcttcaaaagttgacacttgcttactcccttctagggataaagctatgaaccataggcatcacccctttttcaagagattagccaccatcttttcacttttctactcttctattatatcatacgctattagctaatttcttcaataactagtcttttctctaataataatttatgcattaaattatcagctttattttcatttccaatgcttggactataatctttaagcattgcactaatctttttagacaaatctaattccatttccaaattagtaacaccatcatataatctataataaaaagctaatgttacatcagaactatataaatcataaaaatcaaatatagtttgaaaataggaataatctaatttactcaatgaatgtccaaaaaaagcaatttcattaatttcttcttttcttggcaaaataagctcatcactctttttgctatagaagttt

SEQ ID NO: 469482 - DNA, 716 bp, Homo sapiens
tcttggagaatgacagtggattatcctaagcttaaccaagtgacttcaattgtagctgctgtaccagatgtggtttcattgcttgagcaaattaacacatctcctggtacctggtatgcagccattgacttggcaaatgcctttttctccattcctgtccataaggtccaccagaagcaatttgccttcggctgccaaggccagcaatataccttcactttcctacctcacgggtatatcaactctctggctttgtgtcataatcttattcgaagagaacttgcttgcctttcgcttccacaagatattgcactggtccattccattgatgacatgatgctgattagatccagtgagcaaaaagtagcaaacacactggacttattgacgtccctgaaggacagcagtgaagggaaatcttcccagtgggcagaagtttgagcagtgcacctggttgtgcactttgcatggaaggagaaatggccagatgtacaattatatactgattcatgggctatggccaatggtttggttggatggtcagggacttggaagaagcatgattggaaaactgatgatgaaatttggggaaggtatgtggatggacctctctgaatggtctaaaactgtgaagatatttgtatcccatatgagtgctcacaatgggtgacctcagtagaggaggattttaataatcaagtggataggatgaccca

SEQ ID NO: 469483 - DNA, 601 bp, Homo sapiens
gaacccctatatacctttgttgcctcacttgtataaacaggatggcacagtgtttgctctattttgtttggattcttttactcagtataattatttttagtctcatcttcgttgagtcgtattccactgcatcacagtttctttatccatccattcctctgttgatgggcattagagttgtttccaggtttcagctgctgaagacaaacttcaacacgacttttaaggcaccccttattttagaaagcacctcgggtgccggcgccgctccatgtctcttccattttacagacaaagaccattcagagatggtcatcaacaagaactgcagtgtaggtacacaagaggaaacatgggccatcgtcctccacctctctctttgcatttcagtgctgtgcattgataccatgggtgtaattggatggatgcagtaaatgtgaattgtaggtagcggtatcaaaattgccatacgtggcagactctgtgctaaatttgtgcattctatagtttggtgtttctatgcaaggtagcaactaagcttcatttcctgaaactcagcaaaataaataaaaaaacctttctgcataggaaagcatttcca

SEQ ID NO: 469484 - DNA, 4768 bp, Homo sapiens
tgcctaactttctgaaaatgctgcctaaagcatcaaggtaataatgggacaagtgtgggctctggctcattccaccttggaaccttttcacactgatgatgaggaggaaggagagtataacgaattaacagaagatatgacagagcaggtttctttcccacctaaagctaaagtggcaaaggagggagaggtttgtccctacccttctgcaccccctcactattttgaagaaaaagagtggcctgaccctccagatctttcttttcctgaggacactaggaaagggaaatcccctgatcccttgcacttcctggagccacaacagttggggctggacctggcaggtccacctcctggttccctgatggcagacacaaacaccagtgccaagaaagaatacactgggtggccaccaggcacccagagggatggaacagagagggccttgatgcactacaatctcagaggagccggctggtgcaccaatgacacatgccaatcagttccaggttgcgaagccactcctggctgcaagtcttgccacacagggaaaactgccactatagcagctctcctcctgcctcaggcaagcaagagggtagatcacaatttcagtgcccactgctcaggcactttccatagttctggctatggaggtccctaccccactccagagaagattccagtatgacaattatatgatgcactttacccttcttagtacttgatttactctatttttgccaacattgtatctaagtgaaaccaaaggctttgcttttgaatctctcccaaagttagagtaaaagggctaagataaagacttcactctctatgaaacaatgttctttcagtactgttttctttcttcaatcatatttctaagaatcgtgcttttgaaatttctaattgaaatagtaaaatgtgtttcagctatttttaagaaaaaatatagtactttgtattgaatattatctatatttttgggttcgatatttttcaatgctagattaatgcgggaagggtagagagagtcagaaaagaattaacgatgtaaaataattcataatatacattgtttttcctagttctacttttgtcacttttgatactgaaaggaaggtgtatgctttcaaattcagttatacttggagtgtaaagctgttgcagggttgaaaaaaagctatggtcactgctggttgaactctccataataccaagtgctattatatgactggtgatatttttataataatataactagaagttgtacatgcattttatctatgtttaaagtcattactctggggtcctgtgctcattatgtttccagttaattgactgcacaagtttctaaatggatcaaaattcccataaaacctttttcccataaaacttttaagtccaaaaatcaaggtttgcaaaacttggtttccttagtcattactaactaaataattgcaatgagtttcatgcaataagggctatactttcaaattagtttgggggaaaaaggccaaatagtaaattggatgtttgcatattaaaggcatagctcaatcctgaagaaaaagaaatctgcttatacttttttaaactcagcatttcataaacttgtttgataatagatacctttataaaacattatttaatatagcatataacatggattattagtttctgcagctcacagtttgaggaacgttgatgctgcaactttccagcaaatattgtctgcaaattacctatatataaacagttcaatattttaatattttaatttacaagataattggtgttaattatctgcaagcgaagctcagaatactaacttttaaaagtacaacttttccaagttttgacaaacataggcctcacttatcacttattaaactagaagaaaaaagacatcatagacacaagtgagatcacatttcaactaaaaagtattaccttttaaaggtcctacacaggtgcagtggggattaaattccaacacttgaactttgggggctgtcaaaccatagcacccacgaagttctcaaagagggcttctttttaagatgaaataattcaaggatggatattaacagaaaaaggggccagaagagggaaaatgttaaaaatgtagaaagcaaaataaacaaataatgcaagctctttgtaagggtcaagaatgagttgaatgtaagtggtaagtaaactcatttccagtgaatatacatcaatcatatctttggagagctacttggcagtataaaacaagaacctcaatattgattatatctttgaccaataactctatttttgttaatagaaactaatccaaagaatagagacttttctattgacaaagttataatcaaataaactgttgtcaaatcacattgttatttgtaacaaattccaagtgtctttttgctacaaagagaaatactcattttttaatattttgttaatggacaatttgttaatattaagtaatactgaacaatcaacattttggaactttaatcaattgtactttcaacagaaatataatagcgttctaatttaatactggtttctgcatttatgtgaaaataaatttttaaaggggctgtcaccctggatttaaagtaggtcttttaacatttttattcttgttctaattatcactctaatattaattattatgtctttccaagcttgtcctaacaatgcaataataatttattaatttatctttatcctagggattcaataatcttaatagacttaaaaaactgccatatcatatccatctaggttgcaggatctaagttttctacgaatttactttttattaggacagtgcatttcaatgacatttactcatgaactactcaggctgagttccttggtcattaggtcaatatttttacatcttacataggatttgctgccttttatataaatcttattttaatgttttaaagtctgatgttttactccatttgttttaaagatttacatggctaaaagtacctaatccattgttctgtcaacataatatatggccctagtttgttggtgtaattgaaaacctctccttggtaagggaataaataggatgctgtgagtcaaatattttatatgacaacatttctagataaaacatttaaatattttaaagcactaaatattataattaaattgttttcaaatgccttttaatatttagaagatacaaatatccacatgcacaaaaaattgcatgtacaaatgggtttgttgcagcattaaatgattaaatagtatcattatgctatttaataccatgtaaccattataaaatcagcaggtagatttatgatatttacataaaatatccctacagtattctaccaaaatatacatcaagatatattttacattcatacagtgaaatgctactacacaataaagaggaatgaattattgatgttctccacaacatgaatgaattttaaaatcagtagctgagtgaaagaagccagacaaaaagagcacatactatatgattcatttatataaatgtctagaaatgttaattaatctgtaataaaagaaggtacatcaattattctctggggaaggtagtggagggagaggagatttatgaagggtaaaggaaatttttgccgctgatggaaatgttcactatcttgattgtggtatgtacatatgttaagactgattaaattgtactctaagtgtgtgaggttggcactctttatacttcaataagattagaaatcaaaaaaaccttaagaagcaaaacactttaggatgtttagatttaggtattttcctggcctaaattccaagagaggaatctttgtcacttaggtacaatctactaaggtatctactctatttagaaaacaatatcatggaccatctgtagcctgcagttaactaaaattacagtttatgatggaaatagccaacatgatctgatgaaatgcatatcattggatcttggtggtagaagcgtatttattcacatatataacttagccacatagaagggttattatatttcattgtaggggggaatgaatggggtcttaactgatcacaactaactaagagctggaagaggtgatgttagcagtcccattatcagattgggtaagtatggtaaaactgtaaaatagctctataagtcccttcaaataaatagttgaagttaactattacttgatgaggcttctaaattttctaaattcacttactaactgtagatcaagcctttccaagattattattcaaacttttgtggcttccaaactttttaaagcaatagaccctttaatcaagcaaaatctcactcaaaacaccaacctcaatcatcacacttgttgtaaataaaagcagaatattttaaccatatatttattgtataagattacatttttaatccttgaaatgagtaagaataatataactaaagaataataaccacaagatttgcaatatatggtttgtggatgattgttgctgatatttcagcctcagcatctatttctgtatcttgtttggatggcagagtttttagaaattcaagtttcatacagttaagcagtttcaaatagtatttttattagttctcattgaaagcagagtatactctccaattaaactggtcaagaagcttcagatgatgctgacaaatgtttgcctctaaggtgaagcactaatgtccaacaactgaattcactgcttaccaaaaatttaggcaagaagcaccaaatatttaaagtac

SEQ ID NO: 469485 - DNA, 737 bp, Homo sapiens
tctgcagcttcactcccgaagccagcaagatcatgagcccaccaggaggagcaaacaacttcagatgcgccaccttaagagctgtaacactcactgcaaaggtctgcagcttcactcctgagccagcgagaccacgaacccaccagaaggaagaaactccgaacacatctgaacatcagaaggagcaaactctggacacgccacctttaagaactgtaacactcacctcgagggtccgcagcttcattcttgaagtcatcagagccctcttctccaggtctgctggagtttgctggagatccactccagacccttttttcctgggtatcaccagcagaggctgcagatccaaagattgctgcctgcttcttcctctggaagctttgtcccagaggggcatccaccagatgccagccagagctctcctgtatgaggtgtctatgcactgcccagagaggaggaatctaaagaggcagtctggctacagtggctttgctgcagctgtggtggttccacccagtgtcaacttcctggcagctttgtttacacttgtattagcccattttcatgctgctaataaagacatagctgagactgggcaatttacaaaagaacgagattacgagatttaatggacttaaaagttccacgtggttggggaagcctcacaatcatggtggaagatccccttcattcttttaaattattttaatctctttgctaaatttatctgatac

SEQ ID NO: 469486 - DNA, 2527 bp, Homo sapiens
caccagtaatgcatgttttctaaaccaagaattcttgaggttaaacctacggttattggaggggtttgaatgtctgtggatgtgcgttatgtttgtgtgggttgcatcttttttagggaactggggtattggaaactcatccaggatatgtactcatcaatacaacataaccttgaaagtgaaagaagagagtgcagaggcagaatatctgagagggagaggcagagggcttgggctttctgtgtctgcatctgatgactacacagggaggacagacagcaaggggaagaacaccacagacccctattgctcatctagtgagcatgcagctagaaaatcaggggaggggaatgaagagagatggcctaagcatatgggaactcatggttttgtttccaaatatagtgatttggaatttaaaccagattctcttttggcagcttcttactacagccccttggcaaatgatgcctgtcctctaaaaggttgctttacacttttctccacttatggcttctagagaacccatccaggtcttctgttagagttccactacttctgcagattcaagtaaccatatatgcatcctttccccacccctactacagcacagctagaactgaatgtagttcgtaagcaaactgttccaaccatagccttttttttttacccttccccaaatgaggatgacatatcaggccccataagtcccaaaccacacagaatgcttttttaactcgtagtctacctgaaatctccccacttagcttgaaatgcgaagggaacagcccccttcttttttattttcttcttctcccatggcggcttgttatattagcatctctctctgaagagatttcctgttttttttagcgtacactcttttataaagtagttcttgccaccttttctttttccatatttctttgcctattcttcacacttgtacacatacagtctgtccctttgcatatatagtttcaaatcagctagtccagtactgtaaaaatgttgttgatattctgtatggaaagttataaatttatatttatttttgaataataagaatcttcataattttaagcagtcctgtttatgaatatggcatgtttttccattcatttagatctttcatgtacttcagtataacttcataatttttaataaaagtcttacatatcatttagtagcttcattcctgtgtgctttatagttttaggtttatatggaatctttcaaaattaactctctcacttaaacataattgtaaattattctgacattgaaatattaatttatgctgaagaactttgctgttaactgctttatttctaataatttctagagtctctaagatttttctgtccttcatagataataataaatttgtttaattcttgtaccatgcatttattttttcagatttattaaaattggccagaatctgctacccatcccctcccttcaaagttaaagggaaattatgctactgagtatcattgtatttctgattctattaaaaatatgtctgaaatattacctgtaaattaaatgacactttgagtttgtttattgttatgtttgcttcatttccttaatcaattaaagattaatttttaacctgttttgctaaagcaaaattttttaccttactttttgctaaggtaaatttttcttttgatcacaaatgagtttttattaggagtatttttttctaagttttaaaatatgatcatatgctttttctttaaatatatcaatttacattgtgatgaatattgtgttaaattaatcactttttttacattaatacactttacattcttgcaatggagttttattgtcttatgcatagatatattgataaataggattgagcaaaatgtaaaaataattgtgagaagaaaatgagtttaggatagctggctttttagaatattgtgttctatacaaattctctcacaactcagtctccctccgttgttgcattaaatatgtatctttgactttaaaaatatatatttatttcaaatgcataaaaccattctatataatagataacccatttttattcaagcacttgagattgacataggtcaaacactcaatacttggattttaaacttggatattgattatggattagccgtttagatcattttctttaattgcttcaattggaataactatgtatttttctctatggatatcagggaattaaaacattcagacaagttataaatatacaatgcagttgcattatgaaggcagaattttatgattatggtaattaatgaaatatactgtcagtaagtttgaccagcttcgctgaacgcagcagcatttgccagggatagcatgaccatattagcagccttgctacccactcattatctaaaatataaggcttgaatatgattcatacaattaattgtcaatttcttccaagttatttttatttatatataatgttaacagaagtataactgttctacctataaattttctctgaaactcttagcatgtc

SEQ ID NO: 469487 - DNA, 1052 bp, Homo sapiens
caggtggagctgcctgccagtcctgcgccgtgcgctcacattcctcagcccttgggtggtcgatgggactgggctccctggagcagggggtggcgctcgtcggggaggctccggccacacaggagcccatggagtgggtgggaggctcaggcatggcgggctgcaggtctcgaggccggccctgtgggaaggcagccaaggcccggcgagaaatcaagcacagtgccggtgggccagcactgctgggggactcagtacaccctccgcagccactggcccgggtgctaagtcccccattgcccggggccagcagggctggctggctgctccgagtgcagggcacaccaagcccacgcccacccggaactccagctggcccacaagtgctgcacacagccccggttcctgctcgtgtctctccctccacacctccctgcaagctgaaggagtgggctccggccttggccagcccagaaaggggctcccacagtgcagtgggggactgaagggctcctcaaatgccaccaaagtgggagcccaggcaggggaggtgccgagagcaagcgagggttctgaggactgccagcacgctgtcacctctcaagagcacagtcacttggacctggagacagagagagttatgttgagaaatgcaatcagactacaataactctaaatggagggaaccaagaagatctttgtaattagcacattaatcagaaatgtatgagagtcatcttgaccactgtcaccagcattgatgttactaatcttttatctattttcccatgtgatctatggaaattatttaccattgattagcttttccctgataaataacatggttgaacatattttcatatatagtacttattgaacatttaaaacgacaatcgctcttattctttatattcttgtgatagcctttatcatcttttctatttggttatggtcttttacttatgaatttgtagtaactattggtattttaaaatatcattccacttctttttttcctgaatatgtttcagacactttctcctagttactct

SEQ ID NO: 469488 - DNA, 473 bp, Homo sapiens
acagaccttttcatgcccacagttcagcggggcctgagttcttgtcctgtgtccaggaagaatgaggttacacagacaactagagagcccctcttctgcaggtctgctggtatttgctgggtgtccactccagaccctatttgcctgggtatcaccagcggaagctgcagaacagcaacgattgctgcctgctccttcctctggaagttttgtcccagagggtcacctgtcagatgccaaccggagctctcctgtatgagtgtctgtcaacccctgattggagggaatctcctggtctgtgggttgcaaaaacggtgggaaaagtgtagtatctgggccctgtcctttacggcgctgtctttcatggcactgtccctcacagcttcccttggctagcggagggacttccccgaccccttatgcttcctggttgttttattttttataccaggggttgtagcaggaagctctat

SEQ ID NO: 469489 - DNA, 564 bp, Homo sapiens
agactggctccagtccctgacagcccattatggtgtcagcactaggccctccacttctggctgaagccctgaaaagacaaactatacctgagggacccagacgcagttacagcagaaagccaggacacagtgaaggtcttcccactacatgggtggaggtcacattcacacccatgggtggcactgctaggggctgccaggattcgggaaaaaaagaaaggaagaaaaaaggggctgcctattcactctcagtcacatacccctggtttttgctggaagagagacaaactaagggatgcttttcccctcttccagatggttactccaaactatccatgatagaccagggactggatgagaatcccatcgccttcctggaaaggttaagaggggccttggtaaagcatacctttctatctcctgattcagtcaagagacaactaattctaaaagataagttcattactcaggtggaccctgatgtcaggaggaagctgcagaaacagcctatgggaccagatattactttagacaacctcctgaaagtggtcacctaggtctttt

SEQ ID NO: 469490 - DNA, 700 bp, Homo sapiens
ctcccacccctgaatgccgctatggggttagagcccagtgcccaactcctgcacctgtccaactgcatgctctcccttctgtatgggaaagccttcttccttggcaatacttactgtctcagtgattggctttctgtgctacgagcagcaggactagaccaaagcccctgtgttttggtaacagattttggttctttgattgggaagacattgcttgtggcttggttgctgtgggccagaagtcccagaagtgctcctaagcagttgcccacccaatttcggctggaggtgagtttctgtctctctctggccccacaagcgctgaccctaaccacgttcctgattgccttggatgaactgactttgaaatttgacatctgcatcccaatagaggcttatctaaggtttccaagtaaaaaaggagctattgtccaaggctccacttgcataccatttggagtttcatgacctctaggggtccttgataaagacaccttatggtgaggactcgaaaaaaggcaagaatagcaagcataggtgagactaccaagaggatatccatgggaggttaattattggcactaatcttttgtggtttttagcttgggatctttgatttcatcacactggaactttgggtgctcttctgggtcaaaagaggtcctctctggctgtgtaggtttgcactagtgttagcagt

SEQ ID NO: 469491 - DNA, 1676 bp, Homo sapiens
agaaacttttattttcctttctgtctgaaaaggctcacttccaggaattcatttgagtggttgtcagctgggataagtggggaggagccaagatggccgaataggaacagctccggtctacagctcccagcgtgagcgacgcagaagacgggtgatttctgcatttccatctgaggtaccgggttcatctcactagggagtgccagacagtgggcgcacgcaggtcagtgggtgcgtgcactgtgcgcgagctgaagcagggcgaggcattgcctcacttgggaagcgcaaggggtcagggagttccctttctgagtcaaagaaaggggtgacgggacggcacctggaaaatcgggtcactcccacccgaatactgcgcttttccgacgggcttaaaaaacggtgcatcacgagattatatcccgcacctggctccaagggtcctacgcccacggagtctcgctgattgctagcacagcagtctgagatcaaactgcaaggcggcagcgaggctgggggaggggcgcccgccattgcccaggcttgcttaggtaaacaaagcagccgggaagctcgaactgggtggagcccaccacagctcaaggaggcctgcgtgcctctgtaggctccacctctgggggcagggcacagacaaacaaaaagacagcagtaacctctgcagacttaaatgtccctgtctgacagctttgaagagagcagtggttctcccagcacgcagctggagatctgagaacgggcagactgcctcctcaagtgggtccctgacccctgacccccgagcagcctaactgggaggcaccccccagcaggggcacactgacacctcacagggcagggtattccaacagacctgcagctgagggtcctctctgttagaaggaaaactaacaaacagaaaggacatccacaccaaaaacccatctgtacatcaccatcatcaaggataagtggtctacccaataacaagcaataatatgccagatacagtggctcatgcctgtaatcccagcactttgggaggccaagaggggcagatcacttgagttcagcagattttcaggcagactacggaaagttccacctgtctttctcatacttatgataaaatgtgagaggaggggagataaacttaacaaagaaattgttcatttttcaagtaaagtgcagagaaaatatgaagaacacaggatgtgttgtgttagaaacatcattcctgtcctctccatgttgcttacattaagagagattcagaagaaaacttcaaggtgggtgttttgggcagaacatttgtcccttcagttcacagctcttcaaatcaaagcaatacatgaagaaatacaccaaagtccctcttccacaagtgggtgttatctaaataaagagatcctggatctggagtttttgcctaatgccttcatgaaaggaggctttttgagttacatataaacaatttgcaaaatttaaagagcttcttttttaaaaagcaaggcactgttttaagattttaaagttttttttttttttaccaattaatgctttatatgactatcgtattactttacagcctgtgacaatgaaataaatgacagattttcccaagtatttgttcatgaaactaaatactttggttgcttcttcacttttccccttcccag

SEQ ID NO: 469492 - DNA, 967 bp, Homo sapiens
accatggtactaacagctacaatggcacccttgagagaaataagctcctcaaatgctaccgcaattcccttgcagtttgatattgagggtggctgtcactgcctggtacttccagccaacctcatgagccaggcgccccagataggcaaactttcttgtaggcttcagacgcacgaccttgagggcagcaggaaccaccatccgctttttcttgtcgtagggcggtgggatgccgtcagacaccttgagacggtccaaagcggcctggcctcgcttggtcttgtggggcagcatacctcgcaccgtccgccagaagacgcggctgggagcccggaagtggtagggacctctggaagggctggtgttcatccgcttgcggaggaaagccaggtagttcaacttgtttctgtagaaattgccagaaatgttgatgccttcgcagcatacgaccaccaccttccggcccagcagtacctgtttagccacgatggccgccaggcggcccaggagatggcctctaccatcaagcaccaggacctgcacctccgccatcttcggcagccgcttgggaaagcttcaggttcctatttagtcaaccatcttctgctacccttgctcctgctgacaaccactgatatgatttttttactcgatatttttttactcttgtagaggttatataattggaatgatacattatgtagccttttatgcctggcattcttcgcttagcataatgcactttacaaacctatgttttctttaattttcaatcaattcatttattcagtgaatatttactgagcatctactatgtactagaatatttaaggtatggataagtgaataaagaaatttagtaatttcttgcattgtttactgaaaagcatactactcatacacattctataaattattttgttcaaaataagtaattttaaaatgctatgaaatgtcaacagttctt

SEQ ID NO: 469493 - DNA, 1651 bp, Homo sapiens
tcatctcctgcggtgaactcaagcccaagcaaggcacaggcaggggtgtcaccagccagagatggggtcagggctagtcgtgtttgagctcagactctccttgggtgggtcttgatgtggctgctatgggggatgggggatggggctgtaaaagccatcttgtttcttgttccccctacaactgggcaacatctgtgttattggaaacccaagggacagccccatggaagccccatggtagttgtactggaagctgctctgcattcccatgtcaagagccatcaagaagatgattatgaaacgtattccattgcccaaggtcctacaacagacaatttcccattattttccacaagatccaaaagagcattcttgatttcaatcaggaatgtttggaaactggaatttttgcttcacttcctggtggtctctgtaaagtttctagctaaagtagtgaaagaaagagcatctgactgttggagatcaaaaggtggtaactcagcatctgagagtcaatcaagggacaggacggtaacccagagaacagcaacagcagaaaaccactactaccttaagctcaaagattataaaacagggggagcccactgtccaaagtcattcaaagtaacctggtagcctgaaaagctgcacagagagctaagtagaattctgagaaagaagatttagtgaaatcaagtaagttatacttagtaaacatagattaggtacttaagaatacaataatttttatccattaaaaatattgagtgtttacttaaaccagatactggtcaaagaactatttctaaaattaatccatcctcacaaaaaccctgttgatttaatatatggtatagtacaagcactatgtttccacattttgtaaatgaagaaattcaaatttagtgaatttcaattacttacccaaattttcagcaatggagtagctagcacacatggcatttaaaacttgacttgacttaaacaaaaccacataatcttatatactataatatactacagaaataatgctagtactctagttttttaagcataattgagaaagagagctacagattgggaatggaaacttgtgtacatctactctaaaaggaaaggtctctaacatgataactaactttaaaattagctaattacagataattagaagagtaatttacctacaaaattaaggttattagaatatattgtgatctaagaagaaactcaaatattttagaaagaattaaagtttacaaatgcaacagtagaaaatctcatctttacaatataaagtgtggctggacaatttagtttatttcccttcaacttattttaattaggagactttgtgtcaatgttgccttatgtttgctattagcgttcatctgagtaactttagattttctgatgaatagtgcagctcaagtgttctgtaatattcaataataatgtcatcccatgtggtaaaattcccatgtagatgcctatgcatatgtccaagtatatgacagtagttcacttgccatcacatcagataaccttttcaactctaaaagaagctgttattactccctagcttgcatctttatgtatctctcactgttgatgacaccaaagacctataaataatttctaaatgatttgtatt

SEQ ID NO: 469494 - DNA, 972 bp, Homo sapiens
ggcgtaggaagcgccaagagcgagccagggctgctaacacgttgtcacctttcaataagtttatataattgtgttcttatattatggtctacacactaccttcagcagtttctccagagtcctctgctaaaggggatccatcaagatcctacggcctttctgctgcttcctctatccctgtatttcatttggctctccaaattgactcagctccaggtaacgtcggaaacttctcctgtaaacaaaccttcagcttttccagtgggagtgtgtgttcaggagagaaggatcttcctttcctgcttccacggttggggtactcacaagtttggggaggtctcccgggtcttgtaggagcagtctgcttcattcagagggtctgtgggtcctctcaggattgctggtttgttgttgcagtcgacctggagctaaaattcacaataaacactggcattccagaaagtaaatttatttttcacttttggttttagattactcacttttggtaaactgtttgtgctatatatttctggtgaattgttaactgatgagtctcataaaacacagttaaatgctacaaagacaagtctcttggctttatcaaatatcttccaaaaattgtgaagccaaatgaatagatttatcccgtctcctctcaccccaacataaaagggggaaaaaaaaaaaaacaaaagtatttatcttattgctgcataatagccttatactgtccatacatagcctcttttacatctagtatattttattgaaatatacaaaacatttaaaaattgtaaaatatgctaaaaaaatacagcaaaatgcaagttatccgtcaatgtcaccctttggaaaaaaggaagctattctacatatttcctctgaatttgctttgaaatatgaataaattcccatgacattttggtaaatgtattttccttaaaaagatgctgtgaatttctggaagtctac

SEQ ID NO: 469495 - DNA, 809 bp, Homo sapiens
aggggcagagctgcccaaagccatgggagcccacctcttgcttcaacgtgacctggatgtgagacatggagtggaaggagatcattttgaaactttaagcttttactttgctcaggccatcggactaggctactatgtgccccgacctgcatggagaacagtccaggcacttttctatgaggtgggtgttctctcctgtgggtatgtaccagcccatgcttccacagactctccaaagcctggagacaacaagatcaaggcctatgagatagcaaagatggcaaactgcctcttccactgggagctgtgtcccagagagttgcagataagctactggctcaacagtcacagtagagggtggctggagatggagactcaggccaggaggacacaccaagaggggagatatgggattgaggacctacataacaaagagtctgaccagttttctatagggttaagaggtctgctccagtcgctagttacgctggattttctaatatctagagatatcaacagtgaaaactgcaaaataacaaagatggtggcctgccccttcctctaggagctccatcccaggaaattccagacctgttcctggcctgaacacactggtgagggtggctggggaccctagtcaggaggttctgactagtgaggaggaataagattggggacctccataaaaaacgcagtctggttgctttttcatagaactgctgtgctatgttgggggtctgatccagctcacagtcacctgagactctccaaaccctgaaggtgacaacgtctaaggctgtgaaatactt

SEQ ID NO: 469496 - DNA, 648 bp, Homo sapiens
gcagggcactaggcttctgaacagtgcttatgttgactgacatgggaatatcactattagcatcaaggaaattgattcatatcgtgactgaaatacccattcaagtattgtatctaataactcaggctttagctcaaggctttgtgagtactgtcacaaggatccctactgaaaatcgtttaagcaagaacacctacatcctggaagagaaaaagggtcaaaataactggaatgcaagaaagaatggcatgaagtcaggtggaaagcatgaaaaccttgaagaagggagttataccactcaaaaatgtctcttcaaggaccttggagcccaccctttgaaacagaaacatgcaggaagatggctcttgctttctaaccttcccatccctgtggaaagaaaaatcaagcctagttttacactgaagtctctgtctgctactacagtagaaggtgaataaaatctgtctttatagcctttaacaactttctagttttgtttctcccatgtgattttaatgtttatagtttattatagactaatttggttcttggtgcatttaggggtaaagatgctgtatgagctccttggttataaatagtctttgtgtactggctttctgaaatgctgcttgtagtagttatgtattc

SEQ ID NO: 469497 - DNA, 479 bp, Homo sapiens
catgcagggatgggagcagtgcagtcagccacctcaaggacgcagggcacacgggatgcggggcacaggggtcccacagccgccacagccactccgccactcccacagctgctcttggcaccaccactcgcatctccccactgcagccagtgtgatggcggtggcagctctggacggctggccactgccatcataatcaaggtagtgtggatgcctgaatttctggtgaagcaggaattgaatacagtagagctgcttgtgatgcttggccctcattcagagagcccagagcagcctgtcaccagtgaaaagaagcagaaaggaaagacacaaaaggttataatttatatggaaccacgaaagcttctacacatcaagtctgtggtcttctgttatatcagcacaaatgaactatgagagtacccttagcattttgtattctcagtagtagtattgttaaaccaactttgtattccagg

SEQ ID NO: 469498 - DNA, 747 bp, Homo sapiens
aagtttcgaaagcgcagcaccagaaactaaaactcttctgccacctagcgaaaagggacatagtagaaagacacacaagaaggtaatatgatggcagagggagatttgagtgacatgaacatcagccagacagaagaagaggaggaatgtggctgcaagtcagtcattattgacagctaccagcagcaggatctgtcctcatttacacgtgtccacagcaatggcagtacagcagcgtgcatgttcattggctgtggcaggctgctaatggccagtgtgctggcctctgtgtgggtattcacagcaaaggcattggcagcatggctcagggaggacgtcactggcaactgtgcatacatttgtgctagtagtgatgttagcacaggagcagggcactggaaggcgcgggattgtgtgtgccctttgtgtgcattcatgtggatgacagtggtcactcagggtggaggtgggtccactgttctctgtgctgttttgcactggcagtagtgttggtgcagggacagggtgtggaggaaacagaagcttattatccttccttctcttgcaaggaggtctgtgcttcctcattctttattctgatgactgtgtcattgacaacatcatcaataaacacttatcattaagccaacaaaattatagctgtaaggttaaaaattgcatcgttacacatggattcctcaagtgaaagaatttacagttgttcatatcccatgaatgtttccagaa

SEQ ID NO: 469499 - DNA, 768 bp, Homo sapiens
gaagaaatattcttaacgactaaagagttatgtcccttatcaatgttgcattgggtacatgcacaggtttgttatatagtgtgtcaaaaagtgaaagactacagaaaacaaagaagaatcctgaatataagaatggaacactttaataataggctgctctgcttatatcccagcatgtggccatctactctgcctacatatgtggctgagccagtagggtacactcatctccccttcaagcctgacaaagctcaaaggagcagatcaatggcttcgtgggaaagaagatatacccgaagaattgtaattaataatgacatagtcattgaaaccaaagatctgagctcatatcaagatcctgattcctctgggaattataggatcgagtggagagcagaaaggcaagcatatacagtttatcccttagtagttcttggatccaaaatagaaattaacccactaccttcatccagtagtatttgccagccaattgtccaatacatcgtttaaggctcaacccaaaagccactttctttttgaaactttctttttaaatttttttccccttcaataaggttatttaaaaatatataataagttattattccaccatgcactagatcttattcattatatctaaatggatttttgtacttaccaatcattcccatcttatcccatcctccctgatacccttcccagcctctggaccacatcccttttctgttagtatacaatgtgatgatttagaaagctgggtaactagac

SEQ ID NO: 469500 - DNA, 710 bp, Homo sapiens
agttgtcagtgaaatacacctagggcttatgttttatggtttgcacaataattccattttgcggctctgtaccctaattatgagagacttgggagaggaagatcaaatttttcctgcttccttgatatttatgactatagacgtttacttaaagaagagtgggcatgctttgaccagaaagatagtgcagaagaaaagtgtcagtaatgagaagcaatggctgattggaattctaagttctgaaaaggacattgttatttatggagcatatacctatagaatgtcgactggctccactatactacacaaagttggggaattggagtctattgtcaaggaacacacaatagtgcgttctctccatttaggggtgcctttgaatgctgctgagcaaaacatgacaagagtccattgcacatgggttcaaatatatacatttcccagctgtgtgacttgtaggaaaccacttaaatgttcttagcctcattctcttcttctttaaaattgatagttcatgatgttgtgaagattaaatgaagtgactttactgttaatacttatgaactctaactcatgaatttagtgaaatacaaatacccttatttgggagtaaactgtaataatatgcatctatgctgggggggaaaaaaccccaaacagcccttttgtcttttagattttgaatggcttgtgtagctcttcccctcctg

SEQ ID NO: 469501 - DNA, 686 bp, Homo sapiens
cacctggcgcagaagtggtgctgatgccgccgccgcacgagagaggagagccacgcatcaggcagcgaatgggagggcagcttgaaccctccctgttctggacgctggtgaagaagatccgtgagcactccccaagcagatttcaggcaacgagtgaccatgctggtccacgtgtcagagccataggggctgactctgggggcttctgctccaggttctttatagacacacggacagtttccatttccacaggggcccaggctatacattcaaatctagatgaattcagtatgaaggacagtggaaaaggagacagtgaattgaatgacagccatttggatatcagcagagagggtttcaagaaaacatcctttcaaatgattgcaaaacaaggggctcaggccactgtaactggggagattattgatagtgaggcattgctacataataagagagtcttccagtggttagcctagagattacagcatgcacactagatttaagataatctattatgaattataactttttgtcacttcctgaaaaatgtcagaatgaagaacagtttgcattgacccctctcttatcttttgtgcttttgtcatgtattttaatttcacatatacatgatacttcataagctaatatttgtattgttttatatggtcaatatctgtttagtttga

SEQ ID NO: 469502 - DNA, 641 bp, Homo sapiens
cccagccttctcattatggctcacaaagcacttcatggtctggtcaagctttaccttgagggctttgtgtttattcacctgttgaaactctatggtctggcaaaaatgaatgccttgaagctcccagaacataccctattctcccttattcccaggactgctcctctgaatgtggtgactagaaatccaaaatttaaaatcacatataaggcttgcatttatgactcgcgttatgtttctgttaggctgcactggtatggagtgtattgcctggcacatctggttaatgaacaaactggtagatggatctatgtgaaaggagatggagcaacctgggatggaacaccctactttaagcctatggactctgtcttgaaggaaccttgtgcacctgtgtccatatttccaggaataaaatattaacatgacattctgaactgaacagaacagatgcttattttgatcaattgcaacatcccatgataccgtaagtggtgttcattcttactggcactagtattcatttaactggttttgtgttcaatttgtgtttattcctagtatattccctgaagtggcctgccttccgtaagtgactaggcattttcattagaaaaaattatgcattcttctttccttat

SEQ ID NO: 469503 - DNA, 677 bp, Homo sapiens
tactatcagccatggtcaaccccaccgtgttcttcaacatggctgtcaatgatgagcccttgtgccacgtctcctttgagctgtatgcagacaagtttccaaagacagcagaaaactttcgtgctctgagcactggagagaaaggatttggttacaagggtttctgcttttacagaattattccagggtttatgtggtttatgtgtcagggcagtgacttcacacaccataatggcactggtggcaagtccatctatggagagaaatttgatgacgagaacttcatcctgaagcatacaggtcctgaaccctcacattcccaaaccaattacttatccatggcaaatgctggacccaacacaaatggttcccagtttttcctctgcactgccaagactgagtggttggatggcacacatgtggtctttggcaaggtgaaagaaggcatcaatattgtggaggccatggagcgctttggatctaggaatggcaagaccagcaagatcaccattgtgatccacccgcctcagccacccaaagtgctgggattaaaggaatgagccaccatgcctggccaacttgtgttttttcttaaccaccacgccattccttctgtagctcaggagagcacccctccaccccatttgcttgtagtatcctagaatctttgtgctctc

SEQ ID NO: 469504 - DNA, 602 bp, Homo sapiens
caacagcaccttctcctacctgagcaggattttcttcagcgttcaggatgatactgcttatagtcatctgccaaggaggcttcttttcaagcttagaagaagtcagtggtgcttttccggtccttgggcctgtcagtggtcctctagactcacacagggtaatgggcagcctccatggcagttcgtttacctgcagaagctggacccgctgctctgctctgcagcatctggcgattgacatgatccttctggtaaagatgagaaatgtgggatcagatattaaggtcatggttatcagcaatagcccccatgacaccctggccaaacgcatatccactgtcaaggtggtgggacattcaccagctcaggctccagctcttgctcatggcagatcttctgtttttgtgtggttgggcaatacctgagatgccagaagggacaccctaggcaactgggctgcaagtttttcactcttggagaaatggttcttccatgacaataaacctgggatgacctaatctgtttctgggctttttatctggactttctgttttcattggccttttcttcctcctcattatctccctccagacaagctctgc

SEQ ID NO: 469505 - DNA, 781 bp, Homo sapiens
aactgggatcctgagtgtgccagtgagatcacgaacccacggggagaaatgaacaactccagacacgctgccttaagagctgtaacactcactgtgaaggtctgcagcttcactcctgagccagcgagaccaccaacccaccaaaaggaagaaactctgaacacatctaaacatcagaaggaacaaactccagacacaccgcctttaagaactgaactgagccccattcagccccatgggagccccactgttgtctctgcccctggactctgtgagacaaatttttctttttgcctaaaccaacttgagcaaattgtggccaaacagcccctgatgaaggcaagtgtaaattgttatttctcacctcttcgtgtgtgtgttgtgtgtgtgcgtgtactgagggagggactatttgaccttattcccaaggccttccccttggtatatggagatgataaattctttcttacaattaggtcatgtgttacacaccagcagcataagccatggggtatcatttctgagacaccccaaaagccctttgcatgagctccccccatgcctgggcttcagtttcctcaccctcagatttccctaaaggcctttttttttttaactctaaacttctaggatttgggttcaacaagtttagacagaaaggaagatatggaattgaaggaaccgtgttatctaatgcattttcaaagagatttgtttgatgagagtgcttgttagaaatacctaagcagagagcatcaaatctttgacaaaatatatattc

SEQ ID NO: 469506 - DNA, 631 bp, Homo sapiens
cacccctgacatcaggggcatctctccaatgtaccatgtcagtaagcagtacatttttattgtggaaggcactgaaaaaaattgggatttctttattactggagctggcattaccctaggtgtgaccagatggcatcttaatatgcgttcaaaaagaaaggaagaaaagaaagaaagaaagagagagagacagaaaagattccatagtgaactaaagttgagaaacactgaattcagcaggcttcatgattgcaggatgttacaagcttttaatatgttaagcttcagtggattctgccaaatggtttccaaagtagttgtacaactacacttccaccagctgtgtttgagagttgcagttgtcctgcttccttgccaacacaaatttcctccgttttcctcttggcattctgatgggtgtactgcattgtagttttggttagcaattctcttatgattaattaaccaatttactgtatttattgtctggagatcatcttttgcgaaggatctaagtcatttgtccatttttctattgggttttctgtatttttcttattgatttctaagagttatttacatattctggtatggactcattacaaaatttctccaaggcctgagcactact

SEQ ID NO: 469507 - DNA, 690 bp, Homo sapiens
aagagaaagacacacagcttttcaggggctcacgtttagatatgaatgacagccaatgatccccaacactttgtgtcagaggctcttctgttccacaaaaactgtgtgacgaatgccaactttttagcagggaccatctcttccagattcgcaaagggtgaaaggaataatgagggaactagtgttggctccctagtatgtgtcatcactgaagcaaatagagaagttagaaaacagacgatatccaccaccaaaaggagaaaaggtaggtacagtgatgggtcgactttcaagaggggattgtctccagaggtgcgagtggatgtgagttgcacttcagaaaagatgatgtcgctacagggtgaagagatgaaaaggagcaagattgaagagagtgaggaggttcttgtgtcatcccagagacaactgcctcataaagctcccctgaaagggccagacatcaatgccctctcacctcccctccacctaagttgtaaacatcaatatcaacatctgaaaattctagagatgcttcagctgcttgactggagcaattatgttagtgacacagtagaattcccttaaaggctctcctttatcttaaaccacttgtccctaagcaccccccttctcctaatctaaacgccagagtgttcagaaagcagtagtgatggaaagctgtatgtaaac

SEQ ID NO: 469508 - DNA, 610 bp, Homo sapiens
tgagattatatcaccatattttcactataccttttctgtgtttagatatgtttagatacacaaatacttaccactgtgttacagttgcctacagtattcagtactgtaacatgctgcacaggcacacccctcaccaaggtagagctgccacaggtagtctaactccagagaacaacaaacccctttgctggggggaagggatgggaggaggaacaagacttgagaggcggctgggcagaggacacagaaacctccgttctactgtgaggcccgaggaatgcaaatggaaagtaggactcccacttatgagatcttgtagaaaagaggcccagagaatgggcagtagatttgttcaaggttatacagctagatggtgtgaagacagggcagcactgtggtccctgggtcccttgtctgatgttgttgccgtctctgcgttagtgctccctaatgggtctgtggtgtgcccggatgtaagggttggtttggagcatttccagcctggctctctggacgtggaacttgctggactttgggatttttctgtcagccattgataggagcagagtgttgttgtgttttgtggcagaaaccacccatggaagtgatc

SEQ ID NO: 469509 - DNA, 648 bp, Homo sapiens
cctgagctaacacgctgcagagagatgagccagacgaaaaactcttatcagaatgataagtcgtagaagtcgaaataaactaagatacacttcaaaggagaaacacctgaaagactgggctccttccattaatccaagaaaggagaacctgtttgatggagcccccagtaatgcctcattttaccttatggctgaagacaagggctggccaagagggggtgtttctcaggcctgggatacaaataatttctcagctgtcctggatgtgggtctgctgggggtagtccacagggctattctagctcaggatgtgggcacactgctgctcagctggcctgggtggtgcctgccaggggaagcccagggggctgcttctatgacccaggatgtgggcacaaggctgcttggctggcctaggggcatgtcttctgggagtagcccatggggctctttctcaggtccaggacatgggcattcatggctgattggctggtctggaggtgcatccgctgggaatgggtacaggaatgtttctcgggctcatgaaaggttgcacagctgcttagttggcctgggagtgtttctgcggggggtggcctacagggctgttcctcaagctgggacataggtatgtggctgcttatttgg

SEQ ID NO: 469510 - DNA, 1252 bp, Homo sapiens
aggcttcaacatggcgggccgtttcggttgacttcgcctgtggaaaccgaattccccctccatggtttccccaggatatgagttgggggcctcacctcgcctataagggtcaggcgagctttctggatgctcgagggacctttcggcctgcgcagccggagcagcttgtcccaatgccctgccatttctgtgagggcccacgaggcctggaggagcctcggagcccccgcaggccctcgcgtcactgcctcaagagggtgctcggagccctgctcgggagctggtccccaacgaggtgtggaaccccttcttgctggaactccacggagagactgtcctgctaggacctgcttccagaagagttgatcccagccgtgaaagtgcatgatgccttcagcgaagcaggcaggaaaggctcaagtgatcctcctgtatcaccctgggtatcaaggccattcagtggaaaagaacagtctcttcagcaagtggatgaagttagatctcttcctcacatcatacagaaaaatcaacctcaaatggaagaaatatctaaatgaagccgaacacttgataaaaagttcatcagcgtaaataagaagaatcccctccattacatacaaaagaaaaaataactggagagatcatctctgctctaagcgtgtttttaagtctctgcagtcttggaccaagctcgttttattccctactctacgagaatctcaagagcaccaggattctgtttggagttgccatggacacagagttcttaatccagtactggcttattctcaatacgagagaaagttgtactgaagacacgagacctgagacttgtgtcattttagcggctgaaccgaccccaacttcttctgagcggcagtggcgccagaagcagtctggctttcagggactcagagttcctgagttcgagagcctaccagagtggcccaggggaggcgagaatcctatttgcgacatggaggagatagcagcagacaaggagcagtggagccctgggcagaaaggaatggagctaatggaacatggacttgtccctcaccgtccagacctctgtcaacatgtgagacacaacaatattgaaagtaggccatttaataagtctatgagggtttctaagtgtcctagtgaaaggaagagtcagaagcctctcactttaaactaaaagctaaaaatgattgtgaggaaggctagacttcttgcaccagtcagacaagttgcgaatgcaaaatac

SEQ ID NO: 469511 - DNA, 628 bp, Homo sapiens
cgttcccctccctgtgtctgtgtgttcttattttctagatccttgaggatttgccacactgtcttcgacaatggttgaactaatgtacagtcccaccaacagttcaggcccctttgctgcaggtctgctggagtttgctggaggttcactccagaccctctttgcctgggtatcaccagcagaggctgcagaacagcaaagattgctgcctgttcctcctctgaagcttggtcccagaggggcactcgccagatgccagccagagctctccttaatggcagacaaccctcccccgagcaagctggtgcatcccaggtcaacttcagactgctgtgctggcagcgagaatttcaagccagtggatcttagcttcctgggcttcctgggggtgggatttgctgagctaggccatttggctccctggcttcagccccctttccaggggagtgaatggttctctcttgctggctttccaggtgtcaatggggtatgaaaaaaaatctcctgcagctagctctgtgtctgccaaaatagctgcccagttttgtgcttgaaacccagggtcctcatggcataggcacatgagggaatctccctatctgtgggttgggaagaccatgggaatagc

SEQ ID NO: 469512 - DNA, 495 bp, Homo sapiens
catagtatctgggccaggtgacacagtccctcatggcacagtccctcatggcttcccttggctatgggagggagttcccccactccttgtgcttcccaggtgaggtgatgccccaccctgcttctgctcaccctccatgggctgcacccactgtaaagggtaccacaagggatagagaagcaatccagggctcaggagcagctgcacttccaacacctctaagggagagggttgaggagggaacacgtgccagaacgcagaaggaagagtctgtggagtccactgccttgagagctccagcaactactcaggtgaccttgcagggaggagatccagaaacaaataccctgacccactctcctctttcctccagcttcttgcattccacaagttacttcctccttcctttgttctcctctacctttgcctcttttaaaaagttgtaagttgctagccaatcgggacaaatacagaatacgacgtctcactgttgcc

SEQ ID NO: 469513 - DNA, 531 bp, Homo sapiens
acagcacaagcccgggagcaggaaatgagtcactggaggctcccagaggcaggagtctcattcacgtggctggcagggtgggtcccctccacagttgtcttggagtgtcttcacaacacagcagctgacttgccccagagcaaatcctacctgcaaaaccaaggaggacgcttcaatgccttctatgacctggcctcagctatcacacattgtcacttccacagccctccaacaaacaccctgcaggaaagtttcactaaaggcaaatgcgactgtatcctgacagtaggtcaactaaatcaaatcaatggcagaagcttcttgcccagaaaggtgacacaagttgcccaagatgtcctagccgccaagtggcagcgccagaattggactcccgggcagatgagtcctgtgcacattcaagagacatgacattgaataataagcaccgttcactccagagatgacacatgaaatgaatctaggaggaatagctttccagattagctcacaggtactgcacattcagctaat

SEQ ID NO: 469514 - DNA, 583 bp, Homo sapiens
aagacttgaatagtcacagaaatgaggatacctgttctcagcgtgcatccgtcctgggcccagcagaactgctcgacacagcactgcacccacactgctgcccttcactgcgttcacatctgtccccagctccccaatgcccaggacatacaggcaccgtgctcagtcgcccaaaatacaccaaacacatctcttcacgtcccaccagagtgtgacagtcattatctttctttgttatgtttattcaaatgtctggcttcccactctactgcaggctctataagaacagcagcctattctctgtgtccccagagctcagaagatctgagtgccagccctgctgcagaccacctatgtgacattaggaagcccctttcacaactattaaatgccctgtctcccaaaagcgattgcatggaagaggattctactcagcaatgaaagtaaatggactgttgatgcacacaacagtgcacagacctcatgcaagcttcgccaagtgaggaaagccaattgcagaaggcacattggttgtctaataaacaacacttttctaaataaataatgcttgcaaaatgaatgt

SEQ ID NO: 469515 - DNA, 942 bp, Homo sapiens
ttaggagagagaaactagaggcagggctgctgcaaagggctatgcagactgtacacaacataactccaggagtggctcatactgtgattgatgtcaatggcatccctggaaccctcaagctaggatttataacagtcaaataccacagatacatttcaggccttgtcattgttgaccaacactcggattccttgacagaagagaccactccctcgcccttggatgagctctggactcaaaccgcatgggacaggattccagctctaccactcactagcattgtgggcgttgctgacttcatttgggtaaaatgtgagtatctcaactgtagaaatggaaggagtccacaaccttccccacacctcaaccaatctcagtttcagcctctgaaagaccaaggggaagacattggagtccagtgtggcctgcagcagcccttgactaatagcactttggcaagtgtgtcctgctttggcatccattcacatacctgtgtcaggcaccaggcgagagcacggagctggacaggtgaggccctgctctcatgcagcctctgttttcgtaaggagacagctaataaacccaacaagtaaacacacgaatatacaagataattttaggtagtcatagatctataaataaagtaaaattgggtaatgaaatgaagagtgacaaggaaggtagtcaactcaaggatagatggtcagagaaggccttggaaaagacggcactttagcagagacccgaatgaaaagaagcagctcaccaagtgaagtgctaggggcagaagtttccaggtattcttcacttaaaggaagtgtcatgcataaacatctaaggttctaaccttacctgcacatcatcagggttcagcttgtagtagttgctcaataaatgctatgaattggattgttcagctgaagaaactaggaaggctctgga

SEQ ID NO: 469516 - DNA, 776 bp, Homo sapiens
cacacaaggcaagcaggagccctctcaaaggagccggctgccagcttggtgcttacaatgggctggctgtgcaggaagaatgagttcaagagagctattgtacaacgagagatcctttcaagaatatcccacggcttctcaagaggacaaccggggcccagagaagtgggcacccagggaaagcattactgctttcaaggccctggctgcacactgtccatgcgtacatcacctactcagtgctgggtgcatgccaggctccactctgtgcccaaggagaccttcatcgagtggatggtggtgccactcacagagacaaggatggccaaggtcagcttggtcatgtcagtgaaggcgctcatgaaccgtctacatggagacctccaggaggctgctgggccccagagctgcagttttgagggaataggggagagacgaccgactgcctgccttcgttcaggtttcctgcccatcctcatgtgtcctttcagaggaggagaatttctgaacatctgatgccatggaggtggaaggagctggtatttttaaagtaggaagtattaggaagtaaagttaaaatatttatgagttttcaaggtatttatagttgtaggttcctttgtgagcttaggagcacacaagtcaatgaaggagggcttgtaggcagaggccggcctggtgtggggtgggctattggagcccaagcactgtgacggctgtccttggcagggtgggaatcagagtagggagaggaggacgaacctccccagggaagc

SEQ ID NO: 469517 - DNA, 2457 bp, Homo sapiens
aacatcggtcagcgggtgacattgcattaatttgctctggtgatgatttctgctttgctagaacgttatttgagtgtatacatacacaaccattaaaagtggccgttaccacgatgcattctgggaaagaagcagcaccaaatccaagatggcggccagcaggaggctgatgaaggagcttgaagaaatccgcaaatgtggaatggaaaacttccgtaacatccaggttgatgaagctaatttattgacttggcaagggcttattgttcctgacaaccctccgtataataagggggccttcagaatcgaaatcaactttccagcagagtacccattcaaaccaccgaggatcacatttaaaacaaagatctatcacccgaacatcgacgaaaaggggcaggtctgtctgccagtaattagtgctgaaaactggaagccagcaaccaaaaccgaccaagtaatccagtccctcatagcactggtgaatgacccgcagcccgagcacccgcttcgggctgacctagctgaagaatactctaacgaccgtaaaaaattctgtaagaatgctgaagagtttacaaagaaatatggggaaaagcgacctgtggactaaaatgtgccacgattggttccagcaagtgtgagcagagaccccgtgcagtacattcagacaccccgcaaagcaggactctgtggaaattgatacgtgccaccgtctggcgttcgcttgcagcagttactaactttctacagttttcttaattaaaagtggtctagtaaggactttttgacaagctgcacttccctgctttagtaattggtgataagatttgtcctgtagaacatatacatagaggattgttcactctcctccttttatgaaataatttttagaaattgagctgttaaaggttgtgtttgcacatgttttttggaacaagaactttaattaaaggatcaaaaagcccaagctcttgcttttgaataactgaagccagtgtctataatttcttgtatctaaaatctgtagaaactagttgtgtgatttcaggggtgcatggggccccttgggtgtctgaacagaagggggtgggaggcagagccgcacctctgcactcttgctctgctggtgtagtgggcagctgcccacccccaccccaccctgcactgcaggctctggagtcagcagattaagcattttataaattatattctaagtatatattttaaacttgtcaaaaagataaatctagcttattttacctttaacttgtaaagaaagtttgccttcttgagttctctttgtcatgggcagtaggagtagctcgcctgagtatcatcagtgaagggaaacccacacatcttggtgagcaacgagaaatcaccatgttaagattccagggattttcttctctggtcattgttgtagccagtgtcttcatggaagacctattttcgtttcattaccatatttgatgcctaagcatttaataatcagtttatgactactaaacttttgaggatcttagaatttaactggctctagaaagtggcagagaaacctacacatgattccatgtcctaacccataagacgtgagtgatacatgctgaggagggaaggttactcacttgtgaaatgaaggcattatgctggatgatgtctgaagtcccttcgcacattccactattacgtggtaacagtggcattcttagcatgttttgtgactttaattcattgattagatatttcatcaatgaccaaagttgcttcaatgctaagattagaacaattttggtgaggcttcaaagttaataattaatgcaaataaatgagccatttcacacctctgctagtatgctctcctttccaactctctgtacagaagaacaaataatagcaaacagcaatgaattaattcacaagcaaagattacttctggcaattaggaaagacagactcttttctgtttatatatacctattctgtacataaatatgtgttcacatttataaatatatatatgtaccatttttcattaaatacaaatattcccaaataatatgatgatgctaacacctataatatttgttgagcacatactgtgtgccaagcactgttgaggacttcatagacattatcaatgatttcttattttcatttatttcttctatttccagtcttaatgccacaaatgatttctcaaaatatggagatttgcaaagtttattgtaaacattttatctagcaggcacaactgttaacagagtgtaaggaaatgacaattcttaaaaaatactctcaatttatctgaacttttgatctgaactctcaatttatctgaactttctggaaaggtattcatttgagcatgtttatctggggacagggattttgtctccaccaaagctttcctcttttggacagagagaaaaaatcttggagattatggaggac

SEQ ID NO: 469518 - DNA, 736 bp, Homo sapiens
tggagagtcacgtgcgcttaggtcccaaacttaagggacctaaccctttttctggcttcctgagccctcaccagaagcggtgcagatgctggtgccatgcttggacctcctgtagaactcaggcagacacacatcggtggaagaagacaggagcggctggacattgaaaggacgtcgagaggagcacacctgcacaccatcgaccagcggaacgaggcagagtgtggctggagcacctgcccgtctagaggtttgagcagcgggacactgaagaagagagccacaccctcatcgcacgtcctgcgagggagacaagggaacttttccggtttcacttctgcttggcttgagctggcactgaagcacccttttccctcctcactgagggagcagaggggaaaagcggtgatcacggcagccgcggagtgcatttgggtctcctttcaagaaagaacttgctgctcagcgttgaagaatgcagttggccaacagcctccagctgctctatgattcttactattttgagatatattcatttgatgcctagtttgttgagggattttatcataaaaggaggctggattttattgaatgctttttctgcatctattaaaatgattacgtttttcatttttaattctgtttatgtcatgaatcacatttattgacttatgtttatttgttgcttacatctactttctaattttactataataaacatgtataattttgttat

SEQ ID NO: 469519 - DNA, 2357 bp, Homo sapiens
gctttattgctcacacaaagcctgtttggtgatctcttcacacggactcggcctctcacaatgacacgcagaagtgatggctttatgtatagcactaccgtgctgacagcaatgagctccaggaggtgggagaccagctttgcccatcttcagcgagctgcctcagcgaccaaggaggcctctggtgctccagtgatgacatctgcattccagatggaaagagaaaaagtaggggaagtgggaaaagaaaaactgtctcacaagagtgcgccatggaagctacgattctaccatgctcttgagtgtgggcagtcaagatgccacacagcatctgttctctggagtgtacagctgaaactctattcagagatgaggaagctgctgcttctgcaaatgcttgtctctatcctaagctggttcctggacactaggatgcttctgcagaaaccaaaaccaaagccaaaaacattccacagtgctccacaccagggcttgccagcaacagcatttgaggcagcaacgagatagctggtgccacttccgccatcatgttaataggcagaatctaacatatgtccagaacataactgcaagagaggttgaagctctatgtactggagaagtttagaatcaatcctgagtgttgatctacgatatcaagtacgatgggaagattttgaaatgagaaaagaagagcgataggatatgatgtaccttttacgaagctgactaaggttacagtggcaaaaagacagcgagaggatgctggaagctggatgcaagaagatgagctagaacctgagggatagaaatgaagatctttcagttgctgtctgtgaaactgattgatgtttttttaatttcctatatggaacttttctggcagtcattgtttctgcttcaaaggggggaggagaagcaggagacttttcgtagttatttcaaaggggaggggtgtgaatagtggtaagtatataatcatcaggaggggaatttataaatattataaaacaaattataaatacttattataaattcaaatattagaactatgaaaaataaattataaatataaaattatataaatgttaaatataatcaaatcatactttattacaaataagtcatgatataattatacataaattataacatttaaaatattgatatattttattaaaatatattatgaatatataaattataaatacgatatgaatcagctagaatattttaatatcctgctactgaaaaaacttatttcttaatttgcaggttagaattaaagagagggaaagatgtacttcacagctgctcccccagaagatacaatcacacagaatttcacacttttttgcagccataactcctttttgaattgtaagttgtcagaatctcagaagaaccacattggtgttatacagattttgatatactgaaaaaagacataagttgtggttttctctaattttctgtacattatttgcacagtgtaggtggccttaaagattaaagggttttttgtttttgtttttgatgagagttaattatagcattttacaatcatttgagttctgtataaaagccttaatgaaaaatcgctggacaacaatgtaaagccctttaaaaacaaagttcctttcagtgtaggaaggtcctgatttttttaatctgtatttacaggaagtaaaatagctctgaaagttgaaaatattttcataagtcacttggccacaaaacttgctctgacctgaactcatttggccatgaaacttgaccttaactgacatggggctatgattagtctttattcgtcccactgtatgtaaataatcatatatttctacacagagatattaatgtatttaattactgaagctgccttaggacgctgcagaaatattctgaacattgaagcacctctgactccaaggtttcagaagagggattatgaagttatatacttttcattttgagttctgatatattgctctttcacatttccttctgaaaataattggcgaaatgttcagaactccttgatatgagaattctgaaatagagttcaaactttaaatcagaatgaactagcaccatattcctgttttttcagttcctgttgaaattcactatgtcgaagtaaaatagaaaaagagttttaatgattaagaaatagggtctggttgaagtattgcatatttccattcattccttttcattctcagttctttcccagcacttaaaaattttatatttttgttatatattttatgatttatattggatgacataattgacatttttatcaacttattgataaaaggaagtacatttttgtggtcaaattgttcctggtt

SEQ ID NO: 469520 - DNA, 618 bp, Homo sapiens
ggaaagaggtttaatggactcacagttccacatggctggggaagcctcacaatcatggtggaaggcaaatgaagagcaaagtcacgtcttacatggtagcaggcaagaggacatgtgcaggggaactcccctttataaaaccatcagatctcatgagacttacccactatcacaagaacagcatgggaaaaacccattcccattcagttacctcccaccaggtccctcctacaacacgtgggcattattacaattcaagatctcctcagaggcagcaggagcagccaagccgatgctcatgggcctcatctttgtgtcaccagtgctcaaggttgttctgcctgaagggaaaatactgcttgagggtaacaaaaggctgaccaaagacttaaaagaaaaaattgggaatgacatgtccccggtgaactttaaaaagctctaaaatatatctggggatctagaaaaaacaaatgtatattcagggctgtgaatattcccaggaattatctgaaaaggttctactcagctgacctcgctcacctgaacttgaggctttgtgcaagcaataagtgatggctaaggcagcatagcaagcattctgctggagtgttgattaga

SEQ ID NO: 469521 - DNA, 556 bp, Homo sapiens
aaagtttgaaaaccatgtgtattagtccattttcacactgccattaagaaatacctgagactggatagagatgaggaacttgttgggaactggagcaaaggtgactcttaatgttttagcaaagaggctgatggcactttgcctctgccctagagatttgtggaaatttgaagttgagagagatgatttaggatatctggcagaagaaatttctaagcagcaaagcattcaagaggtgacttgggctgacaatgtgatagaaaatgaaatcccattttctgaggagaaatttaagccacgtgcagaaacttgcataagtaacaagaagccgaaagttaatcaccaacacaatggggaaaatgtctccacgggcagtgcggaagggaaatgtgggaatggtagccaccaacagcttgcaccatatgcccagaaaagctgcagacactcagtgccagccataaaagcagccaggagtgggggctgtaccctggaaagccacaagagtggagctgcccaagaccatggggacccacctcttgcatcagcatgacctgga

SEQ ID NO: 469522 - DNA, 736 bp, Homo sapiens
gctttgccaacagtcatgctcatgatggagattgggggacaacttcagataagaccgtcatggaaggcttcactgatgaagcaatatgacagcttcactgatgatggcttcactgatgaagcttatgcccatgaggagggagtcagaggaagagggggcaaagggcagcagaaagaagacaagaggagcacagaactggaaggcacagaggagcagacccatgttgaagcagggacgggtgatgaaggtcatgctggtcatgcagccacatacaccatggagagccagttggagggttgctgccagggtgcctccaggatcgtggccaaaggtatggactggttcatgacatatttagaagatataattagaagaaggcagttcttatcaaatgaaaaggctgaacaagaaagaggggatgaggacatttcccatccctttggaaactggaaggatggtgatagcagctcctggactatggaaatgtaggaagaaacactgatagaaagctctcaggagcaagattccattaatgaccccatattgcttttgttacacttctttagtctctctaaatctccagccacctttgtcacatgattctcttgagtatttgatattgactcattaaagaaaccaagtcaggttgcagggtagaatacctcacagtctggatttgtctgattgttttcatcccatgtcacttctaacttgttcctctcttcctcacatttcc

SEQ ID NO: 469523 - DNA, 1168 bp, Homo sapiens
agtagtctgacagcaagaatataatgctcaattctaaactggagaatgacacagttaattttgatgcaactaacctaaaagataagcatattctttctcaaccactttgtaaagctgaaagtaaattcagtagcctagaaattgatctccatcatacaagagatgctctcagagaaaagaccttggttttagaatctgtacaaagaaacctaagccctcatgcatggcaccagagagatgatttagggtatgtggtggaagaaatttctaagcagaaaagcattcaagagctgacttggatcctgttaaaggcattcagttttacaagggaagcagagcataaaagtttagaaaatgtgtaccctgactacgcgataggaaagaaaaacccattttctggggagaaagtcaagccggctgcagaaatttgtgatagcggccctcatggagaacctatgctagtggggaagggaaatatgaggtcagagcccccacacagagtccctactggggcaccacctagtggagctgtgaaaagagggccactgtcctccagaccacagaatggtagatctactgacagcttgcaccatgcatctggaagagccgcagacactcaatgtcagcctgtgaaagcagccaggagggaggctgtactctgcaaagccacaggagaagggctgccaaagaccatgggaacccacctcttgcatcactgttatgactccggcgagcctgtgtttctgggagagcgctacggctacggcctgggcactggtggctacagctacatcacgggaggaggaggaatggtcttcagcagagaagccgtcaggagacttctcgccagtaaatgtcgatgctacagcaatgatgctcccgatgatatggtcctgggaatgtgctttagtggcttgggaatccctgtgacacacagccctctcttccatcagactaagaactgtgttgacaggctccaggggaatgtccttaaccaggactgttaccctgtttgatgtacacactgtctcatcccagcacagaatttaaagccataccaccaaaagtacctgtgtgtgttaatatgtttttcttgtagcatagattgactatttgcaatagtattagtatttaccatttttccaaattagcaactaccagacctcac

SEQ ID NO: 469524 - DNA, 618 bp, Homo sapiens
acttctggcatttctataggcgctcacccgaaaggcaaggtgatgttaagcagtaatgactacagaatgaatcgtgtctgtgccaaatgctgtggaagagatgttcaggatgctgtgagaacatgctgcagggagatagatggcttttgcctagactggggagatggatctcaacagggagccatcttgcaccccagggaacagtcaggggtgctgctgaacatcctacaaaggcacaggacagttccaccccaccatcgaacaattaattatcggatccaaaatgccaacagtggcaagcttgagaaactgtggggtaagggtcaaggaaggcttcctagaggatgtgacgttagagctcagacccgaaagggaagcagaaatcagctaaatgaagtaaaggacgttaaatggcctcagcccgttgtgaaaatagccccattcagttcccttgagttcctgtctagttgcccttcccagtgtgtgtcagacttcagcacacatgagaatcatctgtgtgtcctaaagaagcctgtatttgttaaaatgcagattcctgcgttccagctccagattttctgattcagaagatctgaaatgagacttccaggactctta

SEQ ID NO: 469525 - DNA, 618 bp, Homo sapiens
caacagcgaaatccaaaagtccagaagagtgccttcaacagactggatgaggcccacccacattggggagagcatctgctttagtcattccaccaattcaatgttcatcccatccagaaacactcccacaaatacactcagaatggtgtctgaccagatatcagggcaagttgacataaaattaaccaccacagagctaaaaccaaaccaagccaaacaaaacaggtatctgacaggaagaggaagaatggcgagtcagaaaaggcagaggggaacaggagaggatggtgtcagaagcttggctaaaatggaaaatagaagcaaaaagcacagtctgtgggtgaggatgaagggccccagacttttaggggccaaaaccaaaagtcccaaagtctggcacggcatttgtttggagaaacatgggctagtctggagaaatcataataatttgatcttgccttttctggggttagttttcatcctgccttgtaaaaaatgaagccactctcccagtgtttacttttatcctcctttctcagtcttccttactaggttcgtttctctcccctcttctctaggtgctcttccctgggctgcaatggtttgtgctatactttt

SEQ ID NO: 469526 - DNA, 1567 bp, Homo sapiens
aggtccaggaaaaactctgtctgagctcttgtaggatgggcctggtgatgacaaaatctctcagcatatgtttgtctgtaaaggattttatttctccttcacttacgaaggtccctcagctgcaggtctgttggaattcgctggacgtccactttagaccctgtttgcctgggtatcaccagtggaagctgcagaacagcaaatactgctgcctgatccttcctctggaagcttcgtcccagaggggcatccacctgtatgaggtgtctgtaggcccctactgggagatgcctcccagtcaggctacatggggcatcccaggtcaatctcacactgctgtgctagcagctagcaaggatctgtgggtgtgggatccaccaagccaggcacggggggagtctcctggtctgctggttgtgaagactattggaaaagcacagtatttgggcaggcgtgtaccattcctccaggtgaggcgacaccctgccctggttcagctcgccctccatgggctgcacccactgtccaaccagtcccagtgagatgaacgaggtcctatttttctgagattttattatgactaggtattgaatattaacagatgcattttctgcatcgactaaaaatgagaaaacaatgtttaatatacagatgacctccaacttgtgatggttcaacttatgttattttttacataaaaagagtttatggtgattataattggaaattattaataaggctacttcttgttatgccatcatgagaaaaagaagaaatcaaagtatgtcttttagaattttctttcaaaacactatgtcactgcctctttttccctgttcctgtcaatatcctgtgtagggccttatattcaatcaatactaaagaagctttaaccttggctaaagactgactttgttatttcatgggttttagtttgatttccccatctctgaaagcacgaagaagtgtggacatgatcttacgtgtttgaagtaaaatccttgattgtatacaaaatactatgttacagatattaaagataaccatatcttcatattggattataatttctatgtgaaggcaatgtagccatcaattgttaaagcactgattgtcaatgttgagtaagctgatgcaactaatcaactggccatctttttccatcttgatgactatccaaatattctatattttaaatatcattcctgaaataacatttctttgattgaagttatgttgtaacacaaaatcttgaccatttgagaacccaaataacttacatacctaaaaaatttcagtggctttttgaaagttatgagatcttttgatgaaatatcatttaactatatttgtaaaaattcaaatgattatctgttcatatgccaataggtatctctaaagaataattataatatattttttaaaattgctaataaaatgttttatttttagggtaaaaatgattgattttagattgataagtttttgtgagatttagcaaaataagtgaattatttttcccctaatgtgaaaatagaatctatcatttacaaaaacttgaaatgtt

SEQ ID NO: 469527 - DNA, 796 bp, Homo sapiens
gcaacagtccctatttattccaaaattaagctgtggcccagttggcccgcggaggtgcaggtagcactagagcaggtggaggagcatggactgccccgtgggcaggtgggtaacattctgagagcacaagagctggtaagcaacgctcttggtggctttgagcatgtacagctccatcgggtagtcatccccgggcaccagtgagttgctctggagccatatcataggcagagatgatagccgcctctttctgctgctcatccttttccacctcaaatctggccatctctgcttcccgctgagctacctgtttggcttccactgcttctgtgaacgccttcctgaaggtcacatgcatcaaggacatgacgtccaggatgagcccagagcttctacttggatagacagagcagaatgtggagactcacattatcaacttttgcttcaagatgaatatgccaagaaagccgagagaatccacagaccctttgaaggaagtggattgctcctgcaggacctgggagacagcccaaacactgtgagtgtccaaactgtgaaagtgggaaaaggggatcatctgcccctgaatgcacaccctcactggggaacaggaactgggaaaagactacagggagaaggaaacctccagctgaattttgtaacaattccaaatgaatgtgaagtttcctggcagaacttgggggaaggcagaattcagtgtgaagacatgacaggcaggagacgcagaagccctgcttgctttctgggccaggaggccggtagcctggggtaagtt

SEQ ID NO: 469528 - DNA, 698 bp, Homo sapiens
acgcataccgggatccttggtgtcaaatgatttcatttcagagagtctggcgtggtgtcagcagccttgcatctgtcaatgagatgtcatcgtgaagcaattacgaacacagccaggggtcttgcaagaccatggagggcaagttttccgtgcgactggttaaagagtgatccacatcctctaaggactggggaagcccatggtaatgttgacatcattttatcaaatgataattctctcaatctgcctttctggtgttccaagtctactacaaaggtggcctgttataaagagtggacatttggccacattggaaaagcaagcctatcttcttggcctaatacagtattccagggtgttgcacactgtgacacttctgctgagatagcaccagtccaaggttccagagaattgggtgaggctgtgggaaactaccgagaacattctcccccaaagcttcctgtgggcggcactggacatcttactgatactgtctgattctgaaatttgggacaatcccacttaatttacgttgattatagaagctcaaatatttttcctagtcttcaatagtttccattaccttcccaattttcttttatccttgtcttccacttcaaagagtgaaattgtttccttaaatcaatccattcagtttttcattcattcagttacttattcatgcatgtctttattcc

SEQ ID NO: 469529 - DNA, 536 bp, Homo sapiens
agagatcttttatctctctcctggatcccatctccctgttagtccctatcccagagagcactaatgtgacacaatgaaaataagctgctcagatcttctgctgcagggagcaaagttgatgatggttccagctgactcccttctggatttactgctgttaacctgccttcctcaggcaggtgaagaaagtgggaaggataatcaagaagaaagaacagaatgttcaagttatggagtgatgcaacggtataagctgattggagatgggttggtgcttgaccaaagctgggtcaatcagagtggaggcattgttggcattaagataacttggtcttgtcaagctggagtgggtgtcatcttctggccttcatctttctttcgtgctggatgcttcctaactttgaacattggactccaggttcttcagcttttggactcttggacctacactagtggtttgccaggggctctcgggcctttggccatagactgaagattgcactgtcagcttccctacttttgaggttttgggactc

SEQ ID NO: 469530 - DNA, 927 bp, Homo sapiens
tcccccgatccgagtcacggcaccaaatttcatacgcctccactagggagtgccctagtggggactctgtgtgggggctccaaccacacatttcttttctgcatttccctagcagagctctccatgagggctttactcctccagggagactctactcctccaggtgtttgaaagttcctcctccacatgctctctctctctctcctgccaccttgtaaagaagaggcctgcttccccttctgctatgattctgtccatccacaggaagcaggcagctggccacagtggctgcagtggcacccatttctattttgacccatgggtctatcagtttatgttgattcgcattttacttggaattccttgctcaccccaaattgctggtactctctcaggcaaagctgtgcacttcagttctccttatgtgcaaacagtttctcagcagtttcttacaaaacaaaacatactcttgccatatgatccggcaattgtgctccttgatatttacccaaatgagttgaaaacatgtccacatgaaaacctgcgcatgaatgtttatagcagctttattcgtaattaccaatatgtggaagaaatcaagatgtctttgaatagggggatagttcacgtggtgttgtgtccggaattggttccttcctatgggtttttggtctggctgacttcaataatgaaaccgcggacccctgcgaaggactgactttgagcatcatgaattaaactaaactctaacactgagcaaagaaaattagaatattttcatgtcttggctgttagagtacttgataaatataaggaattattaggccttttgaaatagctttgaaatagcacagatttgtgctgtatccaaggattcctgacaatgtaacagaacaacattgcggtatcatgaaaaaggtgttgtgt

SEQ ID NO: 469531 - DNA, 1199 bp, Homo sapiens
gcagttggataaaaccctgagaggaacgatgggacgctatgtgtttcctttgcttcggtgtcaggagcgctcagacaattgccagaaggaccccagggggaagcggaggcagggacagaacagaaggataagaaaattaagcatccctcttaccaactcacatcagcagtcaaactgtgcatgggaaaggttgttaactagaaacctcgagaaatatatggatacaaagaattccagctgtactcatgtaccacaagacatgatgattcctatgaactttctaggaatgaaaatgataaatctcttcaatttcagcactgcttctttgatatctatgcagtgcctgccaaaagcaagaggagagcatgtgttacggagacagccctgtttgggcaggctgcatagctctgtggctagaatgccaccccagacttttccatgtgactctataagtgatcttaggctagtcattcctagcccagtgcttaatagtatcaatggacaaccagaaagcttgtccaaacagctaatgactaataggtctcattaatcatttagttttctgactgttaatttttagcaaataatagttcaatggctactgcaccaagcattgtgctcagtgtatgtaaagaagaaaacaatgttcctggcattaaagaggtcattgtccaataaatttgccactcatatgaacttataaatcctgccactgatggctagatttgagactttgcaaaagagaagctgaaacactgggaaggcatttaaccctggttgtctaaaatcatgtgagctggtgacaaagctagacaaggggtctagtgtgtccctcaggcctgtcttccactactggactgccttgtaaaatatggttgcatcatttcaggatgaagagtagcgctgattattggctaattttggctcactgaggcttcgttatcgagtgtacttcctgagagccctgtatttcctggtttaattgtggctgatgacgtacttgtaaccaaggcacttggctcagcccaagcacttctatctggctaccagggtgcctgccaagtaaacaagcatttttctgtgctatgtctaaaaaaaaaaaagacgatgcaaagattaggggatcatggaggatgggaggcaggactagattgcagctctggatagagcagcatgcgaaggcttgcattgtgaatttt

SEQ ID NO: 469532 - DNA, 744 bp, Homo sapiens
cgaattttcagagtctctactgcaactctgggccacatgttattaatcttctaaatatgatgaacatgaaggctgagaaacagcaggacagccatgctatgggtgcactcatgccattagtggaagtagactgggaagtggcattttgtaatgcaattgtcatcccctctcctgtgcctgatgtcacagtggagcctttgaatgagactgccgctccagccaatagccgcactgcagccttctcagacatcttgagccagattaacccagttaagctgctcctcaattcctggcctataggaaccataaggaggtgggaccttttgggaggtgattcggtcatgggcgtggagccctcacaaatgatatcagtgctcttaactcatttgtctcttccatcatgtgaagacatagcaagaaagcctaactgtgaaacaggccctcatcagatgctagatttgccagagccatactttggacttcccaacctccagaattgtgagaaatacatttgtgttgttcagaagccacctagttaatgatattttgttatagtagcccaaaccgactaagacacaattgaagcatgtgaggcaaatgtctactcaaactattaagcaaaatggattttcattttattttttaatatttctagggataacatgtaaaaaatgtattaagaaagtcttgtatactcacaattataaaagatatttctttgtgttttttaagtatactctttgg

SEQ ID NO: 469533 - DNA, 1841 bp, Homo sapiens
acgttaggaagagacatcaggtgaaaatgatttttctaagacctagaagctggattgatgctttcaggaatgaaccaaatgtgaaggataaatgtgtcaaactctccctgggatggtatgagttcactcatgcagtgcacagagcagtgcctgccaagtcagaagcacttgataaaacaagctatgattatttttattatttgcttaatgatgaaagaaggctaaaaattgccagttctgaatggaaaaccttgcatcatctgctatttctggaaacacgaaggttgctgcttggtcccctggtcacaatgactttagaatctagagcagggaagtttaaggatgatgtagttcacgaggcagagatggggcaccattctttttgtactatcctattctctgtatgctttgatggcctttatttttatttgatttgaattcctcacaacatctttctcattgatatggaattgagttttgacatggttattgttaggcctgctgtcccccgaggtggctgtgtattaactgccatggcgcatccttttgcagcccctctgtggctttccttccagcctaatgcactgggctcatttcatcttgattttcaactgaattatatttactcacattttccatacagtgaagtaaacgttgattttattggctcattcattgcatcaactgtacttgtcagctttacactcacaatatatttgtaatctggtgactttttaccacctttattgccaaaactccagtctagtcatctcttgcctgtactactgaaataacctcctgttattaaactctattatcatagccattttgcctagtatcataagcacaatccattagcaacttcagatgtgaacacaaccaattgacttaagtaatcatgaaatagataattctttgtttaagtatgacactctgtcctttcatctttaggtcttttactatcctcatttggattcagaaaagtgaaggaaacattaaaagcctctgagttttcaatgtctcctgtaaacagcattccctcttcatataataaaggaatattttttcatttttacctttatcccccagtaaaaaataatattatgatatttttagatctaaaaccccaaaatcaccataaggacaatgggacttgaaactaacaactaggcgatggcagcatcctttagcctgagagctggtctttccatggctctattaacaaaactgctggtctttccgtataatgaacagttggctaaggcaagagcagacatgaactaactacttttgaccagtggaattttgggcatgtggtagaaatcaaaacttactcactgactgggcgataactcttagattttccctttgaggctattttcttgatcctataggtgtgcgtcattgttttttattctttttttctctggtttcctgactatgtatttcaaaatagcctatcttcacactaattcttctgtttgatcaattctgttattgaaagactctgatgcattcttcaatatgtcagctgcatttttcagctccagaatttttgcttgattctgtttaattatttccatgcctttgttacatttatctcatagaattatgaactttttctctctgttatcttgaatttctttgagtttcctcaaaacagctattttgaattccctgtttgaaagttcatatacctcgatttcttcaggattggtccctggtgacgtattttgttcattttgtgaggtcatgttttcctgaatgtccttgatacttgtgcatgttcttttgtgtctaggcattgaagacttaggtatttatcatagccttcacagttt

SEQ ID NO: 469534 - DNA, 1332 bp, Homo sapiens
ttctcctctcccctttgtctttctcgcaccacatcttttgtgatttcctcaatgtctctgaggcaccatctccactagcatgctctctaactcagactcagtgaaatgtggttcttggactagagtgtcctattacattgtctgcacaggtaaaccaataagcccagagaggaatgagacaaccagactgactcctttgctggaggagcagggcttcccaaaagatcaggaggagatctgctctactctttcctattctccagcagaattctggctatcccagtgttcctccagcatggcctttactcgttctgattcaatgaggaatgggaaagttacacttttcattctttccagatatttctggaccattgtggccccagacccatcagcctcccaggcctcagaccccagtgggacccctatttacttcccaagagctcgtagaacatttactggagactgtgggaaaatggccacttggaaatgttattttaaatcagcccttccggtaacaacatgaacattctgtttcataatctttacattggctctttccacatgcagtctacagtcaaatcagtccaaaattccagcaatatcactaagctcttcatgcactctcagaatttcttgtgtatagatttacgtccactagcagatcgtgaccctctatgagatcagagactatatcttatctcctagtgcccccaaatcaactttagcaatacttcataaataataggcactcaataagtgcttgctaaatgacttcattttaattttcccttttgcccgtttaaacccttgaaggattttgttgtaattaccttaaaatcagtatttaaccttgaaagttttagtatcaaatgcaaggttgaagatttcactgtgcactttctttctgtattatttttagcaatagaacatatgatatgtcctgcatgaatccctggaggcctcaatgtcaatgaatctttctcctaaaatatatgtgtttatccctgatctttgtctcgtttctaaataatgtcttcctaaaacgtgtaaagagcaaatttaaagaccttgttgtatacaaccttggaaaaagctcataatgggactttaagacttctgtcaggtctattttgtccacatattaatctgcccctctacttctgtaacactctaatgggttgaccagttatcatttctccttaaattaccttgcctttttttttgtctccatgttagacaaattgcccactcaccaggctagaatgaccaaaaaggtccactaggatgtttctagtgatgaaacttacattggctaatcccctgccctgtaac

SEQ ID NO: 469535 - DNA, 922 bp, Homo sapiens
taaaactaatttcagacttctctctccagaactatatgagcatatgtgtgtattgtttgaaaccacaaattttttggtaatttgtgacagcagctataagagagcaatacaaatgagaggaattagacagctggggctggaattgcgagtggggctctttagacatctcccccatttctgtgtggtaaatgccagcagctgtgccaatagaaaagggatacctggaagccaggcatgttcaacatggaagcttcatcttcctttctctttgtcaaccatgtgtgcagtacaggaacaagcaacttggcaccggccaggacacagcatttgccccttctggaggataagaaagaaagcaccattctggaagcagagagcaactctcaccagagatggatctgctgatgccttgatcttggacttcccagcctccaaaactgtaagaagataagtttgtgttctttataaatgactcattcttgggtattttgttatagaaacataaaaagaccaacacaatgggttaattaaattgtataatcagagactcacgggaatctaaccctgtatttctcctagaagcaatggttacaggagagtattcatcaacttagtatttttcagcaactttatataacacaactactgtgaaaaacaagaattgactgtaagttacagtaataatacccctttattcttaaatcctttgtgtgagtttcctaaaattataggtattcttttacataaccacagtagaattatcaaaatcaaaccattataactgatatagcttatttatatcatctataaaccatattcaggtttccccaattatctcactgatgtccactgaagcaaaataaaaatatgtacttttcttcttggtccagttcagcatcatacattgcatttatttacccag

SEQ ID NO: 469536 - DNA, 633 bp, Homo sapiens
tgagaacgggccaggatgacaatggcggctttgtggaatagaaaggggggaaaggtggggaaaagattgagaaatcggatgaggggatttactggtttcttccttttcttttttctttttatttcttttccaagagctcataatctcttgcttcttctggtgtctgacttctggtgtttgaaccacaggctgggatgtggcataatcccatttctctcccttattctttatggagaagccttgagtctgtgtcttcttccaattttgttaagctgtggattaagaaatttaattaaagagagaacaatcactgatcccaacccccagaagtactatgagtggggaggaaagttaaccttcaggacaagagtccttccacagcacagaaccatggccactcgggatagtgttagaggcattattttcaaaatttcaaaatccagttttaaagatgctccaaaaagaggagtccgtcagatgtcatgttgactcgctctgctttcacctgtgaagatgctgatattatacaagtatgtatctgtcactggttggctcttacctactcatattttggggttcatgagcatattttgttacctagattttttattaatttcatgattgttggaccct

SEQ ID NO: 469537 - DNA, 696 bp, Homo sapiens
cgtgagtcccgggaaggggtcaggaaaatatccttcttcaatatgagaaaggtggatgcatcatcaaatatacacacagaatatttactgttcttgctaaatagcccgacttttgatccagtgcatggattgcctgccttgccgctgttcccctttgtagccatagctgttcactgcttcatcaccccctaccccaaatctcccttccaaaaatgccccagtgcactcccaattgaggtacgatgccaggaatttctaatgccatatgagaggggacttgaatctggaatagagtcaaaagagtcaaagaaactgccaccaatgaatgaaaatgcccgggatacactatgcaaaataatatttttgtcagaggaaattgaaagctaccagaaaacacagagcagagagaacagccgggagactatgacatcaagatatttcaaatgtggaatttatgactggagagtcgtttcaaaggcatctcaaccctttgatcttaactgtggcaggatcaaagtcccattcggccactttcccactcctctgcatgcctttgagttcttgccaaaatggaagaactcaaagttgatggtggctgaccccatcgctatagcaagctctgagtaaacagctgtggcctgttctaatttggttggtctttattcccatgcgaggtgacatgtgaatgaagccttc

SEQ ID NO: 469538 - DNA, 667 bp, Homo sapiens
aaatcaagttgcttctctccaacatccaaccatagtctccaatgtccaactacttatcctcctctctgctggctgagtctggggattttatggggtgggccatgggtgattctggaaaaggcaacattcaagtggggaaacatggatgtaagctctcactttgggccaagcagatccaccaaagtggccataagcatcctctcccaatccggcctttgaagagaactcacgtgcatcttacagcttcctctgacagcaacggtgtattgcctgtcacactctcatttggcaagtgtaagaagattttgaaaaagaagaatcaagttggaggaatcattgtacctgattttaagatttactatatagcagttatcaagacggtatggcattggcagagggataaatgcatagatcaatgggacagaacagagaacctagaaataaaccacacacatatgctcaaccgattttaaaaagcactttatgcctcatattagcacaaaatcatatttttattgatttcagcctcttttgcctctgggtttttgtttgcagtgccatttccgcaaactgtacatttcttgtctcttcagagaaacttcactgactcttccagcctgaagtagtatcttctacttctaagcttaggaagaagcatttcatattt

SEQ ID NO: 469539 - DNA, 1056 bp, Homo sapiens
cttatagagcatgcaaactcaagcccatctttatttttcttaggttcatcacagaggcacagggctcgtaagacacatgggcctgctgtgtcagagccctggcactgggaagtggtcgactcatgggttggtaaaaggaatttaccgacaacagtatagaacgcccttttttcaatcctccctgcgattggctacttttaggatcctgctgattggtgcattttacagagtgctgattggtgcattttacagaacactgattggtgcattttataatcctcttgctagctacagagcgctgattggtgcgtttttacagagtgctgattggtgtgttttacaatcctcttgtaagacaggaaagttctccaagtccccactcgacccaggaagtccagctggcgtcatctctcaaaaggacgaagcacgcttccttctacctgcagctgagggaatgtggtttcaagacagccactcagagagcttgacacttattccctagaatttgaggaaagcagaaacagatatctgatgcaggcctcaaaagtcaaggatgtgactccctggcctagtggagagggaaagtgccacagctatgttcatggctgaggcccgtataaacaaaagacagattaacaggagaaaagcatacaaatttatttaatgtaagttttacatgacaccagagccttcataaggcaatgaagacctaaagaaataggtcatagaaacaattaagtgtttttatgccaagttggatgaggagtagagagtcacgtagaaatatgatagggcaaaaaagggtcttgcctgactacctgggtcataactcaagtacttgtaaagtcacggagctgaccatcattgcaatgcattatgggctgcaacaaaatgcagcaagacaaccctaaaaaaaacacctaaaagccccaacccaatgaccaataggcgacgtccgggaagattctgtaataatatttactttatatgtataggtgcttcagtgttgggtgcatatatatttacaattgttatatcctgttgctgaatttaccc

SEQ ID NO: 469540 - DNA, 1902 bp, Homo sapiens
tcatcacagtctgaggcagaaaggatttcatcaagcactcaactgattgtgtctgaagaaataacaacccaaagagcacccaaaatggatttatttagcagcaagaaaaatttttcattgaacatctttaatacattctgttcagaagaagaagaagagggagagggagagggagaaggagaaggagaggaagaggaagaggaagaggaagaagagaaagaggaagaagaggacgaggaagaagaagaagaaggagaagaagaagaagaagaagaagaagaagaagaagaagaagaaagaagaagaagaagaagaagaagaagaagaagaagaagaagaagaagaagaagaagaagaagaagaagaagaagaagaagaagaaagaaagaagaagaagaagaagaaggagaaaagactggagcctggagctccttttctctctgccatttagggagagaactgtatattaaaaatgataccatgaggaagtttttaccatgaggatattatggaaactgaccaattattctaaataaattaataatagtaatagtaacaataataatgaggcagtgttagctgcaaatgtatttgctattgtaaatacactttattttttaataaaataaactgagtttatttttaatttataaaagaataaagtttataattcatatgtaaattctataatgcatatgtaaattataaaatttatactataaattatattatgtttacattagaaattatataagtatattataaattatatttaaataagtagaaattataaaatcataaattaaaatgattataaatatattataaaaataaaattatttaaataattatttagttaatataattatatattaactatatataactataattatattaactatacataattataataatcacatattaactatatataattataataatttatattcactatctattataataattatatattaactatatataattaaataatataattatatacaataatatataactatataatataataacataactatatataattatatgtaatcattatataattatatattatataattatagtacattctaattgtataatattaattatgtaataataaaatgattatattataatacttgtctgaataaaaaataaattatattaaatgtggaaagattattagctcaagatgaaaattgatttaaatcatccattataaaagaggcatggaaaacagagagtaatacaaaacaattcaaaaccatgctcctcttccttcttactagctttattcaaagaaaatatatacatggcaagtatttggcaaatatttccatcctgtttagaagattggaaatctgagacacaaatatttaaatattttactcaagactaataagaaagtaagtgatccacatgaagaaagtgttcaagctttcccgtcctttaactttagttcatgctgccccttgtaaatgtttatcatttatcttcaaggctttctcgaatagtaccatgtatagaggagctcatattatttgataagttagcattttcttaacaagtctctaatgtaaaagacaagttcaaaattccacatttccactgagctgtccacttaaaatggttaagatgataattggcttaagtgatgtctaagaaaacctaatgtgatagagttctgaatagttttttaattgacagatttcttctgaaaactgagatattaagcaaaacttgttatcatttcaagttacttccttgtaaataatttttaatagcctataaatattagatgtttacctaagcaagaaccttaaagttaaatgcagggggatttttgccaatagctcagaggattcagctacttttattaaa

SEQ ID NO: 469541 - DNA, 620 bp, Homo sapiens
gcagtgggcacacgtcccttagttccaggctgcacgtcgacccccccagaggagaagagtttcctggaggccggaaactcctgcctgcctaaccccatgggagacacaccaaatggtgggccggctcctccgagtgctgctcggaggagggtggtggtggtggtgctgctgctgctgctgctgctgtttcttgctaaaaacagaaaggaggaaacagggataaattcatccctttcttaccctcatctcctaggaacccaggacctttactgcttgaggctcagaaaagaagagtcagtgtgctccaggcagaagaacacgtgcaaaggcactgaggcagagagtgtggtgcatttaaggaactgccagttcctctatttcttctatgagtatctgacaagtattggtgttgagggaacaggggatgcaaagagagataaaacagagacccagggttacacaagtaaaatagaggtatcaataaaatccattaaatccaaaggatttctcaggactccaaagatggatttgaacttgtcgtttttcccttattgatatggtttggatgtttgtcccctccaaatcttatgtggaaatgtgattcccagtgttggaggtgg

SEQ ID NO: 469542 - DNA, 663 bp, Homo sapiens
ctctgcaggccatgaaggaaaaataatggacacagtgacgtgtaaatccactgagcaccttggacatcacaaccagagggtcatggtgggcctgcatcatcgggctcctctgcttccagaggcttcctcctccaaacaagatgccaaaggaacctttcaggcactgaagcacaatgagaaggacagagcagattataataaaaaggcatcagctgctcggcctgaggcccaatggtgcatgtcccctggagctcccagtgtgggtcttaattcggtgatgggactgaagagccactgcgtgtgggcaccagccagctgcgggcggatgtccaaatacacagaacagaccatttctaccttcatgagtgagctaccccactggggtgcaggagacacgttaccttctgatccacggcaggcaggggtgacttcagatctgctgtatgccatgcttctggcttttcacaggcaaactagagctcagtggggtgccctggggggagaccgtgaggcaggagcagaagcagaagccttttagaagagcctagcatattggagaccaggagaaagcaggagaataacattttatagcattgtatttcgtgcatatttcatcatgcaaataagagtgtgacaattagtttctctcccttggcagcgcct

SEQ ID NO: 469543 - DNA, 760 bp, Homo sapiens
ctcctcactgaccatgactgcttcttgtcttggctgccctgaccatggcgtcaaactggcctctcactcattgtcatttcctgcaggccttgacctagtagatggtcaagaagtgatgcatgtgcaaaagctaatgcatttgcaagagaaaaatggtgaatttgaaagactggggaaaaaagaccaatgtgctgccatgcaagaagcaaagagtgacaatgcagaacaatctgttactgaagtggagaaagagtcctactgtttgctggtgagtcacacacagagtcaagaaagcattttgagcagtagagtaacccaatatttaaaattatatgcagcagctctttcctgcatgcacaagttccctccaggacatttttgcattcattcctgcagagagtcctagctatatccccaatctaggaccaggttttatgaaaaaaaaaaaattttggtttggctgctgggtagtggtagtttggtttggattatatgggtagtgtaaatttactacccaaaactcggatgaaacgtggtcttgtggttatggatttgggggaaggagggtctctttttctctactcaaagacaaactagcttcctttatctttctgtgccagtgcacagattttcctactcaaaccttttgctgagggtacagccatttaagcatctggattaaaggaagggtttggctcatttgaagctctttttcatcagctcatggcctcaagtcctattgccaaatgaacattaaaat

SEQ ID NO: 469544 - DNA, 826 bp, Homo sapiens
aggcctgagctcctcagaaggatggatgatgacatgagcccagtggcgctgtgcagtgccaaggacccaggctccttgagacttcttgctcttcatctttggtcgctggctttcatcctcaaactcacctcatggtgcaagatggaaggagcttcagcagccatcattctggaagagtcccactatctagatgcagcttgcagctacagtcccccaaggcatggtgtaattcaagctaagctgcttctagagaagacggtcttaggagatcttggccgccgtgccaataaagtgactcaagaggctgctcagctgcccccagaggtctattatttttatcaggactgtggaaagtgggagttaaatcccttcagccaactttctttcatgtctcattggccagaactgcctctgcccaagcctcaccctggaagggaaaaggagctaccacaattggcgtaaacttatcttgatacaccgcttagggctggagctggggcccattttccctaaagcacttagcgacgtgtaggaggctggacacctggtggaaatcttaatctttctgagactcagttcatctgtaagactgaactaatagttgtgtgtacttcacagactggttgtgttgaataaataagataatgggagctttgtagatagctaagaagataagctctatggcctttcagacactacagaagataagcaaacacagtgtaaggtagtaagaactgtagtgtaatgctagatgagactggacaggcaacactccaggaggatgctgaggattgagtcttgcattggacctgaaggacttagtgga

SEQ ID NO: 469545 - DNA, 880 bp, Homo sapiens
ccgccgttcattttgccctgctttggaaggacggttttccagtttcattacccacgctttcgaaagtgcctttgggggaagatggcggcagcacccatggcttggtaagggatcactcccgactgattctgacaccctgttcatggagaaccacggggctttgtggaagggtgtagtcaagggcagatccagtgaatataagaaggcgagaaagaccagtgcacaggcaattgaacgagaaacaggaatgtcggaattcgagggcttaggagtgaagcatttccagcttgcatcaagaggactgatgaaggagaagccagccgttggaggggaagctcagggagtgttcctccaggatacgaggaaggtcgtgtacaaagaggctgaaaaggctggggatggttttagggcttgtgggacttttcatcagatcttaatacagctggtgcagaaggcaacaaaaagtgggataagcactctgtgggacaaccttggacagccaggcctcgtcctgggtggggggcagaacaggcgtaggcccgtggagacaggggaatgggaaagacagccaactcatttacaaagaggagagacaattgctggcttagaaagctgtacagagcctttactgtttctaggaggagagactggagagggagatgacagcccgggatccgccatgctggaggtgaccccagagttgccttttattacaaggacctttacaaacgactcaagtctttcattcttcactttctccagatgtggttttgaagtgtacagtgacagctgatgcgtttttgtgacactgctttgatttgtgctaaggaaccagcagttttacctaccattgcttttgtgtcattaaggcaaatatcaa

SEQ ID NO: 469546 - DNA, 658 bp, Homo sapiens
tttagaatataaacattttatttctacccagacatgttccaacttcctggcctttacagcgtgggtgtgaggcagaaaatcagactgactgatgtgggtctgggtgaagcaggaggcaggcagcccacagcacagtttgttacccctggcctgaaggcctttgaatcacaagcctggtgtaagggtgggagacggagtggaaaggtagtgatggagcacgaggtggtaattgctgcggcaaactgccaagtaggaacttacctctctgtggtggatgttctcaactcccagggtgcccttcctggtcctccagtcaccagccatctcattagcatacaaaaagacactcttagcactctggagattccaagggtcttagaagctctgtgtcagggaccagggactaagaccaaatattataacaaaagatactcctatcattcaggaagttagaaggatttttcctctgactaaaatgtgctgtggagaagatgtttttgaattgtatctatttggggatctctaagctttctgtatctggatgtctaaaactctaactagagttagggatttttcagccactattttgttaaataggttttccatttttctattgtctttctatttttctattgtctttctattttaatattgcctt

SEQ ID NO: 469547 - DNA, 684 bp, Homo sapiens
aagcagtttaataaagatcacaatgaatgagattgcagtctttctgagtcactttgttttgggtgtgtctcttgcgtgtagcgtgtggttggctcttgccttgggcagtgaacatggatcagtccatgggacagtgctccctgccccatccctgcacgtggcagtcattaccaatccattggcacaacagtcccaggatttggacatcctgaagcaggtcagtgatgatgaagcccatcaaccttccgttccccttgaggattttaggctctcagccccagagcctcccacagtgctgaggactgggagccaaggagatgccggcttttggagacctgcttttgtgtttctgggctctctcaggctacacaccagaccaatgaaaattagaatatctggcattgaaccagcacatcaggattattttaacttctcaggtttatctgaagagcagtcatggctgaagaccacttctgctcccccaggtgtgatcccaggcccctgtcacctgggagcttgttagacctgcagactctcaggcccatcccacgatactgaatcagaatccacattttcataggctcctctgatgatttgtaggcatattaaggtttgagaaactgtggtttagaaattacactgtaatttaatagttcttggcctgccctcacattcaatcattcc

SEQ ID NO: 469548 - DNA, 780 bp, Homo sapiens
tcctcacagtggccgcttcaaataggctgcagccaccatcgattccagaatgttttttggtgttgagcattcagaattagttcttccagtgcccgaacaaaatgccagactgagtggcttcaccacagaaacttttctcacggttctgacgctggagagcagctggagacccaggacgactgcacacccttggcattctcgtcgagaaaagtccaagaccatctctccttccctggaccttggctggactatgaaggctttgactaagagaatatattgtaaaggacatgattccagttctatgctcacctgtgtgaaggctagcagcttggtcttagtgtgtccggaatttattccttctggtgggttcttggtctcactgacttcaaaaatgaagccaccagcgctcgtgatgtgtccagagtttcttcattctggtgggttcgtggtcttgctggcttcaggagtgaagccacagaccttcgcagtgagtgttacagctcttaaaggtggtgcttccggagttgtttgctcctcctggtgggtttgtggtcccgctgacttcaggaatgaagcctcagaccctcgcgggataccagtgattcataaatttggcctctttacataatcccatacttctcagaggttctgttcattcttttatattattttttccttatttttgtctgactgtcttatttcagagagccaatcttcaagttctgatatttttttctcttcttggtttattctgctgttaatacctgtgattgcattgtg

SEQ ID NO: 469549 - DNA, 634 bp, Homo sapiens
caccattttccgtgggtccagttatttccttgattagtctcaagtgtgactatcggtatggaattcttcatacacagttttgagctgctaatatttcattatgatgatttgatgcatgaacagatgatgtggcaggaatggctggctgcactgccatccatgacccatccatcctttagtgttgtggctgggggcagctgcccccatggtccacaattcccagcccctcagcctgcagccatccgagtcttctatgcccgttttcatggacacaaggaggttgaagctttcaggtattgtaaagagttcagacaaacgtggggacaagagtcaaacaccaaatctggaccattatatgagaatggctgtgaaggagaaggcaagcttctgggtggcccagctctggaagtcttaatgcctgtccacaaaatgtcagtagcacctccatttattttgacaaaacaattccacaaatttgcaaaatacccactgagaaatgaaaatgaaattgtaagccccccaactgactgaatgtgtctctttttgtccaagggtaccccagagaaagttaaaaactgacttttctgccatgacttgatggaacgttgaacatacattatgcctgtattagtcc

SEQ ID NO: 469550 - DNA, 755 bp, Homo sapiens
aaactaattccaactggctaatttaaagagagtgacggggtgagtggtttggcaggaaaaatggttatgacagagcagttaatcggaatgagtcagggtggagcagcaaaggctgcctgtggaaaggatcccatgtcagttagatatgggcaacaccagtgccaccaccatggtcattgcctggtagtaacccagaggggccgtgacatcagtggaaatgcagcatggactcaagtgtcaatggttgaagctgcttttggactcttagacttactccagtggctctcaggccttctgtcacagactgaagcctgcactgtcggcttccctacttttgaggttttgggacttggactgggccgctactggcttccttgctcctcagcttgcagacggcctgtcgtgggacttcaccttgtgactgtgacccatcatggatcgggaggagagtcagcttcaggcagtcagcctttccttgctgtcctagctcagccacccattcacatctttgtgctgatacttaccacattatattggcacatgcttttactactgatggatggtgctttcccagggaaggctttccaagtattcaaagtaaattgagtgtcgtcgtctaattatttggtcactgtggccttatctgctccaagtccagtaacactgtgactcttgcagacttgtgaaggtactgcctcagtagttttgggtaagaccttagagaattaccaggatttccaggcagagactcttgt

SEQ ID NO: 469551 - DNA, 725 bp, Homo sapiens
caccgtagccaacgcagctcacgatggtctgggtctcacctgaggccagcatgtcagagtttcacccttctcttcaaggcagcagcttcccttctggtccaggggtcgaaaagagctatgctgcttgtgttgaagatggaaaaggaaacagtgagtcaagctggccgacacttacggaaaatagaaaaaaacctatgttgaaattccgggggtgggttcccccaataccctggctcacacttgacttcacacaggtgttgtgccttcctctggattctggatgtgacttcgattctgtccctgtccaagcagcacagttcccatccctaactacagtcatcttactgcagtcagtaaagttttttggtaagaaagtttatactcaacaacagaaaataagaatggaataaaaaatgtagaataagataaacactaaaatgcagcagaaattcctgtgtaacttaggcattgttatgctctcagaccaaaaaatggaagcaagagctctaaaacttttgtaaaaacgtctgcccagcaactgtctatcaaaccttgaactgacatctcccttattattgatccttgtggccaaggataattgtttcacttgaaaaccttcctcttgctttacctccctgaatacattcgcatatttcattgtaacgttcaatactgaataaacattattttctttttaagagcctttatgttaattatttaggttt

SEQ ID NO: 469552 - DNA, 614 bp, Homo sapiens
gaagaccgtaggtacctgaagtaaggtggctcttttccaggaatgccgataagtcttcagtttggggtagctctcagcatgctgggctaccctgcaaggaggtgcctcttctgtgccatggagcctgctcaggggaagaggggcagcccaggttcccaggtttccaggtttccaggcaaaaagatggctgtgggtccccccagcttccacactccagaccctggaggggagagggtttcccctggtatcctcatggcaacaagcctgactggcagtgaacaaaccactgagtcgggcaatggaagccatgctttctacccactccctccatggtgggaaaggccaagcaggcagtcttgggaaggaccagcgggcaagggggcatgtgatcagatgccccttggtcccatgacaatgtcagtgaggcctgtcttggcgccaaatgtccactatgtttgtaaaaatattactgatcattttgctacctgccagtattgagttgctatatttgtatcttttagataattaaatgatgtttgaattatccttgtagaatctctgttattttcaacagtttttacccactgttgactcttgtcaatgaaatgaccatt

SEQ ID NO: 469553 - DNA, 826 bp, Homo sapiens
ttaatctcctgtcccagacgactgtcttcaagataccaggcgctacttcttgagggaccagtgcttcaaatacgtatgtgcacggccctcaaccctgccacttttctcccagaggatggggaaccaatcaagcatgactgccaacaaattatagtccagacttatgcagcccaagatgatctcttagaagttcccttagcgaatcctgacattaacctatataccgatggaaattcatatgtggagaatgggatacgaagggcaggttatgccatagttagtgatggcagtgcagatgggaaatgtggggttggagcctccacacaaagtcccctctggggcactgctagtggagctgtgagaagctccagccccaacagtggtagatcctccagaccccacaatagtagatccactgagagcttgcaccatgtatttggaaaagccacaggaactcaatgccagcccatgaaagcagctgtaccatgtggaggcatggggacagagaggcctaaggccttgggagtccactcctcgcatcagtgtggataaatagttaccaaattttcctttgttaaaaaatttattttgctatgttaacagctccatgaggatgcattcagtgtgaaaaaagaaaatatcttggggttgttatttacttgatttatggagtggacatatttaagcaatggccttcactagataagaagatattctggatttgcctgtttttctttggtaaaattatttggcagatgttaattttaagggataaggataaatacttgagaagacaacaaatatatcattttgttgtttttataac

SEQ ID NO: 469554 - DNA, 1892 bp, Homo sapiens
ggcgaggacatccacggcccctttcagttcagatgtaatcaagttaaaatgatgtctttaggatgggccctaatccaatatgactggtgtccttatagaaaagggaagtgccatgtgaggacacaaacgtataggagaaggccatgtgaccagagaggcagagactggcgtgaagcacctgcaaaccagggagcactgagggtgaccggcaacaccacaggcaggagagcggcaccgaacattagcttctccaggagccttggagagagcatggcctgtcggcgcttcagttttggccttctagcatccataactggccggctgacaggcagtgctgggcggaccctcgcagccctgccggggctggctgtcccgcctgtctttgatgtttataaaaatggcatcctcattaaagcagagaacacaaaatcctgccacctcaaggacacgtatcccttcatgaaaggataatcaggtcactgtttgtcacagaatctgctgtgcaggttgttgtcttgtgcctggggaaagcaggcaaaatatttatttcaatacccaaagaggtccttgaagtcaagattttatgaagattaagatggataaagaattattgagtccacactatggaacgtgataccttcatacattctactaaatggctagtttatgttttcatacacagtggagtacaaatgcttcttgttttaacttgtaatcttttctcactgaaaaaagatgataccactactgatcgatgactgagaaaactgccttgctatggtcctttggttgtgttatcatgtgtctcaccttctcctgtacctgtatttccaaatttcttgctggtatatggaatttttctgatatgagtgttcaaattatgacttggggagatatctctgtgtttatgtttgtactttttcaaaatacataattaaagcagatcccttttcaacttaactgttttagttgttttatgtcagttcttaaatgcatagaattaaaagcttccccttcaacccaaaacacttcccagaaagagaagcagtacagccggtcagaaaagaatatggggactgaaggtggtccgtttggatccaatcttgcaactagcaactgacactaactacctgtgtaaccataggcaagtgttttggcttctctgagtctcagttcgtgtatccataaagatggggaaagcaacactgcctactgcatggaattatctggaatgtggtaggagcacaacatatgaagcttctggaacaatcactgaaaaagagtgagtgctcgaaaaaaattgcaggctctttttatcttttgctttattaattgtccaggaactgtgcacagaatctcttagcatggaattttagctccctgtttctgagtcttccgcatccagcccaagcaagtgcctcatcatttcagcctagatcaccgatgaagcaagaaatattattaaaataatgtgatatcggaaattctaagtacatatttagcaacttgggctgattcgtagctattgtgaagaagagctcctttgtgacagttcttaaaggattggctaagatgatttgtgattaggataatgtatttaattgatttctagtgcaccggtcacctgagtagtgtacattgtaccctacaggtagttttctatctctcacccccttcacaaactcccccattctgagtctccactgtctgttgtatcaccctgtgtacctttgcataccccataggttagctcccacttataaatgagaatatgcagtatttggtttttcattcctgagttacttcaatgcaaacttgctgcaaaagaaattttgttcttttttttatggctgactagtattctatggtgtttatattatatacatttcatt

SEQ ID NO: 469555 - DNA, 900 bp, Homo sapiens
tccagcaaagattgtgacagtcaataagtcatttccagaggacacagtggaggagcgtgggggcgcggaaatagaatttaaggagccagaataaaaatggatatgttcccatcgggcaatgctgaggaaagtggttgcaaagaggatggctagatctgaagagactccaatactggacgccccaccgtctgcgagagaggagacgttgtttcttaagactttatggctgcaggatgcgattccctattcagaacccattttaactggaataacggtggaaaggcaacgtattgtctacaaagcctggctctgttcccagtattttgaagtcacacagtttaactgcagaaagacaattccttgcaagcaatactgtttggaggttcagacgaggtgtccatttatattgcccgacaatgatgaagtcatctacggaggcctctccagtttcatctgtacagataagagagaagggcaagttatgtcattgaccagccatagccgttgcacacgagaaagtgaaatgcagaatgatttcacaggcctgtgtgttattctactgacttgatgctcaagtcattttttatgtagctcctctctgctggagggggaggagggggaggaaggagggaagagggaaagaaggaataagggaaggagggaaggaggatatcaatatcttcttgctttgagtttgagacaaaattcaccagacacaggctattaattcatattgaattttgcatacaacattccacaaataaccatgaagataaggccttcattttttttttcttgtgggacaatgaggtgtctgtgacatgaggacttcagagaagctattcgatttttatgtacaggttgtgtttatgcatttacactcacattggcttttgtcct

SEQ ID NO: 469556 - DNA, 919 bp, Homo sapiens
gaaggaaagtcaccctttgctcaagccagactatgcgcactgccctcagagaggcagtgccagcgcctgcactgctgagctggcaatttcactggatgagtgttcattttcactcggtccccctggccccgcagctccagggtccttaaggttcaacctcagagttacgtctgatgccaccaatgagtaggaacaggtcctgtggccgcactaaagtcaccgggactacagcagttgatattacatactttcgaaatattgaaataaagtgtgcatgcttatgtttgaattgataagtggtgctcatgacacaacatccaaaagacccaaaacaggcaagatcaagtcacctcctccagccaactggcgactgatgtcatggggtctctctgtgtgtccaaatttcctctctgtgtccaataatgacatctgtcctattgaactaggacccaccctaaaagcctcatggcaccccaataatgacatctgtcctattgaactaggacccaccctaaaagcctcatggcaccccaataatgacatctgtcctattgaactaggacccaccctaaaagcctcatggcacccctttgaaggccttacacacacatattgtgaaatacatttacatgttagcgtactgggagttagggcctcaacagagatgtccctgtttccaatgctttcgtaatttctttttgaaaattgctatagtactttattttcatttgattttctactggaaatattaaaattactggaagtccattcaattcaagtctgaaaaataaagaaatgcatttgacagagaaaaaggcatctgtcagaattcaagtcagagaagaatgatgtagaaaaaagagctggaaaattttctaggcagtcccaaccaaaaagacattgttttatggcataaatc

SEQ ID NO: 469557 - DNA, 895 bp, Homo sapiens
cagcatcagcttcggcagagaggtggaagggggtccataaagatggcgctgactcttcctggtgttgatcatcctcagagggcagaggagcaggcccatgggaaagccactgatcccctgaacaccagaagagacaccgtttctaaggacgcatcagcatctccttcacaaggccttcacaaggcgttcctttcccgtcctatctatgcagcagaggccgactggcaggatcaccacagtgttgcttctgcacattccatcactgtccacgctggggaccacccagaaagaggtgcagatgccctgagcaatgctgacacaggaagggtgagcattccaggtggagagaatagcaaatgccaaggccctgggggacaagacggggaagccagggtagggcggggaggttactggaacgtccagcaagggacgatggaggctgaggccagcgtggcatccacagagatggtgagaagtcatcgatttctggatactttgaaagcaacgtggacaagatttgctgatgaggaatgagagcaacggaggcatcaaagatgactccggagttttagacccaagcaactgaaaggcaggctttcccactaattggaatgagaagcttttaggggaagcagaaagcagggcagttgctggaatatggatattttgttgcttagttggctctatttagtcattcattatttacctattatttgttaattatgttttttatactgggacaaagtcacgcaaacctacaaaatacgtgtgcttcgtaaactgttaaaagctttacttctttaagtaaaccaatgttaccagttttaaatattttttgttgttgctgtctgctttttagcatcgcgtagaagtaataaaatagatgggcaatagc

SEQ ID NO: 469558 - DNA, 550 bp, Homo sapiens
gatattcacgtactcaaagaagacctaagaaatgcatggatgctctccagtgtctctaggggctgttgcagacgtcaagtcgggtccaagtcatgccctgtcacacgcgcatgcagcaccatcagccacaaaccagttggaaatcaaagtcggttttgaaactggagggaaggactttttaaattccagggcattgtatgtgctggccaagaaaccctacaccaatgcgaaggctccaggaagtcgtcttcaggaaccaagtctattttgtaaacagacagccagctttggatttaatacaaatacacataagccaccacttgttcacaagtcagggcgtgagagtcttggaggagacttggactctgttcactgccatttttctgaccttgtctgcaataaaatctacattatctgttccaaatctgttatgcataaatgtcattatcacaaaatcaggaaaatcgggctttttaaaaaatagctttcttgaatgctgatttatgatacatttacccatcaaagcagagacatcaacaaatttctattt

SEQ ID NO: 469559 - DNA, 994 bp, Homo sapiens
gtggtttaacaccatctcctttggtgttgtcatggtgagagtgagttgtcacgagatctgattgtctataagtgtgcagtgcctctccccgcttcctcctgctccagtcagctcctcccggcttcctcatcatctttgatgactgcctgttcacagcaggccagcagggctttgcagacactgccaccactgggcgcctcatactgccagccatggtcaaccctactgtgttcttcgacatcaccgtcgatggcgagcccttgggcagcgtctccttcgagctgtttgcagagaagtttccaaagacagaagaaaactttcatcttctgagcactggagagaaaggatttggttataaaagttcctgctttcacagaattattccagggtttatgtgtcggggtgatgacttcacatgccataacagcactggtggcaagtccgtctatggggagaagtttgttgacgagaacttcgtcctgaagcatacagatcctggcatcttgtccagggcaaatgctggacccagtacaaatggttcccagttttttacctgcactgctaagaccgagtggttcggcaaggtgaaagaacgcatgattattgtggaggccatggggcgctttgcggggaatgggaagaccagcaagaagatcgctgttgctgactgtgtagatgggcacctctggcatgaagatcttatgacttgcttcaggggtgaggggcgggagaaaagtcagaatgactttcctaggttttatagtttgcttcagaaatgccgaagataattgtcttttaaaggtaagaagatacttgaaaccagatctgcctgcattccaagccctacaggagctggaaccttttcacagttgaagcacaatttttcacttttaattggttagcttgtaatgggaagattgtgggacaaaaagcaatccttgttctgattagtgatggaggggacctgtgagcgttgggaggtttggaggttgta

SEQ ID NO: 469560 - DNA, 813 bp, Homo sapiens
acgagagaaagaacaggaaagaaaactttcttaaccctggcagataaggtgtataagacccatgctagaccccaaggccaactctcctatggtacacctggcgctgtttcaaccacttttgttctctagctcgcattggaaagagattaagaaaaggcatcattggccagaagagaccataaggctctattacaaatcagggagactcactctgcaagctgtacacacatttgacgatagtgagtgtggtcaaatgtgtgagtttggtcctgttattgtgtctgaaggcgcctgggtgcagctctctgagaaccccatgggccacactgtaagaaacaccatcccagggctctgcaatatgagcttttcccaactgggaatcagccgcacacacttttccgcagatccttcaactcaaaataagactgaatgtgacacacgagtacatgcagcaggccagtcagggggaggggaaggactcagggctcctggggaggagagcacccctagattagaaactgagggtgtctgttctgccctggatggggatcattccatgggactccaaaagcttcttccaggaccccaggattttgtcaagggagtttggggggcctccgtggagcaccttgggctctccaagaatttctggggcagataattgtttctacagtaagatgaagggtttatgcaccaagaaatctgttagatgttcctgttagacagttcctaaatcagggactgtgtaaacatacttttaaaatgtcactaagcatttagtgttattttcatcaagatttttatgtatttagg

SEQ ID NO: 469561 - DNA, 678 bp, Homo sapiens
gtcttctttcaaagtttatggacaatgattgcattttatgataatgagaacaaagtgcatcactgtgaatagggtctcaccacctaagtgtgcagcaattgttggattggtgagtggtgttccggactggtggggaatcccttgtaaatgtcagtttgctattttcattgaatggattggttcattttggcatctgtggttgaacaaaaagatgaaagtcgagggccaagatatggactttgtgtattgttattgggccactaagaagggctgccctcggacagagccaaggagaacattgactcattcgtcgtgtgcagacctttgcggaagatgccgatgtgctcaaggcatgctccctcatggctaccatgagaaaacaccacagactggatggcttgaacaacaaaaatttatcttcctagagttctggttgctagaaatccaaggcaaagatgtggctattataaattgttaaatagtgcagggagaaatatctttgtgtataaatttatgtccacagtttgaattgtattttaaaatagagctctggaaaggaagttactttgttaaagaggacaacattccttaaggaagtaaataattatttcttacattacatttcagaactgctacacaacgtctatgtccatcactagtatatgaaagagctgactt

SEQ ID NO: 469562 - DNA, 691 bp, Homo sapiens
tctacaaaattataatctgataacaacagaacgttttggtattttgaattctgccttttgacattgctctgaccccacctcgcctctgcatgccctccgacactgctttagctcaggaccctgtctcccagcttcctggagcaggtgcctctcccctggtctccccacctccagagttaccactgtctatggcagtggctttcaaagccattcctggaccagcagtagcagctagaaatgcgttaggaatgcaaatcctcaagccccatcccagactttcagaattggaaactctggggtcgtacaaagaaggaagaaaatgtgaggagacacagggagaaaatgactgtctacaagctaaggagagaggcctggaacagacctttccttcacagccaacagaaggaaccagctttgccgacaccttgatcttggacttccagcttccagactggcagcttttgcatcaggctgtggacactccaacacaagggctacacatgcgagtggagaaaagaattgagctcgtgcattttcagaagacaccagctgtacaagaaatataattttctttgaaacactgacagttttatgctcttgcatcatgtttgtccttacaatgaggacattcgcttctaatatttaacttacagctggaaagacaactttgtattcttcctaggaggtgagg

SEQ ID NO: 469563 - DNA, 593 bp, Homo sapiens
aagattttgcttcatggagcccacatgcttttttagccaacaggagccttcaacagatgagttattttttcctttgtggttttattttgaaatgattttaggcgtacggaagagttatccaagtgcccctccaggccatcctcctggctgggagtaccatggctccaagtcaactctccccctgcacaacccagctctggctacaaggatgtttatcctgccaaactctgaaccagccctgcaggagttctccttcactccactgctgaagagctgggagtccagatttgtacttgcaattttccaggcaggggtaaacctgcctgcagggttcagccaaggggaaggccctacaggaggagagtggctgcgtgcttatgcctcatgttccctgctcagcagtgtctgtatttctcaatggcaggccctcgccctgtcaggtgccttcaccagcagatccagcagtgctgatctccactaaccacttcttctcctcacccctgcagagtaaaatggtgctgtgcttggctcttcattgcttcttattgctttctcttaactccgatctcacctttctgtctccttagactctc

SEQ ID NO: 469564 - DNA, 653 bp, Homo sapiens
gttccgttcttgctggtttaagattctcctttgagggaagagtcggctttgtttatctttgatactcagagaaatagttcattgttgtaaaaaattatttcctcgctaaaaagccaacggatgttggacagatttcaccttcagtatactgctggagggccagaacaaggagttaatgagaacagcatctatgaggcgtgccatgactgttgggtggagcagagagggcagccccctggcattgggcaaaacctccttctctgcggcagagttgagaaaatggagcacaaaggaactcacccgtgtgctcagggtctgtggtcagggaagggtcctggtgggagcagaggctctgcaggatcaggccctgattttggggtggaaggcccaggatggcctcccatggagcccctatccccagacctcctcctgccccacaggggatctggatcttcctaccgccctgatggcagtgagcgtgctccggcggctggcatggagagacgacgaaatggatgtggagtgtctcagagccctggggaacagggaggggtgtgtgcttctctttgtttcgccagcaatgttggacaagaaacctctcgtctgtctcaacttttacgccagctctctcctctgaagtggttactctaaat

SEQ ID NO: 469565 - DNA, 719 bp, Homo sapiens
agagttacccagaaaaagtgtgtgtgtctgtgtctttttttttttttttttttccgcagtgagtacagccgctcctaacgctgctgcttcttggtcttcaggttctcctcggcttgttgagccggcggcgcctggcgtttccagtctgcagaatctttcgtatcagggcaatccatatttttaaattcaaccaatgcgggtaagaggctcacatggtgcaaagcatagatgcaaagaagaggaattgagtggctacccttcccgagcctcccgtgtgagaacggaaacactcagcccagaagtgacccatcacttctacttgcgttgcattggctggaaccagtcacgtggtccctgtcagtaccaggaagtactgagaaagagggagggaacaagaaatagtctgcaaatggcagactggaaggtgtctcctgggcttgatgtcactcttttagttgttcataaacatcttatcaaagacctatgtatcatggacctgctctgtcacgcactgcatcatggcggcatgagagaagtcgcagaggatttactagtgtattacacaataaagagagagacaggggtgaggggagtaaggggtgaagagttccctgcctgacagaatgatgtgcaatctgttagatgaaaacatttcttaattactcatttgcaaacttttgagaaaggagatagctgagtgttggcatttgcaagagagc

SEQ ID NO: 469566 - DNA, 716 bp, Homo sapiens
caggatagagctgcacggagaaggggtgggcaggatgcggagaggtgttctcaccttcatgctgctgctcatcggatgaaggtggtgaaggggaaacagttctctgccagcatggagggggatccaccagcagctcatctagttgatattcgcaacctgaagtatgatagggttggcatgcagctgatattggcagcgtgctcactgtcatcagatgccagcttaaatggatgctgcactgaaaagccagcatcctgtgcttccagtgccagccctgatttgtatgaaaccagcaggctcaggtgggaaccagcacaacttcaacagtatcagcgccatgtcttctgccatgtggaccaggggagtgaggtacggcagcgtgacaagagagaaaaggcaaaaacacggcagagggttattgcagagctcaagccatggaatggagcaccttggatgggtcactgccacggccaagggagattaatgaccattgcaatttttccttggattgttccacagggtgcctctggccttaatgaaaaccaagtgaaaactttgagccaaattctagaattattgttcgtgcctttgctcatgtggtcaaagaatcctaatgcaggttcgaggctctacttcattctgtggtcgattagtttgttcattcattcactgaataaacacacctatcacgtgccaggcaagaggatgcaatgaaa

SEQ ID NO: 469567 - DNA, 616 bp, Homo sapiens
gacgcataccagcacaaatggcagtgaccaaggcagtgggtatcctacttaacttttaaagttataattctggagcccaaaatgtacaaaagcaagttagcaacttgctgcccaaatccctgctttatcaaatgctattttaacaagtcgctcttctctgaagtcatgatacatgttacacaaaatatgtgctctcattctggaagaagcaagaggagaggcagaaaatggcagcaagtatggcacagagaagcccagttactagaacgtggatgcaagattaaagcaataccagcagtgacagtggacttaggcatagattcctcctctacctctgtcttctctctgagctctaaaccagcagatttcaagaggggcaaatcaggcaagaggcaggacccttccgtcttcatcagcgatgatatacagccccagggaagcatcgcgtgttctggggaaacgcaccaggaaagaacagtgcctcagacaggcagcttttcaaatggcagtcctggatgtgcaaattcctgaaagctcattggagtttttactttcaagacaatttcagaaggtaatagggtaagttttttgcattgtcaaacattcatttcaaaga

SEQ ID NO: 469568 - DNA, 903 bp, Homo sapiens
gaatataatgatagagcacacatttttttttggagaccgggaagtccaagatcaagacaacagcagattggatgcctggggcagggagagtctattatttgtacctgtctcctgagcgtgggatcttgtttgccttgattggttgcttaggttatctttgtgctcaaccaaatgccgactctcaggcaggcaactggaaaggccccaggttttctgtggtggagaaatcaggggtaccctccaacttcacgtggctaagtgggaggagtcaaatggtcacatgtaatctcacagacaaatgtacaatcagaaatcatcataaatggcaggaaagaagacgatgtcaaaaaaagagaaaagtgggccccgcttgctgcagcctgaagcctgcggaatggagccagcactgccagcatggccagcacgttcatctttgccttcccaatggactgttgctctgtccctgctgggagagcctgggaaggggttcatcttgcagctctagcttgtctcttcctgcccttgccttccttgggtgttctggtttattccagagaggaggaccgtcccaacgagggacataagcatttgatatgcagatttatttattattgccatctgtttctgtgaaagctatttaagtgctaagcagttgcctgaatgatgttcagcattttgtaaggacagtgtttttgccatcattatttcacatggattgccacaaaacgcgaacacagatgggtgaggtcagtaatttgcttattgtgtttctggattcttaaggtgatgtcatttggtccacatttaacactgactttcataataaaagtacttagtttgagaatttattttttgaaagcatgtttgtgaatactcttttttcctccttcctactcatttccc

SEQ ID NO: 469569 - DNA, 1131 bp, Homo sapiens
ggcctgcagcccttttgttttggacaatttcttctatttggaatgggcgtatttacccaatgcctctaccccctaacaatttactgtgactacttagcaagcacttttgacatctctgattctggtatcaaatgtcgagaatatgagacaccgcctttctgcttgtgtcagaagaccagctatcggtgtctctcttccataagtactgtggtttttaaaagtcagaatgattcagcccaggttggttataataatgatggccaggacactgtccgcggaaaagctggcttcaagaggggcttggagggagcacagactgtgaatatacaggtgaggaggaagggctttgaaccagccgtggaaggaaaacaatgtaagaaattgtgtcttccactccatgaagggaagtcatgggaaacagtccacagtctacacagcctgaagggctgtggggatactatccctggcgagctgaagatcttcatggagatgtcgtgcaagtatgaggtgttttgtgggccgcctgtggcagacacactgagctttgtgtcaggtttcactagaagaagagattaaacaaaatgtagatagaactaaactaaattagtccactattttagattgtaggcatttgttactgaatttttcagactctctcaaatttctggaaggcttttgaagattacctggctttgtgatttatcattactttttaaaattttaaggatttttttttactttaatccaaagtaagatagtagaaactttctatttttaaataagtcattaattatgtattaatccagtaatattagtgtatgtattttgaaattaagtcatactattttaacttaaattgatttcatcattttttaatatacatctaggtaaaattcacaaaatatgtataaatcaatttcttagcttgggattgaaaactaatgctaccttaatatcacttacacttaataccactttagcaacataaatacaggttaaatttatttcatccataggaaacaaaagagagcatgctttaatcaaagctttcaccttcacatatgttgtaaaacgtaattttatgttaatattgagaataatatctctttacctaatataacaataactttt

SEQ ID NO: 469570 - DNA, 1493 bp, Homo sapiens
tccttcgttactgggtgcctcagcgccaaacaggatccaggcctccgccaccgggaacctcttccctgaagacaacgattgttctttctgaggaattggaggcacatgtacacttatgtcgagccatcattttcactagttaatcttgcccctggcttggctggggaaaatttaacatacagcattggggaattacagatatctagtgaactgctgctgttggtggatttgaatctagattttccctctgtgcctgctgccgcagtgaccagccaagttgcctctgactttcgtgtgtcaaaggaggatgctttcaccaaacaagacaaaacaggagaggctcttatcactaataagcaacaggcattgcaccaggcaagccaaaaggacgctgacttcctcgtgttcatctgttgcttgtctcttctggaactagaggccaagcttataccacatgctggagatgagccaggaccctcctgtgatgaccgcctgttccctgcgaaagcagaaggggacgtggccataggtacctgttgtgaggacaccctggggcacggacgatggtgggactggaatgtgaagaacccgcagcagaaggccagctctctaggccgagattctattgcagcccagggctgggattatgagagtggcaggggcgagaagaggcaaggttatggagccatgcctgaattaaaaccaagaaaactgggtgacttgaatgtggggctatacaagaagggtagcaccagcatctgggtgccatgggagggcttcaggcagcttccactcatggagaaaggtgaagtggagcagatgtatagagatcacatgatgacagagaagcaagggaaagaaaagagggagagaaagagtggaggttccaggatcttttcaacgatcaattctcatgggcattgcaagttcacagaaagttttaaaagcgctgaaactgtttaccacgctatcatttcaaaagcaatagaaatgaaagcaaaaggaaatgcttcaaccaccttcattaagaagttcattgagctgctcatttcaacagcaggctataaacagagaaaacagcccttagaaataaatattaaaagctcatctccatagaccaataggagagaacagagagctagcaacctttgatatcacaagggagaccattcctcagctggaaatgtaccaaagaaaacctttccaagaaagaaatctttttctgagaataaaatggaaaatttctaaaatcctattaaaacactcagtgtgaaataatagaaaaaacttaaaggatgcatcataaaataatatagcctaagaaatcagcaggttataacagaaaagaaaaaataccacctcagtcatgttaataaaacgagaagtgaaattaaacactataaataagatttcttacagtctttaaaaagaaaatggtccaaacagaatacattttctgaggcttaactgtttcaaataatttcttttgaaat

SEQ ID NO: 469571 - DNA, 913 bp, Homo sapiens
tttagccaacagcagaattgctgaatcctatgataattctaggtttaattttttcaggagctgctatactatcttccacagtggtgaaaaattctccttgtgtcactgggacctttcctttgccatggcttgtgtacattctcaagtagctttcagagttatttcaaaagaagtcgggaccagcgatgccagcatggctgagcttttcacaagttttacacctagaaatgggtggtacagcaaggtccaaggcaaaaagatggctcctctgacctctaggacaccccacaccccactctttgatccagaggtgttggagcctgtgaggaaggatgaggtggcaaggctgatcttgaactcctggcctcaagccatcctcctgccttgtcctcacaaaggaatggaattacagaaacatccctacgttctgcaaagaatcccattttttgttgactttcttaagccaaggcacaactccctctgactcctcccgagtgtgagcccgttccatctgcagccaacacttccggaaaaagagaagagaggggagaaacaccatctcattgttggcatgtggtgtgacgagccaagtgatggcccttcccactcggtcttcagcgctgagaggagcgtttcttctccccaagaaaacacatccagtgattgacctcagccactttatcctgggctgaccatgggattaggaccacaaagaaaatatgatcaaggggttatgactcttaggcaaaaataaagattctattttattgtttttaaatacagacattttattaagaagttaaacattctataaatttcaatctcactaacggatattagaaatttttagttattaaagtactcatgagatgttttaaaattaagcatctatcttgataaatgaactctaagt

SEQ ID NO: 469572 - DNA, 1533 bp, Homo sapiens
gagaccttcatgtgagaagcaggtcacgagaccctcacgtgagaagcaggtcacgagaccctcacgtgagaagcaggtcacgagaccctcacgtgagaagcaggtcacgagaccctcatgtgagagcaggtcacgagaccctcatgtgagaagcaggtcacgagaccctcatgtgagaagcaggtcacgagaccctcatgtgagaagcaggtcacgagaccctcatgtgagaagcaggtcacgagaccctcatgtgagaagcaggtcacgagaccctcatgtgagaagcaggtcaggagaccctcatgtgagaagcaggtcacgagaccctcatgtgagagcaggtcacgagaccctcatgtgagaagcaggtcacgagaccctcatgtgagaagcaggtcacgagaccctcatgtgagaagcaggtcacgagaccctcatgtgagaagcaggtcacgagaccctcatgtgagagcaggtcacgagaccctcatgtgagaagcaggtcacgagaccctcatgtgagaagcaggtcacgagaccctcatgtgagaagcaggtcacgagaccctcatgtgagaggggccctccctgtatctggagggacaccaagggaaatctgaagaaacaggctttgctttccacagtttgctacactcagctcatacttttttagtcctatcacattttcccatggctttccactcttcacgaaagctaggatcttcagttacctatgaaggctcatgagtcacaaacagcttatatgaaaccagtgtatatgctgttctcttggcaatctgtcttttgttgcaggggcccagatgatgaacctaagacggttagaagaaacaggtgtttttcttcccctacacggttttccatgtgatagcaggtctctcagctgtggataccagcacctgctctggtggagggagcaggagactgaggtggactctgtgagggtctttggctacaagcctcctgctgagaaagcaagcagactcacatttccttggctgtcccagagcctggagcagcaatccacctccttcaaagggtctgtggattctcttggctttcctggtatgttcctgcagtacttcctggagcaaaagttcacagtgtgggtctccacatgctgctccgtccatccaagtgggagctgcaagaatgccgaagttctaatgcaagtgaggaagtctatatcccagcttgtgtgcgggtccctggattctgctgctggtcgtgcggggcctgactcagaggtgaaggccatggtgtccctcactgcatcttccattcttctgggcaaggcctgagagcagaggccctgaagcccagggcccaggcccctcagggaagcttctggtgtaaagcaaaaataaaatgctaagccccctaaccatctgaatgaacccctcttcttggaatgccaagggcattccaaagttaatctgaaaaacgagttcaggctatgatgggaagcaggggttggacatgcctcaatataccttccgcccttttggaatt

SEQ ID NO: 469573 - DNA, 1100 bp, Homo sapiens
ggagttgagacatgactgagaagtgaggaagaggagggaataatagaccacaagacaatgagtactgtcagacgtagagagagatgtttcgtagcagtgaaagtcacttatcaagaagacatgaccgtcataaatgtgcggatgcttaagaagagtttccacatacatgaagcaaacattaaaaaaattaaaggaagaaatagaagaactcacatttatagttggagattttcacgtctctttcacagtaattgggcccaaaactactggcttatgtggctccctgtgggtaaacggatgtgggaagtcagcccacattctccaccactgtcctgcaccttcatttctggacgtcaaatccctgaatctgtagagtgtgcaaccagacagccgtgggtgcagggagagccccaggaggtcagacctcagcctgaatatctcctagatgcagcagtgcttacagcttttggtccaaaccagaagtgccaatcactcatggatgacccaagccttgggtctctcctctgtatggacacggttgcctagggctgtctacatgggagtcacagcgctgtccagatcacaggggccccgtggctgtctcagctcatttctattttaattctctctagacctagatagatgcaagcctctccaaaggtggagcctcaaggaatctgtgtaaacctaatgttcacgtccgttttcttgctcagaaacattaagctgtttccaggccagtgatatccagtaggatttccatggtgagctggagtggttcctgtctccaagtcatctcaaataagcactgcaaattttctaagacacagataatttcaattagttttattgataggtcaaactgccctgcaggtgtgttttgtgaagtgttgctaggaaataaaaaataaataatgacaaattgtcactgctccaaaaattttttggagcgactgatcaatggggcaaggattaggtttctcttctatgccaataataattataccgttgttatgggttgaattgcattccctccaattcatgtgtggaagtccttagtccttagtgtcttcgaatgtgactctatttctaaatgtaat

SEQ ID NO: 469574 - DNA, 2406 bp, Homo sapiens
gtgacaaagaggaagaagaagaggttaaagtcggctttaatgccatgtctatcagtgccgtcccaaatgccacgagcttagtgtccttctggctgcctgggctggaaagcatctgtccggaggggacggtgcccaatgacatcttggtccaacgatggcacgagtgccaagttaggaagacaggctccacgggcaggctgagaaccctgttggcagcatccttgagcgcatcccggatgcgttctctgtgcgctgggcatcagggccgccaactgctccagccacactgctgcaattcgatggcacaaagcgaaccttccacagaagaactgttctgggggctgtccctgcagcagagagaagagtgtggtggggggaaggagtccacttcccttggacacacgctcccaggtggtctcctggatgctaccacctcggcacccccgagctgctgagcccagtctcccgaccctgcccggcatctctatggcaccacaaaggtttatatgtaacttgaggccacatcgtggatcccatgggtatgaacaaaggaatcctttcacatgaccccaacactcttgttttgggcagggatttttcagttacacatctcaaccggcaaagatgtgtgagagactcataatgctgtttctgcacagaacctttgcacacctcctgttaaatacatttgacagctgatgtttttactcatgtttctgtttgttactcgtgtacagaagcacaactgctgtttttttaaaaacattgaccctatagccgggcattgtggcatgcgtctgtagtcccatctactccagaagctgagacgtttataagaatttactggcgaattcatttgggattaaagagttctttgcgtgaaggttttaagttacatcttcagacaataaattcagaattaggatgataaaggattttttctttgtacaaatttccaaaatatttgtactttttaaaagaatttgtctatcttatgtaaaatttcaagtttattgaataaaaagttgcttataatatcttcttattattttaataagattagatgtgcccttttatattcttgaaatttttataccttccctctttttttgatcagtctcaccaatggatgattagattttttagttatttcaaagaaccaaataaaataatggttttattgatcttctctattatacacttatttcctatttcattaatttttgcttttatcttatttttatagtttctttggatttaaaatgctgctgtttttctaacttcttaaaatgcatactcagcttattttggcttttttcccccataatatttgtttctaaattcatacttctctttatgcaaggctttagctgtaacctaaaagctactgaaacgtagtactttcattatcacttaattcaaaatacttttaaatttccaccatgttattttctgtggctcatgggttgtttagatgtgtatatgttacttgctatatgtgaggattttccgagtatctttttattacttatttcaagtttaattcattgtggtgagagaaaatatccatgtccttcaactcgaatcatcttttatcatgggcatcctagtgggtgtgagatggtgtctcactgtggttttgatttgcatttccctaatgattagtgatgttgagcatcttttcatgtgcttcttggccatttgtaggtcttccttgaagaaatgtctatttaattgctttgcccatttaaaaatgtttgttgttgttgttgttgttgagttgtgggaattctttatatattctagatatcaaccctttatcaagtatctgattcgcacatattttctcacatcccatgggttgcctttgatggctgtgtcctgtggtgcagttttaaattttgatgtggtcaaatttatgtcttatttcctctgttgcccgtgctttcagtatcatattcaataaattactgccaactgcaatgtcatgaaggtgttcccctgtgtttccttctaagagtcttatagttttaatcttatgtttagtaagagttgaatcttacaaaacaatatttaataagagttaaaatgataactaatgtaagtgtattcatatatggtaattactattaagtaatatttatacgtggtagaaggtaagcgtccatcttcattcttttgcacgtgaatgaatctctaattttctcaacatcacttcatggcaagactcctttttcctgcattgaatgatcttggcacccttgttgaaaaccatttgtcaatatatgcaagagtttacttctgggctgtgtattttattccattggcctatgggtatatctttataccagtaccacatttttaaaactactatagctttgtagtatgttttgaagtcaggaaatg

SEQ ID NO: 469575 - DNA, 1002 bp, Homo sapiens
ccactctgggtctcctctccactgagagctggacactcatcaagatgagctgcctgcagataggagctacccactccaggtctcctaagagctgtcctgttgctcaatgaagctcctctcccccttgttcaccctccagttatcctcatacctcattcttcctgaatgcaatgagaaggtgagaagagctgtggcccttctgggagcccagccctcggggttccctgacctagatgctggcgcctgcaatggaagctgcctgtggtacgtctggtccagtttcagcctctcacagagctggcacctgtgccggcacctggggctgcctgttctgccacagcagccagtatgcctggctgtgtacagtggctggaccctgcgcttgctcgcccacatatccctcgccactctgcgtctggctcacccttggcaggaacagcctacatctgtggcccccaagggcttgtgctctcccaccagcttctcctcatggtgtctggctgcatctgccccagcttttgacatccacaagtagaaactgagatggcattcggattttaaaatctactcgtgcttttgagtagaatccgtagatcaagcaagaaacctgtttatattttgaatagatacttgtagacctatttttaaaatggctgtatggcattctatcttataattatgtgatagtttatcccctttttctattgcaactgtgcttgcacacatttcttgtgtaaactgtgagtgttggtcagagtatatcttagtggacaaactgctaggttttatgaaaaatgcattaaaaatgcatgacattaaaaaaatctcatgcaagacattatatgtatatgtataagtgtatgtgtatgtatatgtatatgtatatgtgtatgtgtatgtatatgtgtatatgtatgtgtatgtgtatgtatatgtgtatgtgtatgtatatgtatatgtatatgtatatgtatatgtatatgtatatgtgtatgtatatat

SEQ ID NO: 469576 - DNA, 1695 bp, Homo sapiens
ctctgcttaagtcaaatgtaggtgacctgagctagtgcagagtgaggcagggagagtggtggcagggggcaggtgttcacttctgcagctgggtccagcagtgactccccctcatcatccagatcacagcctaatgtcacttccccagagaagcctcattctacgattgccaaaaccaagccccacagaccgggtggcaccaacaacagccaggttctcaaggtctaacttctcctcaaactctgcttcttcgtcaaagcagtcaattcggtgtgcgacggtgcagctgctggaagaccaagttcaccgccacgtgtgctggggtgattggatgggccatgtgtggcatcctggttgggtggaagctgccatcatgtcctgggaggaccttgtgtcacagtcccagggaataatgaatctcaccgccgtggaggtgaacaaggacgcccggttcatgaacctccatggaggttattcttgtttccttaaagagatagtgaattctctcatgtcagagaccgtggcatgcgcctctttcatgggagatgcagaaaagctatgaaacaagctgtctgaagcagaattgaaaggggacagggagagatgggcaggcaggaggaatttattttgtgctgactgtgcaaggtgcagagctaaggctttccatacacattacataaactcaccctcacctgcccccaccctaaaagactctgaagaaagtattattatgcccatttaaaaaatattaaaaaaccaaaagcacagagagactgtctcatcctggggtttggttatgatgtggcaaagcttggtttgaacactggtgtgacttccctagtctagagttgttcatgctgagatgggaccagtaaacacagggaagctgacatgtaccctagtatttagtaatagattctaaatgagtcttctcagagatgtacgtgtcacaaaagatacatcacagttgtgggaattccacagtttggaagaggcaataaatccttaaagaatttttgtatcattttatgttaatagaaattttaaatattttaaatatataacttactatattccaggcaaaatgctaagtgctttgcgcatcttacctcatttaatacacacacacacacacacacacacacgtgatccagtgaggcaggtgcaaatatcatccccattttgcagatggtgaaattaaagctaaaaataccacagccaagaaaatcttgaaaaagaacaaagttggaggacacatgctccctgatttcaaaacttattacagagctacactaatcaaaactgtgtggcagtggcataaagagagacatatagacagatggaatgaaatagagagcccaataaaccatttttggttgatttgtcatatatggttgaatgatttcaacaagggtgtcaagaccattcaatggggaaagggcagtcttttcaacaaactgtgctggggaaactggatattcacatgcaaaagaataatgttgcagccttacttaacatcatatacaaaaattaactcaaaatcaatcaaagacctaaacgtaagagctattactataaaactcttataagaaaacatagggaaaacttcatgatattggatttgctaatgatttcctttgtataacaccaaaggcacaggttaaaaaaataaataaactggacttcatgaccatt
